United States Patent Application Publication US 2011/0014706 A2 - sequence listing, part 21

SEQ ID NO: 37628 - DNA, 4556 bp, Arabidopsis thaliana landsberg
ccgaaatccacagccttctcatgtcgatcctctccgccaccattttcgccggaatcctcctctccgctgccgcagagatccgtgacacacggtggttatggcggcggagcaaaaccgccactcctctccaatggcttctctgtttccctctcgggactcgtccctctggtcgtgtcttcttttggtcatacgtgttttacctcacgcgctttctccacatgttccgtacgattttcgccgttttacgtagccggaggctcgccgtgtctcagctcttttgtaactccgtcatggccttcacgtctttcctctggctagaattctcgcagtcgtaccagattctagcgattctatcgacgactctggtttactcggtggtttacggttatagattctggaccgggtttggtttacccggttcggctttcccttcgtttgtggtgaattgtcagttggttctcgtgggctgtaatctcgtgtctcacgctggggttcttacgatgcacctctttaaaggtggatgcaatggaattggcgcgtggggtttaaactcggttctcaacggtgcgattttgttgctttttcttaacttttatgtgagaatgcattctccaatgcgacgccgtattaataaaatgaatagccaacgtaacgcttaagaattaattgatcctttttactagtttttactttttactcaataaaacaaatctaatcttcttttttgtctttcacttttaaaactgaagtataatctaatttgttttctaataactaaaatgttctgcgtctaggtctgtacatcttctcaaaccgggacaattttttttttataaaccatcgatctctgactttgcatgagatattttacatttgaactattggctcttagttaacgcaatctagttcttgtttttcattcttttaaatctagttttgtgttttttaagtggaaagaaattatgtcgattatttctaaataaaaatatttatttatttcataagaggtttttgatccaaagactcaaacttggggtaactttatgacgtagatataccacaatacccaccaaaatgtggtgatagaggaaacaaaggtttacatggtggatcatggacgaggatgatcaaaagcttatactctttaccaagtgaaaatgcattttggataagaggaaaaattattaaaagcgagaaaacataatatggtttgagactgatgtgttagattgtaagagctgcaattgtatctctctacttggggacacacttttgattttctatttaccgtttgaatgccgtataaggaaatgtacaggtcaaacgaatatggtcgagtgttcgccttagaccattgtataaggaaatgaactatgtcgactatatttaatatttgggcctagtataatattactacacttaatcaaagttaaggcatttataactgtagaacaagatgggcctaaggcccacgttttctacttaactaggcacacatatgacatatcccatagtaaaaaagcttacataataaggcccacatctgaaatctgattctccactgtaaaaataaaatcctcttaagctctcgatcgatggttctgcaatctcacaaaccagaaacaaagagtccaggctcttgcaaccaaccgcggaacttgttgaaaggcgacgaggagagagaatttcaaatctctccagatcaaagtgaaacacaagtacaacaagtaaccgacaaagtgaagcgcaagtacttgtttctttccttttcctttaatatttgttaatttgagaaaagtaaaaaccataaaatatatatagtttctgtccgaatcggcctatcttcacaaaatctcgattccaatcaagaatttatggcaagaaaggtcgatcaatcaatcagatgattatggatctagagatctctaaatttgtgttgttgtgaattgagaatgcgagagcattcgacgatgtacaattacgcccccgaagtgccaccgcaaagtaaaaggaagaagacgatgaatgaggcgtctccgtcgtggtctggattaccggattctgtggctgtgagttgcatggctcgcgtctcgagattggaccaaacagccttatctctcgctccaagaaataccgctctctcgtaacatcccttgagctctgcagcacgcgatcgctgattggttgcactgagccatctttcttcgtctgcttgcgcatcttacctgatccaacccctcgctggttcgtccttacgggtagtcgtcgactgaggccggtcccatcgcacccctatcaggctccggaatcatcttcttttgtggtagtgaattgggggatctatgttatgtaatcggtggaatcataaacggcaatcccacttccgatgtcttgttcctcaactgtttttctcagacatggcaccgcgtcccgtctatgaagatggctcgtgcttccgcatcggcaagcctcatagacgggaagatctacgtttttggagggtgcctagaggacgctgattcctcaaactgggcggaggtattcgatccagtttaccaaacttggggtatatttaatacgccgaagatggcccatagtatcaaccaaagtgtggtgatagaggagaagaaggtttacgccgtggatgaggaggaccaaagctttagcttcttgccaagtgaaggtagaatctggaaaagcggaaaaaaagattctaaggtaggaagtagacacgattggtgtgtcattgggaaattactatactgtcgtgctactcgcggtagaatactatggtgtcaaccagatgagttggactggaaagaggtaaaaggtttggaacagctacaattgtatctctctggtacaagatacatcttcagacgtacctctgataaacgaccgtcaaagaccaacgtcaaatatgatattagaaaaatctctagtaactctgctgggaacattgtcatcttcgggaacgcacatattggagaccctgagtgtgtggagctttggtctgccgagatttccatggagaggcgcgagggaggtgagatttgggggaagattgagtggtccaatgttgtcttcaaacttgatcctctctcaaactcatatagcgttgatgtcttattttctgcttctgtccatttgtgatatattcattccaatatttatttgtattgcatattactcaacgaatcagattgtgggatataagcatatagtaggcaattaatcatttaacagtaacaacataacagttacagcctctttcttttaacaggtatgtggtggaatttgatgctgaattctcattaatgactcgtcaccaacataacaggtaaaaccaacgtatcttgacccttctagaagttaagcctctctatgcttgtgcatcctcaactgctatagcagcatgcatgatgcttcagctgctcatgagtgtgtaggagctgcagaaaactaatcttggactcctcctataaggatcacacccaaggagaatcttggtgaccaggtttttgtgtggaaggaaaatgcttgcttttgttgcgtatagattttgaggaaacagaaagcagttttagtgaacatataataattaggttttatatgcatacactatgaaatcaataatacttaagatcaaaagaaaatcaaattatccttgtaacataaatagtgattcacgaaacaaaagttttgcttgcttccacatagtctccataggcgtcttcttctctgctttccaagctctttatcctgcaatacttgtagtagatatactgcagtattatctgttttgatttttcgaattaaggtagcaaagctcaacctaatggcaataagataacttgttttccacgttgagactgtgcaaatggttagaaaaggatacaaatagatctagtacgacgcagacaatagcatcaagcaaccaaggaaggtttgatttgatgttgtcccattcagttgttcggacaagaatactaccaacatatgttgcattggctactagcgcgaagatgaacatcagtggattcaaaccctgccaaatatcaaaacatactgtttgttagatcgcataccacaataacatttaaagtatacataagggaatatctgttggttgacttgtagttttagtttttttttacctcgacgcttcctcttttgatctagttgtagagaaaaaaaaaaaaaagattagtatccaatatcataaacaagaagccaagaagaagtaaatcaagatttgctaaagatggcttacgttgagccaaatctgaggaatgcgaccgcccatgtaaatggcggccattagccatcccaaccattgtcccaacgcgctatgctctactattctttcctgcacaaagacaacaatgttttgatatcattttctcgcatttcactcatacctttaaaacaacaaaatgctatatgtgtcacacacgtttagaagccgtctgcttgaagcatgtgcataattttacaggtaagctctttgcctaaagcggaagactagccgatgcagccaaaaacgttccaaaacc

SEQ ID NO: 37629 - DNA, 1904 bp, Arabidopsis thaliana landsberg
  unsure (1)..(1904): unsure at all n locations
tccagctatctaatcaagcaatggaacctaaagttgctcgatgtaatgttcttttcatagcagatctccaagcaaaagggaatgaaccaccccaactaaaactcctggagaggtcatttcctgtaccaagaggtataactccaacaggaggaatatgtgatttaccatctttatgaagctcaccgagacatccaagaacccaaccaacggtaccatcaccgcctgctacctatcatcaatcatcgccgctaacttagcaaatctaattccaattgctaactaatactttggaaatagatactcaccatgatccgtatcttttctctgcattctcttgcacattcatctcctttagcagccaatgtgtccaagcaccccaaaccgtaccgtacaaattcatgaggcttcacttctgtgagatcaantaccagtcattgcaaatattaacatgagctcactaactaaggaggaatcacagtctttttaagacaaaacagtttataacttcttctaaacaaaattacagagaaaaaaaaaacagaacatttgatgatgtcagaacaataagaatgccataggctcatagttatactcattaaaccataacagagtgtgtccattcacaatcgatccacaaatctagtgaagtcaaaaagaaagtaaactcccaaatcaagatttaaaatcttcttcattcaaaaatagtgatctcaagttcatttcaaaagttaagtaaagtgagctcatttcataagttgcaaacaaaaaaaaagtttttgttttttaaaaaacagacctgttcttcagtcatcaattgttgaagcctctctttaagaacaggaccatgacgaccaccacttttcgggttaataaacacaaccattggcgcgtgaggagccatatcagcggcggcgcctccaggaagtaacaaatgatcagaaatctctgttgaatctttcctcttgatacaatctctcatagctatacgaagatactcaggcatcgctagtctccctcgaagctcttctttgtctataccaaccaaggcaagattagcaaaaccacaacctctcatcgtcactgcatcatcggtcttcgccgacggtctcgccgccacgaaattagtcgtcgatgcttcgccgactgatctcggcgtctcctaaaaaatcagattcttggagaaacaaattaaaatagaacgtaaaaaaatgatcgaactttgaagacaattcaataagactaataaattgacagttctgtgttttgttttttaagattagttttcgaagacagagcaaatcaaaatcggtgtacttcgatgtgcgtatttaaacgtgtagattttgcaactttttaaaaaaacgacatgaaaatgcccttactagtattacgaatttacagaattgccactacttttaaatctcgttgatttatatgtgaccatcttttaaggcgaatgagaaggaagttttttttctatcgtaagactacaaatttaaagttttttttacttgttaccctaattaaaacccctaataatacctgcacattttgatatttgacttgtaaatgcaaaactatgtaagtttacagaaagagagactattaaatgctttacttgtcacgttaagattgtaaaaagggtaaaagggacaattaaatgaggcagtggactgtgtcaggatgtgacatatgggccgcatatttatgactatattgccctactgggtgtggtgtgttattagatcgtgaagctgtccaatattcatttttcttttctggttagggagatatgcctatatatttattgcatcctatataaccggtgcgttacataactattttatttcaactttcatttacataactcacgtatgggccgaggcggtgacctttatgatcca

SEQ ID NO: 37630 - DNA, 3025 bp, Arabidopsis thaliana landsberg
agtgaaatttatagattcttgtaaaaagaaatacaacatttttctttgacaaaaaaaaaagaatttcaatttttttgtgtgtaggtttgcaatgatctttagttactatatagtagtattagataatgaattggccataaatttgttatctcccaaactactgaagaaaagataaaataattgtggtctgacttaaaagtcacatgtctcatatcatgcgcagccatgcaaacgaattctcccgaataattcttcactatttaatgttctacacgattttgactatagactttaaatcagtttcattgaatttatcgcaatattttaggttatttttttccatgttttagtaaagtgcaaaataaaaataataatggttcactagatttacagcatataacaacaaaaggactagctctattttttcttttgtaattttatgcaatcgtataaaagaaataatattcatgttttttaagttttggaaattaagtatttctgccaccacctaacaaacagggtccatttcttgggtatagtacttttcacgtccaaacaagatctacatttattataattattgtatccgtataacattatcatcataataatgatttatatcatccgaccctcttataataaatgaaataaattcacggatctaagactaagattacaatcactaatagtctaatataacatttttcgattactccaacatcaaaatcaactctttttttttaataccctcatactcctctatcaagaacaaaaactaaaaaaaaaagtataacacaaaccgtaaacacgattactaatatattaatgtttaaaattatcaatcgaatcaatgattaaaaaatcaaataaagttaaaagtaaaaagagcaaagaaacaaaacaaaaacacatttagacagctagagttttattacaaaagccaaagctttatttttgatacccccaaaaacagatatctttcagtcttcacgttgcaatatactcacatttcgaccacatactgacaaaaactccgtatatatatacgtataaaaatacggtcttcttcttcttcttcatctcttacaaacacagacacaaaaatcacaaaacccttctcactctctctcaatgtttcctctcatcttcttcctctgttctttcctctctcttttcctcctcccgccgtcaaatatcgccgccgtgagtaaccacaacaaatacctaaagcttccactactacgcaaatctccgtttccttctccaacacaagctctagctttagacactcgccgtctccattttctctctctccgtagaaaaccaatcccattcgtcaaatctcctgtggtctccggcgcagcttccgggtcgggtcaatactttgtggatcttcgtatcggacaaccgcctcaatcgttacttctgatcgccgacacaggaagcgatctcgtttgggttaaatgttcagcttgccggaactgttctcatcattctccggccaccgtcttcttccctcgccactcctcaacattctctcccgcccattgctacgacccggtttgtcgtttagtacctaaaccggatcgagctccgatatgtaaccatacccggatccattccacgtgtcattacgagtatggttacgctgacggttcattaacttccggtttattcgctagagaaacgacgtcgttgaaaacaagctctggtaaagaagccaggttaaaaagcgttgcttttggatgcgggtttcggatctcgggtcaatccgtatcaggtacgagtttcaatggagccaatggagtaatgggcttgggccgtgggcctatttcttttgcttctcagttgggccgtcgttttggtaacaagttttcttattgcttaatggattacacactctctccgccgccgacgagttatctcatcatcggtaacggcggcgacggcgtttcaaagcttttcttcactccgttgctcacgaatccgttatcgccaactttttactacgttaaattaaaatctgttttcgttaacggtgcgaaattacgaatcgatccttcaatttgggaaatcgatgattcaggtaacggcggaaccgtcgtggattccggcacaaccttagcgtttttagctgaaccggcgtatcgatcggttatcgccgccgtgagacgacgggtaaagctccctatcgctgatgcgctgactccggggtttgatttatgcgttaacgtctccggcgtcacgaaaccggaaaagatattaccgaggttgaaatttgaattctccggtggtgctgtgtttgttccgccgccgaggaattactttattgagacggaggagcagattcagtgtctggcgattcaatcggtggatccgaaagttggattttcagtgattgggaatttgatgcaacaaggtttcttgtttgaattcgatagagatagatcacggttaggtttttctcgtcgtggttgtgctctgccgtgaaggattttacactggaatattccttttcgattcgcataaagattctttttttttttggaagtacgaaacgtaggtgacggttcactgttaccgaaaatagaaataaaataatctttttggagtttgtataatttcgattaaaaaaatagaaatacatatataatacattatatagattttattctaatttttatgtgatgtttttgttaaatgcttagatattacttatttttataaggataaaatttgtaatatgaattgaaattaatactgaaagtgcaatgtataaataataattaaaaaaaggactttttattaaaaattagaaggataatatttcattttttttggtagggagaaggataatatttcattgttacaagattgtttttctttttccatgtaaaactcaatactaatatctctctagtgataagctatatagatcaatactatgagtatgtattaaactatagtttaggtgtcgataaatttgatcacgacttcacgagtgtcattgtgtcaacatttaaat

SEQ ID NO: 37631 - DNA, 2468 bp, Arabidopsis thaliana landsberg
  unsure (1)..(2468): unsure at all n locations
aacaagatccattagataaaaccaaaatgaaattatatgtatatttttaccggcaggtactaaaccggaaattggaagaggcaacgtgggccttatcttcttcttcttcttcttcctgctagattttattcttttatctcttgagcacacacacacatacaagactctcctcacagaacgatttagatttaatcgggaaaaagttcagtcagtgacactaatgttcgaatcgaacatggttctccaaacactatcttcttcttctcctccaattcaccgtctctatcttcaccattctcagattctcccttcttctgggtcacccagcaannnnnnnnnnnnnnnnnnnnntccaagttcctctctttcgcttcacccatagtttacaatctcactgtactctagggtttcctctgttttttccccaatcaagaattttgattcgtaaattgttcttacgatagaagaagattatgtggaatctgaacaagaacagagtcaaaatttacccttttattttgttcatgaacttgctaatcttcctccttgtttttgaacttgtggatgaaggcagatacatggaaggactttggccattcgatcttttcatggtacttcacttcttcttccctgcttaaagtttcatactttactatacatctagatgtttctgcttgaggtttagattgatagctttagattatgtctttgcagaaatttctgctagaggtttaccggctttgaacaaagcttccttgaagaagctaccaatcaaaggatctacctttctgctggggcagagcttgttgatggtttctgctcacccacatttggcagcagcagcagaaatcataaagcctgaaccgatttacgaagttggatgtagtatttgaacttagtattcagctttcttacttgctgttactactggggttgcttggagttggtactttctatgtgatccgtcaagtacttgtacgcagagaactagacctctccgctaaagaattgcaggtaccagacaatgtgctctttgtggtagaaaacagtaggataagtaactgagatggaacgagtctagagtagagatgtaatattgatgtctctcgtatcattgtctgtctcttatcttttaatgctattcacataataattgtagatattatgaacattagacttatttaagtagctatgcttgctcaacgtttttgttaatttgatcaaatctggatgctatggttctattgttgtctttatgacctgaaggagcaagtaaggagcggagatgcaagtgcaacagagctctttgagcttggtgcagtgatgttgagaannnnnnnnnnnnnnnnnnnnnnnnnnnnnnnnnnacaagctatccagaaatgggacggtgatgatcaagatcttgctcaggtaatagacttttacactaataccgttaccaagtaaataaaaaatcaattgacactgcaatatacaattcctgagacaggtctataacgctcttggagtgagttatgtacgagaggataaacttgacaaaggaattgctcagtttgaaatggcggtgaagctgcaacccggttatgtaacagcttggaacaaccttggggatgcttatgagaagaagaaggagcttcctttggcattgaatgcgtttgaagaagttttgttgtttgatccaaacaataaggtggctcggcctcggcgagatgcgttgaaggatcgcgtgaagctttataaaggtgttgtggctgttaagtctaagaaacggtgacggctcaaacaagatgcaaactctgaaccaagaacagttggtctctctcccccttgtgtatctttttggtttggtaatatgtatggagattttgtgttaatatgaaaatgaaactttgttgttttttgtaaccaataaaatcagatgtttaatacttaatacccattgtgcccaaaaaaaaaataaaaattagacttaatagccaataaaatcactcatcttattttttgggaatcgatacgaattatagagttggattatgtcaacaatcaacataatattaagctcacacatcacacatgcaacatatcaaaagaagtaacataatcagaagatgagactatagttgagaaatgagaagtcttttaaggacatttgagtttattaccatgtgtacgaatactggcgtagcaagaacatgattctgtgttgccggaggttcccggcggcactcactgacacttggcgcaacaacttccacaggctctgtgccaaactttcttcctcgatgtcttactgcatctccttgcgcatgcatgcccacaatctataaaaattggctcatttaataaaaaaaaagattgtggggggcaggaaaaatacttagaacaaaggaattagagtgttgaaagagtagactaaatactacttggtcgatggtgaatatgatctcttaaacgccgcagtttgg

SEQ ID NO: 37632 - DNA, 2988 bp, Arabidopsis thaliana landsberg
acgatatctcaaaaagcgccatgtaagaggcgaccatggtgtcccattaggtggaattgggtatgtataaccacatgataagatcactttttttctataagcaacatgttgatcttctctaggaatgttgtaaattttacacaaacgcgtatttttagtggaggaagcatcggaaggagttacaaaggtgaatttcagcagtttaagctcttccctaaaatttgtgaagaagctccaatcctcacaaaccagttctctgtaagtctctcttgtacttacacttacaatcacaaagatatacttacttgttgattacgttttgataatgtttaggtttttgtgtcgagacccggtggcttgagctactccactgttctatgcccaacaaagccaaaatctgtaaagtaagccacttaatagctttgtagcttattataacagttataacttatgttgtatatgtagaggtaaaacagaggatttaggaatagaatcatgggactggaacatggaaggggacaaatctacctatcatgctttgtatccaaggtcttggaccgtatacaacggtatgaaatgacataattatggttcattatagatcaaaatgtttcagattcatgatttctaaagattatagtgaaatgtgttcactttggagaacagagcctgaccctgaactcagaatagtttctcgtcaagtgtcgccttttatacctcataactacaaggaaagcagtcttccggtatcggttttcgaatttacggtaagaatattccgagaagaggaaagaatcttctttttatatgactttatctcaggacatcataacacttttgtaactttttggctaatgtttcatagatgagtaaccttggaaaagaagaagcaacggttactttgctctttacttgggaggtaacttatttcaaacaaaatgatgactatctgtttcatatcttttgaattttcaagaccatttttgtttgtgtgcttacttagaactcagtgggaggagcttctggtttaactggagaacacttcaactcaacaataatgtaagaatctacatctcaatctctattgtcacagcttctgttctttagctctgacttctaacacaagaaactgatttttgatgtgatacatcagggaaagagatggagtacatgcaatagttttacatcacaagtaaacctcttttacttgagccttaagtaactgaaaaatcatctgttttagccatttgaagcggggtttagtggcggtttccggaagatttattgcgtcgatatattgcaactgtgatgaaatgaaaacttgcaggacgggcaatggacatccgccagttacttacgctattgcagcgcaagaaacagaggatgttcatgtctctgagtgtccatgcttcttagtttaaggtcactctcctaaagaaatcacagcaaaagagatgtgggatgagattaaaaaggtttcatatctttttgttcacttcttccgcaaccttttttccatatctattcaaagaaagctctaaatgttttgaattctctttcagaacaaatcattcgacgagttaaacagcgaaccaggctcaccttcgagacccggaacatccattggagcagccatagctgctaaagtgaaggttcctccaggttgtgaccgtactgtcacgttttcactctcatgggactgtcctgaggtgcggttcaatgaaaagacttaccacaggtgtgacttcttgattcaaatttccttgtatatatatagtttcatcttaacctaatgtgaatactcatactatacagacgatacacaaaattctatggcaacttaggcgatgcagcagtgaaaatggcccgcgacgctcttctaagtacgcgtgcaatttgcttttgttttcggtttcctctttggttttacttgcaaaaaagtttcatatgatgtttctttttcttgaaacacaagattacgttgattgggagtctcagattgaagcatggcaaagccctattctctcagacactacacttcctgactggtaaactctatattactttcaagcttctcttctactccgcaatcgataaccgatgtatattttaggtaccgagttactctattcaacgaactatactatttcaactccggaggaactatctggacaggtaatatacaaacaactcatacattgtttgactatttcatcaatttctctgatgttatatttttcactatccatagatggcttgcctcccaaggaaagcatagaaagaagcaaggttacaaatacagaacagaacgacattgttatagacctcttccagaaaatcaatgcggtttgtgagcagatttattctcctcaatcctcgaactcggaagagaacattggccaattcatctacctagaaggaattgagtatctaatgtacaacacttacgatgttcacttctattcttcatttgcacttctcagtctctttcctaagctcgcactcagtatccaaagagactttgcagcaacagttctgattcaagatccaaccaagaaaaagatcatgagctccggtgagtgggttacaagaaaacttcttggatctgttcctcatgatataggtctaaacgatccgtggctagaactaaacgaatataacttcttcaacacggatcgttggaaagacttgaacgccaagtttgttcttcaagtctacagagacgtggttgctactaacgatcagagttttgctaaagcggtttggccgtctgtttacacagcagttgcttacttagatcagttcgataaggacgaggacgggatgatcgaaaacgaagggtttccggatcagacatatgatgcttggagtgttacaggggttagtgcttattgtggcggtctttgggtcgctgctctacaagctgcgtctgcatttgctagtattgttggggaaaacgctgttgccatttacttcaatgcaaagtct

SEQ ID NO: 37633 - DNA, 2652 bp, Arabidopsis thaliana landsberg
acctctggtttgcctgcagagacacgtctagttagaaggatagattttaatggtacattgataaataaagatgagatatggtagcataaacaaaacctcaggtttgttcttgatgttcttggcacgataggcataatccaaagtacttaaagtttcctctagggaatgagcagatggagagattgtagcaatgatacaagtttttgtctttcctcctagagagtcccgtaaaagccttgtcagcttactatccctgcaaccacaagtatgctttcaaaaaacacaaatattaccacagtagacatatatagttgtaggacaaggcaagtacctgtaaggtacatgagaagaatgttccacaagggcattaatcacacggcctagtgtaagcaaactcttgttaatctctcctgcttctcgtgcacggccatctcgagctcctgaccgtaagatattctcagatcctgctagatccacaaggttaagcttcccacatttgattaactcttcatctcccatagactcttcctttatatgaacagtgatagtaaacactgaatgagatcgactacttctcttattcaacaatgtatcagctgtacgccttttagatgaacctcgttcaagaagagcatatatatcattagcactatacacaacttcttcttcaagaccccttaaaaccacagaacccttcccatccttcatcaaagaaataggcttcctctgcttatcctcggaagatcttgaggaatcatcttgagctaacaaatccgtaacttcctcattgtaaagctccaagaatgttactttcatactgtaatcagcattttgcgcctcaagagtatcgaaaatatgtctaacagctctaggaatcaccccagcctccgcaggtaaatcccctcccctttttcctcattccaccttccatagtgtaagtctttccagttcctgtttgtccatacgcaaacacagtacagctaaaaccttccaagacttcatgaacaataggtgcaatagcttgatcatatatagaccgttgttgtgacttaggaccaaaaacctatacaaaacaacaccatattcagagaccaaacttgaatacaaaaccatcaagtagagaaagagaccaaccaaccttgtcaaaattgaaaagacggtctacttgtttattagcaacagtatgaagaacattgacttctcttctcatttcattacaagagatgactctaggaacattagatttctgctcttcttcacttaatggtttgcatcgtagaatcacttgaacattgacttctttattatctctatcgagacggttagagaaagaatcaggtcgtcttctctcgagacgaggagttagaaacggtgcaggtgatggaatcactcctactccacttttccttgataccacctctggcgtaaacgacatcttcgatttctgtgaaatcaaattcaaattccctaatcaattgagaaaggttggatcagaatcccagagattcgaattctaaataagattcacttacagtaaacagagccgaatcctggagatcgaaagagagacttcttttcaagtttgagagagaatttgaagaacacaaaaagattagggtaagtaaccgttgggagtggaagcagatccaaattcgaatttctatgagagctcaacgctacctttaatttcagaagttttaaaaagtcgcaaatattcttctttttgttttgtctcagtattcatatattgctagattatttatttacaggtattatgatattaaatatctcagtcaaaaaattggtccaatgatccaacaaatttatgatttgtaaacatggaaaaacgggggggaaaaaaggaattgaaaatctactactttctgattttattcttaaataaacacttttggcaatacaatcatatatatgtgagatggcattttattcttaaataaacacttttggcactattggagatggacaaataaacaaatgatcattagctcattattatcagtcatttgacaaaattaatgagaatgatacgaaagcaacagaggaatttgtaatcgaatatgagagtatttaattcactctcccactgttctatgtgtgattaatccaaatgttgtaatatatattaacaatctgtatacattatacactaacgtaccgttgtaagagagttaatgacattcttgcattaaaaaggagcttttaagcgtgagttcaagacgggtaaacagacaagcatcctttaatcttttcttagtctatgggctactccaaacttgggctactccaaattgggcttctttactttaaatcttctactaactatttgggcttttattaatgggtttaattactttctctctcaggtctttcttttaactagtttgggcaattgtaaaaacttttggctccttttttaaattttactgaacgaaattatcctaaaacaataaaaaataaaccaaccatattcgaaaagaaaagaaaaatgagcgatgccggaaaaaaagagagggaaattaaaaaaaaaaaaaaaaaaaaacgcaacagtgtcggaaaaataaagctgacaaaaaattaaacgcaaaatagtttggtcgatgtaacttttttgtttatttttttctagccaac

SEQ ID NO: 37634 - DNA, 3978 bp, Arabidopsis thaliana landsberg
aaaaatctcaaacctctttggagtttacaatgtccaagttttctagtttgagactcaagtagccttgcattgggggtggcccacgatctacaactgtctctgaccggcctatcgttggacgaatgattggaagcgctgcacgggaaggaacattcctgcataacataaatagctactgtttcagaaatttaaacgaaacaatttttactttgaatccacaaaaccgaaaagttttatggcatttaaaagcacctgttcttgatactatcttcagtatagtgcagaggaagagcaccatcgtcaggttcttcatcatcttgcacaactgatccttgcatatcaaaaatccccaagctgtgtagccactctctaacctgtcgaaaaccgcatctctggagttcaataattatttgtttggcttgtgttagtagcaaatctgcaaagcctgaacattctgacctgttcttgcttgtcgtgaagttcttcaatgatcaaacgtttcttcaacgcaaaatgtaagtacagaacttgagaagccttcttttgtaatgtccacttgaactatacatataccaaaaacagagaataccaattaaaaaaggtctttgtttgttactaataaaaacagaacataaacttttagagaaacaaccactagaaatttcatatatgcatgaataaacttctttagcaagaaattgaatctcttaatggcatctctttgtcataaatttcgtatacatagacaaaatcaaaaccctaatcacaatgtaacagagaggaaatcaagttcttttaaaactacaagtcagacattgtaaactatatatatacctgtttatactgaagctccaaggtgtaagaaagaagcaagggactaaaatcggtggtgtcaggtctcgagaccgagacgatcgcagccttgggaagctcgtcgaatatttgacttccaccgccgagagaagaagaagctgccgccgccgcagcatcagctctggtcattctgatgactccgtctgacttaacgccgttaggaagtagtaatttatccgtcgacatcgattaactccccaaaccgtcgtcgaaactcgccgttcacgattgcatgtccgaaatactcgagattccactgatcaataaatcgacgttatataggtgtctattgattttagattttatttagaatataaggtttaaatcagtctgtcaaatagtacattcaacggcaaagggagtggttccgtcacgttaggtttaacgaatgaccgggttgcgtttcgagatgatgacacgtacgattattgtcacgtgtacgtttaagatcgagggtatgtattaactcccgcctaccctgccgtgtatatgcaacttggttacatcgtctccaaattggacaagagctctggattgtttaattttttaactgtcccagactaggatgccaatgacgaatgtacccttaaacttttccttgctaaaaataactttcttctctttttctgatccgttttcagaagaatggattaaaaacgatgtttcagtaaataagaaaatcattttcgcgttggcatgaatttcattttaaattatttaatagatgttaagattgaataaactaagaaaaaaaattgaataaactttagaaatgtcatgtaccgaacattcgccggtaatttccggttctgttagtatggactatggagggataattttgtattttgctgatgcaggagttgctgatgtacgaagtatatgccatgcaagcatcagacgacaagaatatcccaattttttggtgctttgccagatcagaatattcccaaacacacttatttaattcatacaacatgtgtgatgagaacaatcccctcattgagcatctttcctgttcagtcataatactcgcagtaagctgttacgttaagttctagttcatcttcccactccttccatagaaataccagtcccatttagaccagcaccccctactttcttcctgcacacatcaatcaacaaatttagttttatcttatcgcacagatattattacaagagtcaagaggtaaatagatttgaaacattattacctcgtcttttcctcttaccactgcttctcaactgtctaccttctgaaacagtttccttctgtttctcgtttgattcattatcattatctcgatcttcttcattcccatctgaatcatcatcatttacctcattcccatctgaatcattgtttgcatcatcatttaccctaatgatatacacctggaacaagcaatatgtttcaacatcaatgccaaagtctctctaccagggtgtatttcaagatctctaagtaaaactcctttaccttgaacgttgttcgagcgataaggtgaaacactacagcatctccatcgactaactggtgatcaatggcgaaacctcgccagcctccactaagaccgttcttctgagcaaggtatttcgcctgagattcctcctcttcttcgtcaaccaaagtcattattacatcacgttttggcatatgtgccttgcaaaaaggaagcggcaaaccctggttacgaaaacatatgacatcagtggacttttacatactactatggctgagtttcagacatctttgaatgttcaagttgttcacttaccaaccaaaatcctccggtcacgtgtgattggagcattggtttggtaaagcttgcatattctgaatctaagcttgactggagcttctctgccctgtcgaatgcgtacattcttgcgtcgtccgaagcatatacccgattcagcaaatctcttcttcgagagctcctgcaaagcaaaacacataacttatactgaaaagtgaaaacaaacatcaaatagtgtaagagaagtaatgtattcatagagagtgtggattggtcaaccttcttggcctcctctccagtggttctagcccaaactgcgagtaaggatcagataactctgataatgagtaatgagaaacaactcacgtttttattcaaaaaaaagagaaacaactcacgcaaattataactaagaaaaattgcacaaaaagatcaaacccacaaatttcatatctcatacaaaatccttaagaaatccttaaggaaactcaagtaaagataaatggtagtaaaagacctctttataacttggaggtggacctttggcacggcttgatctcctgacctccgagaaatccactggaatacgcatcgttcttggctttgcctacatttccataaaaaaaattggttaatttcagaaaaagaaaagaagaaatgagaagagaagagaaaggaaacgttactggtgagggcttggaagaagaagaagaagaagaagagacacgaagagattgagcaagcttgttgagattaagctcccccattctcttcttgttctcttccaccctattcaaacgaatctgttcatagcttagctccgattccaccatttctcttaggaatgcgaaacagagatagagaaacgaacgagacagatccaagtcttgcttgactcttcaatgcgcttttgagtgaccgttgggtttcttctttcaccgctatgtatgtgtttatacttctgcaaatttttttttctttttatgtaataaaaatcttagtcattgtgtctaatcaaacaaattgaaatttcaaattctcaacagtggaaggtctgagtaagcctccatcgtgatacgtgaagcaggtatgggcttcttaaaagacgtttgttttttttccctccataattaacaattattttgagatcccttaatatttttaactattttaagagaacatttgatttgatcagtatcgctttacaataataataagaaaaatactcacgaagtttgtttatccataaccacattgaaatcaaaagaatctacgaagacaaatcctgtgggttactaatgattaaagaaccaaacctgagactttactacaccgttaggtaaac

SEQ ID NO: 37635 - DNA, 5522 bp, Arabidopsis thaliana landsberg
  unsure (1)..(5522): unsure at all n locations
gaagtccgactccaacgtaatgttaacttttattcaattgttgtgttcacggagtttgcggtgttgcatgggccctgaagtttgaagcactccatttactgtctgcagtcttctcgtcagagtattctgtgagttttcacttcttaacttctcgaaaagtatctatagttactagcatgatttatgtagatttaatgcnctaaattttcaaaatttctgtccattgaaattggaaaattaaagttttattttcctttacttggagaaatacagttgccttcatcgcttgatgttatttaatatgcatgttatgtttccattgtagaagctctacatctttgttttgtgtgcttatctttttatatgtctctcatagaagttcgttatgcttaggaactttttgatgaacctcttcgttccatgcccgacaacaattgggcagactatatgcgcacaggtgttgtggcaattctgcagaaccgtgtgggtaagttagtagtttgtttggaacactggaaatggcatacccattaatggcattcttttcttgccagccctgaatttcatctacttgttatatgacaacaatcctctcaagatacttaagaaacctgtcttgttcatgtgtagcaccttccgaaaagcttcatgcgttgattctggctgagaatatgatgtcaatattgggtgaaaagtggcttatcggcggggtaaaattacccaatgttgatattccagctgataggtaaatacaacatctttgtattacactctcacttaacctacattttcctagtgacataaagattaatatcattctgatttcttttgtaggtgtcttctgttggtattagagtcatcgcatgttgaaatttctgtattgttaaatgatctcgcttacaagaagtatgaagctcctaaagataattcaactgctgaagacattctcttgaagcaacggtatctacccatcgtgttttcactggtagaaaagatcatcaaatatatatcatctgctggtgaaaacgaaggtataacttagaccttaatcatgttttattaatgtttccaatctactatcagtagtcagtactagcatattcgatcccttttctttcacctttctgttattctatgttattcctaaaatcagtactatatgaacatcataagagcttttagttattgctcaaatgtctattaactccgctgataaacagtgtatacatgcgtgtcagccttttcccttcatgaaagaattgggatttacgtattgatctttgcagggactctatctgacgaagctgtcttccaaaaggtgattaaaatacttaatgagacagtaggagcggtgttcgaatatctcagagatgcaaaggtactatacatatatgataacatcaaactcttaggaatgtcttattgtgcttgaaaatgtttttcatgttaattctgtttcatacaggaacatggaattaagaaaggaactgaccttcttgcatctgtgcgagtgattggaaggtatagataatcactcttttcgtttcttcttatatctctcgttcgatttatttttgtttaaaatgtataccggattgtgtttatgtaatcatcatttatcattcaaattttgggtaaggccatggattgtatccttaccacttttgcaggtactgaacctttttttgtgttttcaacagctatcttgcggaaactcctgttacgtgcaaagagcaggtccaggatcttctggattatatgctttcagtgaagggcgaagatgaatccaggtttgaaggcatcctgacttgatatattggttcttttacaaagcttgtttgagtcatgcctcccaggataacttggtctgaactattttgttttgacagcccgtttttgtctacttgcttcttgctcccaatgctttgccaaataacaatgaacgcagaaggatgtaaactcttggcctattcaagaggcgatgtagctgtgagttactcggctttataccttctttatactgatgacaatatgtttgaacaaatctgatttacagctttcttatatctctcagtatgctgaaccaaaatgtatttcaagtgggtgtttatcttgtatataatcttataaggagctgactgatttttcaatacaggtcgttgaatgcctaataaaattgattgagtgctgtggtgagagtgttgatgaggatcgaagcatattcttggcttgtgatacaatcatgaatattcttttgaaggtactctcttccctaagataggacctgtttacattttgccaattgctaaaccctataatgacttcacgttttaaatgttgagaacagagggaagaaataagcccgccggaaatttcaacatttgccagtctattgaaagctttggcatattgggcaggtaaaaaaaaagatttttactgcttctgctgatctgcctactaatttcttgacaaaaatcgaagaccatgtttaatatgtcaatttctctgttccttttgtcacagatgggagtaatgaccattcggtagtaatgatggctgcaagcatatgctctctgatctttgatttcacatcagaagatgctttacaacttagcagaagctccctggatagtttggcccggctcgttacaagaagcttgtcctcaagtggccaggtataataatccgtgacttgtcatagagtctcttgtacttgttttggtagagagaattgcttgttagtgaactgttgcttaccgttgcaggatatgtctgataccgcggatcttcttgaaatcataagagcaggtttggtttcaacatctctctcacttttttttcctcggcttctctttactttttaaatcgataaacacaacaagttttcttcttgctctaattgtgcttgtatgattatggaacaggatactctcggtggataaatcgattccccaccattatgaaacatcccgttgtgcaatagaaactattagatttggtctcaggctgtttcgagggagagaaatagtcaaaaaaggaaattttgttcagtttattagcttcacgttgttgtattatatatacttgagattataattcatggtttctctatttatgatgcttccccaccaagaaatgagatacgatatatagatatttatgcaagtctaaaatttgacttgttatatagaggcaaatctaaaagataaggttccgattatgaaggattcaaatctttaaacgacgccgtgtttccatataacagtaaacagaaacaaacgcgtttttcgttggttggataaatcctccttataaataaacaaacctttaaggaaggttagttgtcaaaagaatctgcgaaaaataagagagagagagagagaaacaggatcattcattatgcccgccttatctcactacagatcagtatcatctctaccgtccgttgaccgatcattccttctcatccaacgactcaggatccacggcagctcttcttccttccctgaatcttctccttctgcgtctattctctccggcgcagatccgttgaagcgtacggtctctggcggatctcttgctaaatggatcaccgggatttcagctggatccgccttagggtttctctattggtcctctggttcttctgattccatctctggtttgtttggtgggagtaatttattgtccttcgctgatagttcaacgccttctgtttgtggtgtaaaagtcggcgatctgaaaccgagatcgtttattccgaaattgtcgttgcctggttacagctctggattcatcttcggaggttcggtgatcttcttcttcgttctttaatttcattgattctgttttttctctcaaatgagctaactttgattggttttgaaaacagatgcgtatagaaggaagatcttcttcaattacgagaaacgtttgagattacaaagtcctcctgaaaaggtgcattttaaaaccaatgtgtttttgttttccttaagctttctatttcgattattgtaattgattgattgtgaattctctgtttctgcttagttgttgttatgaattcataagattatattttgttcatttgatctggttgataagatttgttcatagccaagtaatttgtttgctttgttcttaatgacattaggttttcgagtactttgcatctgttcgaacagataaaggagaaatactaatgaaaccggcagatttgatgagggcaattgtccccgtgtttcctccatcagaatctcatctagtaagagaaggatatttgactggggagagaaatcctggtgaacttagatgctctccttccgagttcttcatgctctttgatgttgataatgatggtcttatatccttcaaagagtgagttactgaaaccaaatcattacttattatatcccccttttatgttttcttcttttggaaaaaatttcagtacttacttggtatatgtgtttgggaacaggtatatattctttgtgacattactcagcattcctgaatcaagcttcgcagtggctttcaaaatgtttgatactgacaacaacgggtgagtagtcgttcacatatgtaaatagataaatcatgcttttggtaactttttttctggtccgtattcccatattgtgatcctccaaacggacgggttgtgggaatcagtggagtctctttttgagtttacgctgaatcatctggtcagtgcttctatcctttgtaacttctatttcctcgagatggtactgacgaatgattgttttagggagattgacaaagaagagtttaagacagtgatgagtctgatgcgatctcagcatagacaaggagttggccacagagatggccttcgaacagggttacatatgaccggttctgtcgaggatggaggattggtagaatacttctttgggaaagatggcagtcaaaaactgaaacacgacaaattcactaagtttatgaaagatctaactgaagaggtaactaactcttaaaccctttaatatatctccttactcgtttaaactcctagagatgctcaggctgaaagagaatgatcttatgttgtttatagatgctgaggctggagtttgcacattatgactataaacgaagaggaagtatatcggccaaagattttgcattgtcgatggttgcagcggctgatgcaagccatttgagcaagctgcttgatagagttgagagtctgagcgaacacccgcatctccgggacatgcgtatctcactgaaggaattcaaacagtttgatgagctacgtagtaaacttggaccattctctctagcgctttttgcttatggcaaagctaatggtttacttacaatgaaagatttcaaacgagccgcctctcaggtatgtggaataacattgtcagacaatgtgatagagattgcgtttcatgtgtttgactcgaatcaagatgggaatttgagtgtggatgagtttttgcgggttctgcatcgaagagagagggacgtgcacagccaattgc

SEQ ID NO: 37636 - DNA, 4503 bp, Arabidopsis thaliana landsberg
  unsure (1)..(4503): unsure at all n locations
aaattattagtggatgtgtcatccaaaaggcaatacactaaaaccctagcaaagaaacatttgaacaagagttggagcagagaaaagggaaaaattaaagacccaacatctctcttaagtgttgtatagttagaccttaacaaggctgcctattttcccacccgattgattacactatcctataggaaaactattcgtgcatgtttccgaccacaggagatccttcagagagagccaacataaagataatctgtaaagtgtcagctttcaagctgtgtctacatgtaggactattatgagaaatttttgcctgattcggtatttcagatttaagattgtctgcaaggggaaataaagagcatccaacctatcaaaatatggcaacagtggtagaacttcaaccggctgcaagtttttattggtggcatgaactggtcgagacttgcatgcctcaaaggatgcttcaatatccttgatttgtctctctctagagaccaaagaaaaataaaccattagacctttttttttctcactttccttagaaatacacatatttgagaaacaacacacctattgttaagattgtgcaagatgttgatgcctcctttcatctctcgcagttcctttgcttgcttctccgttagcgactacacaaggtaaacataggaaattggaaactgtctctagaagctatacatggcaaaacaaatttccaacaagcgagatggatagatacctgtcttgccgattcgttattaatagaagaaatgtattgtgttttgacgagccaagacatgcctttatcagtaggtctttctttcctccggatgccatctttcttaataggtgtaacagcgtcatcatcacgcaagagttcttcatcttcaggggcaagaggtgccttgactttgggagggctgaaaagagctacaacagtaagtatccccagtagatgaggtcgctggcattaaagacactaagactttattgagagcacatacttgtacacacttaggtcaagcagatccaagggtattccaagatcaggctcgacaaagatttttggtttccataatttctccagggatgtgatggtatactttgtaaatctagtgggatcaaaatagctggcaagtaaggacagtagaataacacagaaataaaatttggcaataatagagaaacatactgatctttatcccgtttaatggtcataagcttaagctgtgcactagggtcagggagctcattccggaaccttgaagaagaagatgaatatcagagtctaacaataatatgtaaaaaagatttaggtagtcgtttgaagaatactgacttgagcttgcagatgaaggtggttggtttctttaacctattctcgaccctgtcggtggtgagtaggggcgtcggcttcttctcctcggtatgtcccttgggcatctgagacttgtgagaatttttcatctgctgtctatgtttttcgtcttgcctttgtttctctaactccctcttcttcctaagcctcctctcttcttcggtctcgattttcttagaatgaggaagatgagacctgtggtggtgcttcgatggatccggtttagcacgctcccgccttccaacctgcttggaggcccctttctcgcggtcattgggaccctggtgtcgaggaggatcgggcacgagcggaggaggagctgagggaggtggcggaggaggaggagcttggagctggttgaattgaggatagtggggcccctgctgatagtaagcatgcggaggaggaggcggcggcggaggatatgagtacggttgatgcgacggtggtgggggaggaacaggagggggtaacgacggcgggggaggcggagggcccaaagaattttgagatggtggctgaggaagaggaggatacggcggccggtacgacgccattctcggtgtannnnnnnnnnnnnnnnnnctaaaccaactaaaacgagtcttcttgatatatattaattatatagctccggtcagactgatttttcctttttactttaatttgggcctcactagcggcccaataaccgctactatcatatgggttctgataattacggcttcaatacaaacaaaaacaatcttaagctcaccgttttatgaatcccaaatatgaacgaaacatgctttgtaccaccaagctcatcgacgtgtgactgtgtgaggaacacaaaatatttattttctacattgataattactcaaacattatgtacagtatagcgaaccgaggtgtgtggttaaacactcaacacgctggaccaacttatgaaaacctcttaccaggacttcacaagccgaagatgttatggtcgttggcactgaaaatagcaccgccaaactgcctggtgttcaagtcgcctccatcaagggcggtcccaaaacggtcaagccactgggcaggactgggattctctgcctcttccacccactccgacatcatgtcaatgtcctccagggcaattgggtctgtctccaaggttatcatcctccctaactttagattctgattcacgtacgccaacttgttcaatatttctctgtcaatcttgtttcgcctttcccagtgcatctgctggaatgtgctccattggcgttccaagttgtaaccgctgcaaacttggcttagtattctgatggccacccgctgcaaaacaggtgctgagtcaccaaactgctcccaccagagacctgcattactaagcaaaccattattagacatcaacttctagtcttctagtgcttcgttaccaattctaaagatcccagaccatacccctaatagcatggtgaggggaagatatctactagttttgcaattcggtttactacgtgccaggctatatcaacctggacttatttagttgtgtaataagaccatagctttaattgcgttcatagataagtggattatttttctcccgactcagactacctatacatctctgttcactagtcatgacttaaagaaaatataaatgtatttattgtccatacctggtgaaactgaatccctcgcctccatggccaggttacagccgaacattccctttgccctagtgaaagtgaatatctgatttgtaatatcacgccgtagatcgctagtaggaagaagtttctccaacactttgaaaaaatcttctttcaaggaagtgaggaactttatctctgggttatactgaatactggggttcaagaatgctgctgctgcatgaagaggtgaatgcaaatggtcacaccagttagtatcaactatgtcagaaaagaccttatgcttattctcatccatgatgtagtatgtccgtattgactccttggccttggacattaactcgtatatagaacctacagcgggctttccagtagaaacttccctcaacactttcaggataggctcggaaatagccacactttcttccacagctctccagaaatcattatcctctaggatattcacgcatgaaatgctctgtggtttgttagtatttgtggtatactctgggcaattgaacatgtgttttagccttgccttttgtttcatcattgactgtaatgatagaaaattggagacagaccttgtgacaccgcttcggataatatcttgcccgcctgttaactttctcaataaatctagcacggggctattgttgtagacaaacttagatatgacctgcgcttgcgatatacattgattgacccaatcaaccttggagaattcttctaagatgatgttcaaacactgagatgcacagggggagacgaaaatggttgcatagttttgcaagagatggtttgagataccagtgtagcagaagctgttgtccataatgatttgcacaatatgctcctgaccaatatcttggatgacagaatcaaagagatcagcaaggcattttgagttcttgaaatatgaggaggcgtcgacagacttgtgaaaaaagattctggaaggtgaagagacggagaagttaatcagtgctcgtgatttgttgtcggtccatgcctcagcgatgatagtacagccggtggtgacccactccttttcagtgtctttcagttgtaagctaatatctgacttaaccctgtccagccattcagtcttgggagaaggagcaacaaatcnnnnnnnnnnnnnnnnnnnnnnnnnnnnnatatggtgataagagggtgagcgggcaacagcgaagtcaatcttgttctcaaagaagaagagagaaatactcctctctgcaatgtcctgcgcattaggaggagacctaggaaagactagtttggacgcaggagcatcaaacggaggagataaaggtggtggaggcttgcacttgttggtaatggggggatcatccttggcagataaaatggaacgaactctatcagtaacatcgaccctaaccttggcacatggattaacccctttctgggaaggcgagagagatgatgcttcaatctactaatgccgccatg

SEQ ID NO: 37637 - DNA, 2522 bp, Arabidopsis thaliana landsberg
gttatggtaaaggagctgatttggttagctcctaaacataaaacacaaaaacaaaaatggacaagaaacctacaaagcagtagcacctctcttgccagcgactgaaaatccacttccatcacccatcttttccattccctatcaataatcccaagcccattgttctttaacaccaaacttgatttacagagagcagcaaggaaacgaccaaatccattttcattctacttcaacacgaaaacatttgttctaaatacttcaaaactttaaaaacttggccactccaaatgaaatcctaagagcagtaacactcacaaatggagagtaattagcgatcttgacaagtgcgtgggaaggtaccgttagagagttcgcagaaagctcgcagattaacattaaggtgagatgtgagtctcgctgcagccacaacattgtacagaggcaagaatgactctgtgcatcctagctctcccaaattcctgtacacgattacaaaacatgtttctttctggccaatgctatcataatctcaatatgataaaatcaaacatttttcaattcttatcaacgggaattagggatttcaattttagaaatggtgaaacctgggattagtgaaagaggcaaatcggcggcggggcaaagaggattgggaaggacggaggcggggaagcgttggcggcggagatcggagagacggagctctagctgtagcggagacgaaagagcgtgctgcactgcgccatgccattttttatctacttgtagcagaaagaaaacaacaaagcaaatcagatcaatctcgaagacggaaccaaagaagagactacagaaactcagtaaataagccctaaacgagagagagcgagagagactcggtttggtttggttcggtttattgttttcgctataatcgatcgatttaataaaattaattggtttggtttctggtatagagatttggtttgtcatttacactttagtatttgggaaccctaatttcttgaaacaatgaggataatatccgttcttccagataaattggtagtaaaatactttctcgggttccattgacaaaatctgaatgcgagcattgtgacctagttgtctgctcctacgttccaagtttagtgcaaatcgagtgactgaactgcataagaagaagaagggtctattaccactatgaaggacatcattaactatcttcttacttctgttttttttttctctttcctgttgtaatgtgctttgaacaaggctagtcaatctttacaataaggaagttgaatgtgaaaaaatttcatatgattcatgttaatgttgttgatacaatgtgaagccaaataacaataaaagtattgataccaagatacatgatttcactgtaaacctttttggatacatttgtgttacacacttacacttgcacatataactcgtcgaacgatgagaaacaatggacttcctctattagatgaacaaaaacagattgagtctcttacttctataacttgtcggtccgaatgcatctcaaatccttgtcaaaagtaaagactttccctggcaacaattcggcagccgcagagattcctctgtacactattctggtggaaacaatctgttccgaccaaagaccaaactccacaaggttcccttccatccactttatactaaccgtcacaccgccccttgcccttagcccattcacaatgccgttaggccatttatctgctggaagtgccgggagcaaatatagatccttcgtagtgctctgcactaacatttctgctaccgctgctgcgaatctgccaaggaaaaaagctcatgtgtaagtttagactagtcatcaaatggtatagtgcgttggaatgtgaatgtaaacattccacatatcttataggtaagtgtttgcaacaacttacccaaaattagcatcgatctggaatggcgggtgtgcagtgaacatgttactatacagtcctccttcatagttacgttcgttcaacggatccacaagatcaaaaatatgtgtaaccatccgatatgcgtgctcgctattgtgaagccttgcccacaaggcggctttccaggtggttgaccatcctggtccttcctctcctgcgtcaatcagtggaacattatatattgctccaaccacgtcgatgaaattgtggaaatagtaatgggagagaagaaagaatcacacaaacctctttttttaagagttgcttccacagctttagcaagttctggagacttctcaacagtgattgtgtgacccgggaagaggccaaagagatgtgaaacatgtctatgatgtacctctgggtcctcaaagtcttctgcccattccataatggaaccgtcctttgatattctagtgggtggaagttttgcttgagcagcaatgacttttccaataagagtatcatttgtttttcccaaaatctgttgataaaccagaaaccataagctcagtatccatgaggagatatgatcgttctgttgtccttgctgcctca

SEQ ID NO: 37638 - DNA, 3424 bp, Arabidopsis thaliana landsberg
  unsure (1)..(3424): unsure at all n locations
tgttatgtagagatgttgctttacacagaatcaaacaaggaatttacttgagagagttaaacttcactattcaaatggctctcacttatttccaaaccatcaaaccgatgaatgataactgcgatgttgttgtgatcgatattgatgacaccaatctgtaagtgttttgtttttcatttaacattttgtaagtttttaaactgttaacgttcttgttcttctctttatgtagattagaacaagatagttactacatgaagtatattgaagaagcaaagcatcagaaaagcatactaatacttgcactatattctaagcttagatcacaaggctattcaatggttctattatcaagaagacccgaaacagagcggaacgccacaatcgagcagttaaaatctagaggatacagcgactggtcacatttgattatgaggtttgcaataagcttttacaactactaattttattcacatcaaagtagcataaagccagaggttatattatcttatagcagggaagatacaagacaaaaggaagagttagaaagaggtcaccgcgtaattggagtcattggtaatcatatggatgtgttaagaggccagtggaattggcaaagcaagcgtctgttcaaacttccaagccttacctatgatgatgttttggattacaatgaaagatgagatcatgaagtttgatgtgtataggttttcaagagttttctgtaaaatatagttttatatgttccaaagataaagtagagacattttgtaatagttcaatgtctcatgttgtcactatcacatcacacagtgggtggtcatgtatccaagagtatgtgtatcaaatcagattagcttaagaagagtcaagagccaaatgcttacaaaaattcgaggattcgccagtaattacttgcatcactaggcctagaccaaactaatatcgaaaattagaaaaaaaaatggctgttttagtcaaacatacgctcttgagatcaacttgaactagtccatatatgttgactaacagtactcagatttggatcctcctggtattgactccacgctgactcaaaccgtagacctttgcacctgtggagagaaagtggggggagcttattaaataaaacagcgaaaatgtgaacaatctttggtagtgcaattgataagccacagaaacatactggcggagtagcatcaagatacggaggataagaggtctaatatcatcgcgatccttacgcatcgatgactctttgtacaaggaaacaagctcatccaccaatctgaaggttcaaaatcatgagatgattaatgttaaaaaacggataagagagaaagagtttgagttgaagcatctaaaagttactactctcaagtgtttagaggcttaaaccttgggaacacaggtgagtgtctaatccacgtcaacctcacaactgtctccagtctctcaagaacctatatggtattagcaggtaatgaaactttcatgtttatcttaaagaataccaaaatgagttgggaaatctaacatttcttataaactgtgaggattgaaacaagaccataccaacagaactgtttcggcgtcgtctgaatgcatccactgaaagaaaagagggaagatacgtcgaaaatgagcaagtaagaaaagccctagagagttcaagagtggctcaacaaatcttagccaagtgatacgtcgctccttatttcttggttggcgttccaaatgcccgagcatctcattcatgatcttctcatacctaaggcaaaaaaaaaaaactcaaaatgagcaaaatagagctgagaaagatggaacgatcaaaccaatctgtcaaatgacatgatcttcttaaaaggagttaaactggatgcagtgcaaagaaattccccacttgggttttgagaatgataaaagtcatcaaatggaagaaatgtagaaactaaagaagacgctatgaaaacgatctttaaagcaactttttctccttatctctcaatcttctgaacctatgccaattgataagagaaagaaagatttaccacgggcttcgaggattatttgggtggattttagtaacaagaagcacagataactctaccacatgtatccaaatctcatcatcggaagctatattctggcaacacgcatcaagaaccacatctccatacaaaccaagatcaccggaactcacatttttagcaagatgaacaaaggttatcataccctgcccctgtcatcaagcaaatatagaacatcaatctcactataccttaagatacgagtagataaaagcttaaattttgcaatatgttacaagtcacacaacatgttatcgatgttacaagtcacacaacatgttatcgatgttacaagtcacacaactaacaaaagagacgccatcaaaatctacatctccaaagacttactttgacttcaggagaccaatgatcaagtgctgtcaaagcacaaggaaccaccaagttacaaaatttcaccaaattcggttttttaacctacaaaaagacatcaacacctccaaaattataaagttggatatgttcacaacagaacagaacaatttcttaatatttagaaattcagacctgagtaacaaaccacctgagctggtgagcagcaagtatagcnnnnnnnnnnnnnnnnnnnnnnnnngcagctgaaacatcctctgcatcactgcctttaccaagtgaactcttttcgattccatcttttaactccggcaaaactatcggcaacatttcgatcttctcactatcctctaccaattccacaagcttctcagcattactgttgctagaaaaatcactgaaacaatcccttgaaatctcccaaaatgtagattcccccatgacagagaggttttctggaatccatgagagaagttcgtgagtggatgaacgtgaagaagcgagaagggcacaagcaagcgcgagacttttgatcgattcttcattggcgagacgagaagacgaagtgtttggtaacaaggacaagagtatatctttggtggatactttgctgctctcttgcggtgtgtactgtgtacgtctaagaatctctgctattggttctgataatctgaatcctcaaaacaaatcaaaattagggttcttcaagaaaaaagcacttaaaggccaaaaaaacagaggccagagagagatgtcactcaccggagaagacggccatgaagatcagagcttgtgctcaacatttttcgaaattgacaattttcttttgtaaagttcatatctttacacaattcaatttgggttttgtgttttcttaattgatttctgtttaactggatttttaactttagtgaagaaccggaccggagatgactaacgacgagtaacgatagagatttgtccggtctaacatccggttcggt

SEQ ID NO: 37639 - DNA, 3229 bp, Arabidopsis thaliana landsberg
  unsure (1)..(3229): unsure at all n locations
accatatgagggtcaattccgcttcttatgcctcaacatcacatggttataccccactacatgggaaggcaagaggagtcagacattgaaagcaagaaagaggaagacagtattagagggattagaagagatgattcattttcttctagatcatctttgcaggacattccattacttttgcctcacgaaccagttgatcaggatggttcgagtggggggcataaagaaaatggaacaaacaacagaaatggtcctttctctttccggaaatcaaaaattgaaccagttgatggagatactcctatgaggggctttgtagatgatcgtaatgggctagatcttccagtagcaaagcgtggttctaatgcaatagattcagagtggtgggaaacacaagatcatgattatcaggttgggtcgccagatgagactgggcaagtcggtccgagaacttcatgccgctgtcaggtgggtgttatgaaagtttatatataccaattatatgtggaatttcaaatctgaatagagctgatgctattatgtacgatcctattctgtttcatgcttggcttcagcatacaagctttaaaattttattgtgatcataataataagaatttcccttcaacatttagcactgattagaactattttcagattatacgaagtgtcagtnnnnnnnnnnnnnnnnnnnnnnnnnnnnnagagagtatccattctgcttaccgttctctcattgacaaagctgaacattttatctacattgaggtatttgctataacatgtgtttgtcgtggaatctcggttttgcatgagttcaatttgatagaccaagtaattagagcatcatttagagtttcattgaaacgacctgacatcttttctccctgaattatgcataatgcaatttgcatcacattacattcaacttgggagaaatatggaacattctgctaaatgtgctggtaatttgagctgtcagtcaaataatgtatacatgtattggtttccgtactttgatttggcacctctctgattccctcttagccttggtgagctttgctggagatcctgcagctttccttggtcaccttttatctggcctacacaaaagtttaatttatctggtgaaagaaactaatcccctattgaacgtggacaaactaagcattaagtaatagtcctatacccttgctcctgcaaaatccaccttgcaaatcattcatactttatatttcagataatacaagtaacttagttcttgaaactgtagtagttgccaggttcacattgtctttatttttctgacttctgtttgcatgttgtgcctccagaatcagtttttcatatcaggcctttctggagatgacacagtaaagaaccgtgtcttagaagcattgtacaagaggattttgcgtgcccataacgagaagaaaattttcagggttgttgttgttatacctctcctccccggtttccaggttagtttcggctagaaaagtgtattctgtttaaaaagatttgctcctgcaatgcaactttttaaaccaacgtatgtgtctggcagggaggtattgacgacagtggtgcagcatctgttagagccataatgcattggcagtatcgaaccatatacagaggacataactcaatattgactaatctttacaatactattggcgtaaaggctcatgattatatttccttctatggccttagggcatatggtaaactttctgaggatggacctgtcgccactagtcaggtaacaactcaatcatccagggtttagatttgtgcattgctgcctttttttttgtgatcacggaatcatataggatgccctgttatacatgtgcttgaatgcagtggtagtgagtattaaaaatgtgaatgctatttttttctctcaatgcaggtgtatgttcacagtaaaatcatgatagttgatgaccgtgctgcattgattggatctgccaatattaacgaccggagtttgcttggctcaagagattctgaggtcatattttactcacgtactttcttgtgctaagcaatgatttccaaaagcctatttcatacttgaaactaaggtgaagatcataatagaaaacaaaaagagtaaaaaaaaataatttcctctgttgaaggaaaaagattttcgttgcctcagcacgttatatcagagtttatagttaggaataaattcatttaaagtatgttgaacaagtttttttatataactgtgtatgctgaacataaaaaagcataaaatgcttctgtatgctttatatcagattggagtactaatcgaagacacagagttagtagattctcgcatggcaggaaaaccatggaaggctggaaaattttcttcaagtcttaggctctctttgtggtccgaacaccttggacttcgtactggagaggtttgtgtcatattctctataatgttcttacgaagtggtctaagatatttcagtatataggcagatttaacacttgaaaagccatggaaattattcttttacttagacttaatgatgaaagatgatctgaaccacgccggcatgaactttcaatcaatggttatgactgaagaggatcttaagactataaatgtgctttgattactaaaatgtgatctttctttgtagatcgaccagattattgatcccgtctctgattcaacctacaaggagatatggatggcaaccgcaaaggttggaaacgtgattacagagagaaatttatattttcacttaccagatataaccagtgagcttatttatcccaacgcagacaaacacaatgatataccaggatgtcttctcttgcgtgcccaatgatctcatccattcaaggtacaattccggtctatcttttctttcttcacctttggccactatcattattccttttgaaacgaaaagattccggattatgattaatccatggcattggatcgtaaaatctcttgaatatatacgcagaatggccttcagacaaagcctatcgtattggaaagagaagctgggacacacaacgatcgatttgggaatagcaccagagaagctggagtcttaccacaatggagacatcaagagaagcgatccaatggacagactaaaggcgataaaaggacatctcgtctctttccctttagatttcatgtgcaaagaagatctaagaccggtcttcaatgagagtgaatactacgcctcccctc

SEQ ID NO: 37640 - DNA, 4550 bp, Arabidopsis thaliana landsberg
catctaacactattgctactccggagactaatactccaattttcaacattaaccctaatcagaatcaggtacctctaatttatataagtcagaatatttatatggaactatgatacttaatataaacgaaatatttgtttaaatatattctgaaatctggattcgattttttagggacaagctgttccagagtttaccgattggtcgtttttggatcagcaggtaaacgatatagtgtttacaagaactaaaagaatataatagttttattttgaagtttatgagtcttagaaactataattttggttaattctttttatataagaattggttgatgacgacttcatgaactctctgttcaacaatgacatgaattgaaaagggttctcttctccaagatgttctcaaaagcgaggtgaagaaataaaaccggcgatacctagtacttctctaagcagatgtatataactagtaggcagatctattaaatatatatgtatatcgtagaagtacggttttagttatgtaatataattctgagtattggatattatgtcttctcttcatcaagcttagttatgtaagatatttctatgtatgttatattatgttatctgtgggaaggtggtaatatacatagtaatgataataaattaataatactatcttgtgtagtaaatagtagtatagattttgttttggtcatatgaattcctacttgctaaaaccctagttacaaaggctaatggaattctaatgacactttatgttggcttcttatggaccttctaatacagggctgatgatgagaacaagagaagataactacaatctgagtccaccatggctaatctcattgctagagaccaaactacaattaatcttggcacacaggagagtattgtctatcactcgtattctcagttcctacgtctctctctctccctaattaagttcattgaagagttgaaaacttagctaatgaatatgggcctagaaccaagctaagtttggccccatcatcaaaactatacttgcctgacaaaatgcctatgacaacgactaagaaactaggctaatcatcaacaagtttgatggactttttggcgacttggtctcactttcacttacaagcatcagtaggaatgactaaaaggaaaagcaactaagctaagccaaacgagttttcttactctttatgaagttccctctatactgtctcgtaaccaattggagtatttgatttagatttacagtttcattttatgctacaaataaaaaagggtaatggaagaactaaatgaatccaacatgacatttttacagcgacattcacaaagaaagctcttctagattgctgtcctcttgagaacaattctggagagctcttgagagactagcttcatatccggtctctctggtgctggtgagatacagctcagagcaacctgcaagacatcagtaagaaccccaaagggattccttgagccctgtgatccaacaatcgatggatcaaaacactcagttgcacggttttgtcccacaagcagtagaacccattcagtgagttcaacgacacctggatcactgcacactatatctcccgaaacttttcctgttagaagctctaacaaaatgactccaaaggcatagacatcgcttttcagagaagggtacggtttactcgagctggcaaactctggagggcagtagccaagggcagctgcgttcaagacttgctctgacgtggcttctggtgtgattaatcgatgaagactataatctgttaggtgtgcagtgagttcaggaggtttcaggagaacattagttgattttagattcccgtgtggaattgcttccccattgtgcaggtaactaagacaactggctatgtccagagtaattttaagacggttttccagtaacaatggtgggaggtttagctgtccagcctctgcaaacaacagaggatgagaaaaccatcattgctatgtataaccatttagaacaattcatgttttaagtgaaaaaaacaatcaaattttaactagaaagtaaagtccaagtctttaccttggagatagaaagctaaacagggtgcatccatgtatcttgatatgatgagcttctcgtgttctttttgactccaatagtaagcctgaagagaaacgagatgtgggtgattgatgttcccaagtttctttatctcccttgcaaattccttcttaccttttgcagtcccttctcttaaccatttgaccgctaatacagaatcagaattaagcactgccctgtacagcgttccatggcaactccttccgatagcttcagccggagcacgagacagttcctctgcagtaagcttaagagaactgtcgaaaatatacaggttcccatccaatctcatagaagtctggcgagacgtaggattatctggtgacttctggattttaggcagcgatggagttgaagaagatacttgggatgacaagatttcatcttttctggattcagagtgaagctcctcgttaggttctttcaaaaatggtgaagaattatcagagtcactatattgggagaaacgtgaagaagaaaccggtagcttggccttgattgagggagtagaagtagtagaagacgaagattcattttcctgtacactgttctttgctgcaatcacattggaagaagaaggttcagtttttggaacaatactcttttctccagtcacatccgacttctcttcatcatgttgctttctcaacataaaatgaaacattacgcaaacaagagcaagtagagcagtacccacgaccaagcctatgatcagggctgcctttacagaagtcttcatatgatacccatgcttccgtaaggttatatctgttttatcttttggtagagaaatggggacattcagtaaagcgttccctggatgaaacgctgaatctggaaaccgtctaagattctccggcacatttccagagagattattggcagagacagtgaacatctttaggctgtctggaaggccatcagggatattcccttcaaagttgttataagaaaggtcaagagaaatcagattgtggaagcgagttagttcctctgagagaactccacctaacgagttatgagacagaccaatattggtcaagctaaggtttcccacagtacttgcatcttgaagaggaagagaaccagagaaattattgtttgacaagttgagttccgtcaactttgcagatatgaacagattactcggtatgacgccactaagctggttgtgactgagatcaatctctttcagctcaggatacgttcctaaaataaatggtagtacaccctgcaacgagttgttagcagccttgagtgaagtcagcctcaggaattgagaagtttggccaggtagtgttccagtgagtgagtttgaactcaaccgaataatttctacagaatctccccaattctgtatccttgacaattctcctgatatcttattgttactcagatcaataatggcacaatgtccaactttcaaaggtaatgatcccgatagtctatttgaagacaaattgagcttctctagtgttgaagaggttatacttccgataggacctgccacaaatattcccagtttagtaatctaaacagatacaaaaaagatttgcaaagaaagtccaaaaatgagaacaagagggtacgaatattcatatacattttaccttcaagttgattgaggctaagatcaaggtcagttaagatggttgaactctcttgcagaaggcccggtggtaaagaagccgacaactgattgtcttgtaaccgaagaatcttgagagagacaacaaagctgaagactggaacagaaccagacaattgattgctgctagcatcaaacacctctaagctatcgaaaaaggggataccatcatgagcaaatagctcccctaccaaagaattcccacttacgttcaaatgacgaatcgaggaaacaaagcttgactttgctagacccagatcaagcgaacccgagaagttgttcctgcttatatctacatactccacactaattagctgtgaaaacagactcatcacttccccagagaaactgttgccttgcaaatcaaggtacttcaacttggcaagactcccaaaaccagaaggaatcactcctcccaagttgttgttaccagagagattcacaaactcaaggttcctcaaattctcaattccagaaggtaatgcgccatggaacaagttacccgaaacatccaagtacttaagagacgttaacgaaccaatgttagagagagttccactaaactgattattcgcaatcgacaaattctgaagcattctcagaccaacaatgactggaaaactgaaactcccaagcagacctaaaccattcaaatcaatagaagtaacacctccgctactacaagtaactccgtaccagtttaacggacacctatcagaggataaagctttagcatcccatgaagtaagaacttttcgagaagggtcaccctgaaaacctttctaag

SEQ ID NO: 37641 - DNA, 7713 bp, Arabidopsis thaliana landsberg
ggccttaaactgacaagagaagagatctcattcatggatttgagcttattctttccagcattaagcacctgatagaaaacaacatcacacagtcaaataaagcacacatattaactcgttttctgtcaaaacaaagcttaatcctggagaacctcactattggtaagtgatacaaatctcaaagaaacaagctcagtgatatcagtggaactaaccgtaagcttagtgagtgcttcaattccatttaagctttgcaatttgttttccacaactgaaagccatttcaagttcacacaagacttgagtccctaaaaaccaattaacacatcaacatataataagctctagcaacttaaaaatcaaaactttggatgctatttatgcttataaaatgagatttatgtatcaatcaacctgaagatctgttagattgttgaaacgaagatcaagcttttccaagtttttgaacttgctcaaacaagacacctaaatatacaattaaacaattagggtttcgtatcaatttctacttgggaacagagtttcagaacagaaacaatactcacgtcggtgagagctttatggccgagattaagttccttgacggaatctgggtcattggtcttcttctctttcaatacttgttcaacggttaacgaattcatcgccgtcttcgtcttcttccttgtcacacaaaaccctagtcttttggtttcaccttattcaaaagattgtctctgttcccaaccgtgataagtctttacccaaaaaccccacagttttctattgtttatacatttgaccttgttattattgtacggatcagggacaccctcttatggtactcctcccactttgatcctcaagttttataatctccgactctgctgactctgttctgataatagagttttttttctttctttttggcgcaacatcaacttttaacagtaaccaaatagacaattacacaatgttatgttccacaaacagtttgatcttgaataagtgtattgtaatgtaacaagggaactcaatatgaaaccaaaagtttgaatctcacgaccatgtatgtgtatacacgtgaaaccatatttcagttttcattagttagcaccacaaacaaaaaaatagcacataaataaatgaattcagagaaaccaaattgtaatcccattagacattctccatattccgacattacaaaataaaacgacagaaaaattatgagatgtttcaacaaaatgtgcgattagtgttcttctcatgagatgtatttttcttgttgctcatgcaaaagctttgctgaagatttagcatccaagtagagtgatgttacttcctctatatcagcctgtcaaaatttaagatgaaggattaataacataacatccacatattttacatttgttttattgttctaagatttcacaagtaaatctaccttgcaaatattgtcacggccattcattttcgctacaatgctggcaggagacagaagctgcacagcgtgcctgagagtgaaagcacaaaaaaggttttagtatttagattcacgaacagaaattttgcttagaaaagcaatgatgacagtaccttagtgaagttctttgcccaatctccccaagtagaaccaagcattcttcatccacggttaattcttcaacttgtgcacgaatggctataatctgtgaacaaaatgataaatctattagaatgttgttcgtagtaattgaaatccaaaagctaaatgacaattgagtaacctggatcatttcagagggatcatagatttgagtccggatgataaccaatcgatctaatagatcaatagggactccatgggggctgggcatatcagtccctctgcaaataaagtaaatcacagtaccaagttaacaaaaactcacaagatttccaaaggaaaatgtctatcaaggtctagcgctcttctcaccttacgttgcaaacacctctatttgttgcaaatatcactatcggagataatgagctctcaagagcacggttcaagtatgagaagcactccatatcaagcatatgaacctgaggttttataattaaacaaaggtattcttactgctcctgagtcctgagcaagatcaatagtggaatgaaaaaaaacttaatttgggaaaatacctcatcaataaatagaactcctggaacaagctctgccacaccttcatctatatatcggttcacaacctacaatggcatataaaaatattagaccttgcaaaagagaaagtaagatgcttaaaaaaatcacccatgtactagcgaaaatcaccttgttaatttcttgccgaagcttatcagtgatctcagtcttccgcggtttcatcatttggcccatcaaagaaagtatatcctggccaccttgaggtcgagcatttgctgcatccagatcttggagtgtgacatcctatcagtcaaaagtatatggtctagttgagtaacaagtagtcttaataaacttaggaactaaggttaatacacatacaaactaatacataacagataataaatcaacaaagaaaataattactctacacagaagggagaggtcaaagaaggtaaacctgcactatctctttctttttgtggacctctcctttgggaagtggaacatattcttctgcttccagatcaaattcagtggcaaaagcatcacttctacctacccgtttgacagctccactgtttgcttcgatatagattacatctcctacagctacctgagaggcaaacagcaaaaatataaaaagaaaccaatcagaatgacaaagtaatcagcaaattcatacacaattgtccccacagaatgacatcgttagaaaaccaaaaaggtgaaaagaaaagcaggttttggaacaaactgaaaagcaaaaacttaggggaaaataccacatccaaagcatagcatcgcatgccaagaactgaccttttccttaatcaaggcatcatagatagtgggatccaatttcagatgtttggttcctttgactgtcttgagtgtaattacaacatggctgatgcttttaccataacctccagtgaggctttcagtttcttctggtgacagctcggtgacctagaagagaaggacaacatgtcaaaaaccaattagcgagacatgctattgcataagaacacagcaaaagtaaccgcaaatagcaacacacctccccttcatagacttctttggtttccttgataggtaaaccaatcgcacgtctaaaattctccatgagaacctctgttttcttaacctctgatgagtaaacctcagatccaaccattggacagaatggaacctgcaagaaagaaacaatccagataaaataagctaaaagtaaaagaaaaaagcttcatacaatgaagccatgtggaaacaatgtaacaaagaagatacaaaatgagacatccaaaattaccttgcttcccagctcttgagagattccaagagccaaagctgttttcccagttccaggaaggccagcaagcaaaagagccttgcccgccattttcttctgcttaatcatgtcaactacaagaccagctgcctctctagcctcaagttgaccaacaaatccagctgccaattttatagggataccagttggctagaaaaagagacgcaacattagcaacagaaatgatgtactggttatagaacgagatcacacagatgcttgagaaactacagtcagtaaaagaagcaaagatagttaattaaaatcaaagtgccgtgccaaagtggaagagcaaaggtcttcaagcatcggtcaagtactatatatttcataaaatacatgtattaaaattgaatatttgcaaatcaaaactagagtataattgtgctagagccgaaaaaagagtctcggagaataccaaacgaagcaatgagcttgaaacccctaaaaatcattaaactttaaacacaaaaccttaaagaactttgagcaatacgagaatactgcaatgcatcttatccccagaaaagtcgaaactttacaaatgaaaactagggtttgtttgtgctagaacagagaaaagaaactctaagcgtagtaccaaacgaagcaaatagctttaaaaccctaaaaaagcttagaacataaaaccttaactaaaccctaaactcgagcaaactactggaatccactagagtcaaagagagagaggagaaggagcacctcgaggccaaggcctttgatatgggtgtgagtagcaatccgttgtttcttagcggtggactgaatttcttcaatctttactttctccatctccgtcaactacaattactttgatctgctttaggtcttttgttgtattctccgacgacgaaaacgacggcggaaagttttgagctttattgagtttgcaacgcctccctctgactccaaattgccaaaacctcttcctaacaaagtttatatgttaaacatgttgttgcaacaatgggcctttatattatcctttatttacaaaatcaccccacacttcctaaactcagaaatagaaagaaaacgaaaacaattagagaaaagggcgaaacaaaaagacaggactcaatagtcataaatgtaaattaaggggtgaaattataatatatgaataataaaagggtcttctttttggaaactttctttctcttcatcaacaatagtgataagcttcttcttctggaaaaaaaccagaggccgtctcactctctcgctacatggagagtctctcgattcccgccgcttcttggttttccggcggaaccattcctccgacgaaggtgagagtttctccgccgcatcatctccggcgacctcccaacaggaattcccatcgcttggccgccattaatgccgcttctcgctctggtgacaatctctctctctacattgaaccttactactcaaatgttcgctctttgtggaaaatttcatgtcttttgctttgtttttagtgagtgagctagtggaggaggatgtgttgcaaatgttcatgaaagacagagaagaaaatggagatttcatatctaaagtttctgataggctctggttaaaggagattctcgaatctattgatgttaattccaatggagcttcttcttcagctgttgaactagatgatactcgggttaagtttctttcacttgttcattagtaactgtagctagttttttttcttcagttctaagaatgcttttgacgattaaaattgctaactttgtatcgaggaatagtttgatagttatatcatcctgttgcaattgacatgagagggactacatttttatgaaatccaatattgggaagcgaatttctgaaatctcacatagtcatagcttgcatggcaacaaccttatactcggtgctgacacttgggttgggcactagtgatagctcctttattaatgtctttatgttgtatatgcaggaaagcttgatagatggcgctgatgatgatgaaagtggtttcttgaaacttaaaccgacacaagaatggattggttgggagagtgattctgcccccatgaataagaaagctctagctaaggttggtcatctatttatgaatgttcttgttctctgtattcattcattcacacgtccttctcattgcaaaactctgctgcgtttgtcctacttccttgattgcaggcactacgggatgacagcgagagaaggaagaagtttaactttctgaaatatgaagctgtatgattattcctttcagtatgttttcttaattagtctgccagtcagatctttatgattcaacaaaacactctattatgcaaaatggctgttcagtatgtaccagtagtcaatttgtgtagaatgaactttgaaattgctgcgtttgtgtctttatttttgtagctgaagcgtgaactcatgtacctgtcgattgtaattggaactggatgcagcggatactgtttactagctttatcagttcaggtaagctctgtcaaagctctaaccagtttatactatggcttctctatacgaaaatgtgtctgaaagaaatattctgacatatgacaggctgcagtcagttatgcagttggggttctattcaggttagttgtctattttaattggtttgtacataaatagaccttgacgttgtaagatatagttctgcaacatgcttgatcgagcactcgcgtattcctaaccaaatctgatcatagtgcagttgcttgtaccttcagcttttgtatggatacgctgatggtctatcacgtgaagctgttcctgatatcttcctgaaaaaaaagtctaacaagtaaagaccttgacaactttctagtctggtcacgttttcttctcacttcccatactcacattgctctgaacttgcttttgtattgtcccaattcagaatcgggatcagaagtgaagaccttgaggactttgtagtgaggacaatcaggggcagtggcatggctctctcttctccacgcttggtgataccagctttttttatggtttgtggatactctctcacaagtatttccagaacgacttgttcgactttcaggtaagctattccacgttgcgaggttttagctatgtttatccgtgatacctcaaagttatcacatgttcttagacaagtttgaacctttatattctccacaacgattgtgctttgcagatagttccagcaatggttggtttgtttgtatacaaagctgcagctctcgttcaagtgtacagagacaaccaagatcttcagttcatcttcccagatgactactaactgcaaagttcacaagcggccttccgagatagaccaggaaaccacagaattgtgaattgttcggtacatattttgagagaggaacaggaacagaagctagactcatccgctaagaccgaggatatagtgagttatagatcaaaacggcgtttttcggcttttttcaaaagcaaagcaacctcttctattttttaaaacattctgggttacttttctaacgaaaacaataatacaatgtttatatgcatgacttgaatgagtttacaataaactatattggattttgcttctttctttaatattttatcaaaagtaagatcagaggcagcagaggcagcttcgagagtacgagaaatttggttgtttatggatctacaataaaggatcgtagcttgtagcatgttaacaagcctagttcctgttcctctgtacaggctagagatcctttgcaagtagaaccataaacatccaagaaaaagatcagagacattctatagactcttctctttgccttgttatggagatgatgttgtggtgtctcctgcttacagcgtctcgtagttcctccccattcatcgaatcatgcatataaccgttgtggtaataaccctagttccttattgttttcgttagaaagtagtaacccaaagtgtttttaaaacatggtcaagacttattttactcttagtaactaaatgtcttcttatgttctgtcctctttatgcaaattacacagttccatgatattcgtttgactcctacatctctcaaaatgtttagcatttggtcttttaattatctcatggtaagagttaagtcaccttcgttttaccaatttggggacattttatcagaaggaggtcacgtgcgtcaaacattgattgttttatacacactccagcggtcaaatctcgtcggccc

SEQ ID NO: 37642 - DNA, 3712 bp, Arabidopsis thaliana landsberg
attccggatttttgtcgcctgggcttattggttgttccgtcttctggctcaattctgggaaatgagtttagcttttacgtgctccgattcgttttctgggaaattttttgttgcagagaagattctctgttcgtacctggcgctaagtttaggcaattaggctttaacactgtgaagacattccatccaattgacttcttaactgaagaaagtcgaattttcttcagattgctttaagaatttcgtgtttgcttgtgctacagttatgtttgcttgtgctacagttatgtttgcttgtggatcaggaaatgaagtttgttgcttgtgtgtttggctatctgaagtgttctcaagtatgatctgaaagaaaaaaaaccttgtgatgtgttgtgtgtttcagtgttttcgaagttgaaaactcgggaccaagaatggtacttcttcagtgcgttagataagaagtacggtaatggtgctaggatgaatcgagcaactaacaaagggtactggaaagcaactggaaaagacagagaaatccgccgggatattcagttgctcggtatgaaaaagacgcttgttttccacagcgggcgtgctccagacggccttcggactaattgggtcatgcacgagtatcgccttgtggaatatgaaactgaaactaacggaagcctgctggtattatgttgtccaaaagagttacttttgaattggggttatctcattttgtaagaatcctatcttatcttacttctttgtctgggtgcagcaggatgcatatgtgttgtgcagagtgtttcacaagaataacattgggccaccaagtgggaacagatatgcgccattcatggaagaagaatgggctgatggtggaggagctctgattccaggaatagacgttagggtcagggtagaggctctaccacaagccaatggaaacaaccagatggaccaggtttgtactttctttatactcaaatgtttcttatatgcataacctctgtgatacatccctctaatgtgaatcatctctcttgattcacaagatattatatttcttattgcaaaagctctttgcttctctaagtgctgtttcagtgggctgatttacttaaactgcacaattccattaagtttgctatcaccttttgtagaactcagctcaaccttacagctttatctaatgaaaggtctctcttgattcacaagatatctaatttttctttatggtcctttttctttgagatttatcctttgattacatgatatttcagacttacaatcttcgtttggcattaaaggtgctcaacaagagaaatatttattgtgttttggttaatctgcaaagtcgatcaacgcgttttggtttgagatattttatgtctgttggggttcacataacttgtaatttgttgtaggaaatgcattcagcaagcaaggatctcattaacatcaacgagctaccgagagatgctactccaatggacatcgaacctaaccaacagaatcatcatgagagtgccttcaagccacaggagagtaacaaccatagtggttatgaagaagatgaggacacactcaaacgcgagcacgcagaagaagatgagcgtcctccttctctatgcattctcaacaaagaagctccactacctctcctgcaatacaaacgtagacgccaaaacgagtccaacaacaactcaagcaggaacacacaggaccattgttcgtccacaataacaaccgtcgacaatacaaccaccttaatctcatcatctgctgctgctgctaccaacactgccatctctgcattgcttgagttctcacttatgggtatctccgacaagaaagaaaaccagcagaaagaggaaacttctcctcctagtccaattgcatctcctgaagagaaggttaatgatctccagaaggaggttcaccagatgtctgttgaaagagaaactttcaagcttgagatgatgagtgcagaggctatgatcagcattctccagtcaagaatcgatgcgctgcgtcaggagaacgaggaacttaagaagaagaacgccagtggacaagctagttaaaccaccgcaacatctctccaggtgtcttcttcttcttcttcttcttctttgcctcttagctgtaatcttcttaatagtatgagctatggatgtagcttcttcagacggatcagaaaccttatgaatctctgttgtaaaattaggataaaacggaacggagccaaccaactaggtctttttattttatccttttttactttggatgtttctgcatcttttgggaacattttcaggctgatccattgtcgtatattatcatctatctatctagtcttttcagacaagaactcgcttttgtttggtttcctctcaagaaatgttcagtctccataaagaaagctttttccttggggtaatcattagtggtcagatatgagggcataatcgtcattgtcatttgaaatgaccttctggtcttccggacaagaaccactctgttgcttgatgtttctgtgtgactgtctccacagtccacagggaagagagcttcttaggtaaagtcgtgattagtggaaatgattgagggtataatcgtcattgactaattcagcgttacgatttaggaatgtggttccgtcaacgacgttagaagacttttgttacacgtaatttgcaattatttgttttttctctaaaagcgaaaagcgcttggtacgattcaagcctggattccatctctctcccattaagttttcaagaagaagttttgatcacagacgtattttcgaaatggtttcatatcttactaggcaatggaatttcgtaggtgttatagagtttggtgtttatattttacttttaactacatcgtcctattatacggaacctgtctttttttttccacacggaaccctgaatgattgtactttttggtaggtttgttctttattcgagagttgtaaaaaaacattatttcgttttaagatgactacgaaagtgtaatttactaaattacttttcattatctactcccaagtataatttactacaaaaacgtacgcagtaaaattttgctagggtttattactgcgacataatgaaatgtaaatcgaaaattggtatcgcaatccaaaatacttttttgttgctctctactagcctgcctttctaggaactcgaaaagaaagcaaatttcttgcaattgaaggtacctgcttctctttttctggtttgtctggtttcatattaaaaaaacattttgacaactatatttctggtttgtctgaaaaaattgagaagaaaacctagaaacaaatacggtcttttttttttctttttatgggtcgcgaatctctggctgttgtgtcctcgccgccatcggcgactgcgcccagtactgctgtgtcggctacctcgcttgctcctggctttcgatttcatccgactgatgaggaactcgtgagctattacttgaagaggaaggttctgggtaaacctgtacgcttcgatgcgattggagaggtagatatctacaagcatgagccctgggatttagcaggttcgttaggtttcttcttcttcatttctgcttatctctatgatttgggggtttctgtgaatttgatgcttctgatttgggatttttgtcccctgggctcattggttgttccgtcttctggctcaaaactgggata

SEQ ID NO: 37643 - DNA, 2987 bp, Arabidopsis thaliana landsberg
gtgatcagatttaatgttatgtgtcatcttgctatatgttcttgatttggatttgatggatcacacagcgtttgtgttaactttaaatagaatctcaagacagactttatctccccttggattttgaatggggatatttgttgcttggagattttataagaacaatgactgaatactaataacaaaaaaaaaggctttatttccaaagaaagaccaaagaaattgctgatgaatgataatcaatatgtttccaaaatcttaaactggaacaagaagaaattactacttaaaaccaagtcataaagagcagctccttgaacacattttggcataaacagtaaaaaaagaaaacaagaaagcgttagacataggtatcgatcaaagacttcctcatttcactaccgacgaaatcaggctgagattggactagtttgaagatattgttaacaacagagagctctactgcagtagtatctgacccacagaaagcggtccaatcgttcacagtcaaacccgcggatataacttggctgccacggttcacggttcctgcaaccaaaggcacctgaacaagattcgctagctcgaccatttcttccacgttggtatttgagtgaacctgtacatcatattagctagtcaggtgattttctagtgagacaaatgccacaaaacaaagacgaaccaaaagaatgggtgttttttatatagttgtctactaaccattccaccattattggataaagaacaataacttcccacaagttcgttattcgcaatggtttggcgataaacttcaacaccaagaacatcacttattatctcttcggtgtctttctcgagctttggatgcacaagcgcgacatagtcattgcaagctatagcgtttccaagtgcacatataggttcttcaattcgttggactacaacttcatcaggcaaactatctctcaaatgttgaagctctgttcacattataaaatagtccctaattaataaaaagatcattacaataactatatgaacttggaatagtggaaaccaaatcaccttggtctgtaatggtgtgagacagaagaagtccgtttttgtttccgacacatagactaccaatagtccctgatcctcctatggaagtagtaacaattgggataacaccttttaacttcgactcataaccactacaaataaattaattaaaattacaagtcatagaaaaaccaaacttgtacgtgaaaacttaattagacaatgtgaagactcaagagtgtatgtatgtatatatacgtgaagaagtttgcggaggcagatgttgcggaaacgagacaataagcatttgtgagtttggaaaagacaccaatttcgcaattattgttatcatattgaagacctgccaaaaacaagaacagaaaaaaaaaaagaacaatcctgtaagcaacttgaaaagaaagcatcgtataaaaagctaaagcttaagggaaactcacgagtcgccatgatatggatccaacaaacacctgcggaattaagtaacacgaaaacctaatatgagattatgaatttcaatacagatccaaggcagaaacagagaatgaaagatttaggttttcggatcattggttatgctatattgaaagatttagttttaaggtttaccttgtcgacaaatcggaacaaaaagtgacggaacgataggaagagaccctattctctcttccgaaaaccctatttatatatcagaaacttggaacaagcttatgctacttatttccatttattagttttggtaaataataaaaaagttaaaaattaaaattttgagaggaaattgtgaatgtaaaaagaaaatgatttaatctcaatgtgttgatataacttctacgattcaacaatcagctgcaccaatataagaaattaaacatactcataataataatatcactccgctcatcacaatgatatctttaaaataactgtccaaaaaaggtagactagagaagaaatacacaaaattcagcacaaaaaataacaggagaacaacgctcactgtaacagtctctctcccctctttacacaacttgctctacctctctctctctttctctatgctttaaacataattgatgatggtcttttcgagtgtttgtttcatttcatcttgctgcgaatctacgtctcctccttcccttcaccggcatggaaccaaaactagtcagttcatcttcgtcatcgcttgtttcatctgaccgccatctcaatccaccactgttatttctgctctccgtggccaagacattgttgttgttgtcctttaagctgcaattcataatacacacaattgatatgtagctcatccaatatatgactaaaagccgtggacataagaaccaaacaaagttccttagactgaaaccaaactggactttattttcaaaccaaacggtaacaatagttttataccaaacaataccagtgtcctctactttaatggcacgattcagaaaggaacaaatggctaagagataaagaagagaggaatacctcgaagacatgtccattggatcatccaaatcaacaaagttatctttgtctggttgcatccttgtgccaaaaaaggtggattccggtttctgtgaagatccattgagatggttgctgctagatttcactgtcacgggattgttagctgtgattcggcggagataaggagagctcatattattctctatgtatctatcaacatttacttctggagaggattcttcagtccttttcccttggagctggctgttcccacgagctctatttagatctttgaacggagttgacatttcaccgaatttcagattcttggttacgcttctaacttcactcttttgtcctctatttgcgtttggaaataaccttccatgtgaaagatcatgggacgcgtttcctatcatatgaccaggttgaaaaggactgccattattagccactggctctct

SEQ ID NO: 37644 - DNA, 6135 bp, Arabidopsis thaliana landsberg
  unsure (1)..(6135): unsure at all n locations
tctcaggagaagaacacgcagtctcagcatgttggtgggcccagccaccaccaccaacaccagcaccatcaaaaccggagatcgggctaccatggcagaaaccaacccatggccagagagagaggctttccgaataacccaaaggtcaagcaaatctatgtggctaagcagactggtaacagctgtgcctctgcttcctctactaccaccaccacttccccctcaatttgatgattcttcaccatccaggtccgttcagatataaactcatcccaataacccaaccagctttggcttcataagaagatttggactttttttcctttcaattttcccatatatcaattagcttcctttttttctactttttatcctcgttagataattagattttgttctctttactcgtttggggattcattatatggggactttggtaatgcttaatttcgtcatggttggtaaaaatattgtcgtgaggttttcggtgtagaatacccaattcacggccccaatgtatctgttgtcaacattatctttatagcttctacaaatcagtacacactcttattgaattaattttttatgctttacttttttgtttcaaaacccttgtgcaatgaatcgacaacttttaaagttttaagctaacttggaaactttgcctaaggaaaatgctttgttatgatcaatggatctttttttctttttggaatccattgatgtaagctttcaaaggtcggatatgttatgtaagtgaagtttccacagcctgtgtaactttacaacttatggttgacataaaatggtaccactttttgtgaaagaaaaaatgatgaatcgacaactttaatgcaacagggtattatgacaagacaaatctaatatctttttctagatgatgatgtgcgcagaggtccaaatcttgacgacttatgaagtaaccaatgcgagctcctaaagtttttcactaagactacgaatattttgccaatttatacatcttataatgatacaaagacagaccaagacttgccattaagatgagctatagattaaaactgtgatatatgtatcttcagtaataatattacagataattaagcctcagttaaagaactataatagagctcatcaaatatcgttaagaacagcaacaacctttctagttaccaccataagcagttctcctcatcatcctcatgaattcatccatgttaacttcaccatcacctgcagttttcagtaatgtatcatatatctttagtcaaaccaagcattgtgccacaagagaatgagaaaaaaggtttaggacacttacggtctcggtctgcttcttcaaccatctctcgtatctcagcatcagtgaaattctcacccaagtcctttgccatgcgtttgatatcatccggagatatcttcccctgaaaatttggaagaaaaatagtttagtttctagaaaaattaagatcaaatgaagtaactaactaagttatgagtaaatacatttttgtcaagatcaatgatctggaatgctttagtgagctcttcttttgtgtctctttcaccaatcttagcagtcatcatatgaacaaactcatcaaaatctatagctccacttccatctttatccacatcagctatcattttgttgatttgcttcaataccaaatacatcaaggtatcagaaccatagatataaacaacgaatcttagcggaaaaaaccgaaaaaacgaaagaaataataatacctcttccgtcatttcaaaaccaagcgccctatcacaaatgataatatcaagaatcaattccaaaaccataaaacaaagacagaaagatataaagctctcgatattacctcatagcaacattaagctctttagcatcaatggtaccagaaccatcagtgtcaaatagctcaaaagcttccttaatctcttgcttcttctgtgtcgtcaatccatgatgacgtctcggtttctcttttctcgaaacagttctgtatatactcgactgcaataataacatccaaaattcaaaatctcagctctaacactaaagggtttcgtctaaaatcttcttcaatcatggaaccctaatttcttcattctaacattcgctaaatacaaatcagatcttaaaaaaaaaaatccatcatgcaaaattgttatctagagatccttagaaattgctaatctctaaacataaaaaaaataaagacagaatcaaaggtaagaacgaaccatatcttctacgaatcctccaaatcgatcgatcaaagctctttcagtttgcgcgtctaaagaaatctaacgtttctgctttcctttacattgttgttgcttttccatactaaaaagcggtaacgatatgggtcagatgggcctaatagtgaaggcccataacaaaacacagatctgctatgtgtagttcttaatcagacaatcagacaaaacacagatgtgttacttactccctcatcgttccctacactttctctattttctcaatatttcgatcgtttcttcggccataatttttcttcttttcaaaagttataatatatataagttannnnnnnnnnnnnnnnnnnnnnnagagatcagtttttctgttttaatcactatatgcaaatgcacgtgaatttgcataagcctgtatcaagcttagcaacgaatataagagaagccaacaccactctcccatggacaaaagtcagacaatagaatctgagaatatacttttgcaaattgcgttctgttgcatatatgaaattatatatcacatactaaacgaagatggatcaaatcaaatcatgcattatacagtaaacaatatgacttataaacaagttgggtccaacatatattagtattttactattgtgtgtgtaatattacaacgctgactggactccaccgactgtttggcgtctcaatttacataccctgttccggattaacctttatccccacaacgtttaacagtcgttaaaattatcatctcggcggcgattggttcacggtgcacgccaccactctcgcccattgcttcagcttcgtcttcaccgtttgcggatcatcacctattcaaatgaaatttgatcattataaatttataatcgtgtatgtgtatatatgtgtgtgtgtgtgtatgtttatacatactggtttggtatacggtgtggtgaggactggtatcgccgtcggagagtgaagacgacgacgttgttgatttgttagaaacggcgtcgttgtagcttttttgaacggcgaagtaaagttctaacgcgggaagcgtgttggaaagtcttggatcagcgttttcgggagatccgaaaccgaatccgagttcgaaacttgctttaagctcgtcgagatcttcgtcggtcaagctcttaccacggcggagatgacggtggcgggagatatcttgacgttttgaccaagcttcctcgcggattagatcaggagaccacgagtgttgcttcaagagagaagtagaaggtaacggtggcgcgtgtatgcgacgcactacccccggcgagggggtgtgcggtggtggaaaggttttacgatcaatggctggttttttggtaattaagtcgaaatatttgggtgaaaaaagttagggggaagagaaaagttagttgaagattagtgataaaggaatggaagagagagagagtgttgccgactcagggatattgggccggcccaagtcatgatgatgacctggatttgtttttgattggttcattttaattttattaaattatgtaatgtacctggaattacgaagcaacacaagttggcattgcataaaattactataaaactttggaatttcttcctttttaatcatagaataagggaattttatgagtaaaagttcgatacgaaatcgcttttatgagactttatgtaatatgaagaactagtgggttgaagttgatgtagataaacgaccttatgtgtaacatcatcatctttgtataatgtcctttctgagattaaagataccgtttttagattttagcaaacgatgtacattgacttatattgggattctggatttgtggcccagttagcttcttatagcccaataactatgtacttagtaatacagtatgttaacactaaaccaatccttttcttggtttggttagagaacactaaaccatacataagctaataaagagattgattcgagtagagaaacaaggtaaggtttggttcctaaccatgagaagataatcagaaaaatctacatcagaatttctctaggtcaagcttaattgttaataatagatgggtagatattctcaatgtgtaaatcaataatatccatatgtacgagaacaaacttttttatggccggttgaactaactgtatttaagtgatactttactgcgtgaactagttgttgaaccaaaaacggttccaatttagacagtgaaaccaaactcggcagactctttatgttggaccacaacaacatagccgatgatcattaagtcaaaaacttaacgtggtggtggagtggatggtctttatactcgttagtgtttgatgagctatattggatatataggcatgttctaagaattctaatacatattaatgatatacatttttgtatcagaaagatgcatagtataatgttttaaatacatcaaaatgtggtagttgggtttcaacagcacccaaaattagaaactgttgaattgcaagttgacaatgacaacttcctttgaaaatatatatcatcaaaagatcgaaaacagtcatacgaattaagtttgttataagaattgtttcgatcattaaaatagttaaaatttgatattgtttatacattattgatctgatattctgatatgatcactattcaacttttgtttcatttatgtgtaccgtttgttcaacgtaaattgtatattctaattcactagcaagaccttgttatgttctctttcccattttacactatttacgttactgttaccattcggatcggacctgcgatattaccacatatatggtatactactaaaacaatcctttatgtaagcttttgacgtattccacaatataattaaacttgatctattaaacgtatcatggcatgtcccaaaagtttacaatttctatacataaacagaattttagaaatatggactaaatatttaatctgcttaataaaaacagtgaaagaaatacgcagacctgcaaaatcactttaatttggtgaatcttatggaacatacaaaaaacaaaattaatcaaattcaaaataatgaagaatacaatgatcgaaactcactttatccttcgccatcgcacgcacgcttctacgatggtatagctttatagccaccctaaaacctaacaagaatccatttgtaaagaacagacatgagatatcgaccacacgagtgcttacttttatggataatatatttatcaaaaggcgaatggtttatgaaaaggaggtcgcgaattaaggaaaaaaggttatcatactttatgtcttaaaaaaggtttctcatactttaactagaatcgtcttttttattataataggtttcgaagtttcgattagtaatttgatgaaacgaagtacatttgatagagttgtttatctcggttgttatgaattcttacttagcaaccatacaaacaactgatttttggtcagatatacattatctcggttgttagtaaagtgtttacattcattcgattagtaaatggacgtatattttatgcgttttttttttttatctattctcactagacttataattgaatttgggctactatcagtgctagattgtttttctattttataagaacaggagtggtatagtactagtgtgtttgttgtgaatatcggtcaaaaaagatttaatggcaacttgatatatgtgcattatgcatatttgatatggtctacatgttctcttaattattcgtaaaataggttttgtagaaggtaataactaataaggtattaagcacatgggggagctttttacccactttgaatttgtttcactaaaaactataataattgtattagctatgatatattataaaattcataactagtttatcatcgagataatata

SEQ ID NO: 37645 - DNA, 6200 bp, Arabidopsis thaliana landsberg
tcccttcccattccaaaaatgcattgcctttcgaacctctaactttcacatttcaagacgtacaatattttattgagactcctcaggtaaacgactaaagagtatgcaagatcagtgcaagttttctagaatccttttaaacatgatacagagttataatgtgtgggtatgatttctgtgttaaaagggaaagaagctgcagcttctctctgacgttacaggtgcattcaagcccggtgttctcactgctctaatgggtgtgagtggcgctggtaaaacgactctgcttgacgttctctcaggaaggaaaacccgcggtgacattaaaggacagattgaagtaggcggttacgttaaggttcaagacacattttcgcgggtttcaggttattgtgaacagtttgatatccattctcccaacttaacagtccaagagtccctgaaatactctgcttggcttcgacttccttgtaacattagttcagaaactaagagtgtaagtcattatttggaaaaaataaaaatgttttcttccttcctttagcttccttgtctgagtattttcttgatcttcgcttttcaggctatagttaatgaagttcttgagacgatagagctcgaggagattaaagattccatagtaggaattcctggaattagcggtttaacaacagaacaacgaaaaaggctaacaatagctgtggagcttgtttccaatccttcaataatatttatggatgaaccaaccacaggattagatgcaagagctgctgcaattgtaatgagagctgtgaagaacattgccgagactggcagaactgttgtttgcacaattcaccagccaagcatagatatcttcgaagcatttgatgaggtaaaaactctgaaagttaagaaaaacaattcatctcattttaacatttctcttatgtataagtacattatgtgacccttcaattgcagctaattctgatgaaaaatggaggaaaaattatctattacggacctcttggacaacattcaagcaaagttattgaatactttatggtcagtttctatataatactgaaactgttgcaaaaaaagtgtggtctcttctctacttacaaattattacaataattttcaactgtagagcattcatggagttccaaaactgaaagaaaactctaacccagccacttggatacttgacattacttctaaatcatcagaagacaaacttggtgttgatttggcacatatatacgaggaatcgactttgtttaagtaagtctaaatacttattgtgactttggatgttgtttgcctgaaactgattttgttatttgtttttagggagaacaaaatggtaattgagcaaacgagatgtacatctttgggatcagaaagattaatcttgtcatcacgttatgctcaaacgagttgggaacaattcaaagcatgcctctggaaacaacatctctcttattggagaaacccttcctacaatctcactcgcatcattttcatgtgttttacttgtatgctctgtggcattcttttcttgcaaaaagctaaggaaatgttcgtgtcttcccccatcttatttgagtcggctttgaaccgcgtgatttccttgatcttaaaaggtttagctatttaaacttttttacctctcttctttgcagaaacaatcagcaagatctattcaacgtctttggctcaatgtttacggtggttctattctctggaataaacaattgctcaacagtgatattttgcgttgcaaccgaacgaaatgtcttctaccgcgaaagattttcccgtatgtacaactcatgggcgtattcccttgctcaggttaaaactttttctcaatcaaaccattaaggaacgaaaattaacaactcagccattggttttgactttaaggcttaagtttgcaggtgttggttgaaattccatactcattgttccagtctattgtatatgtgataatcgtatatcctatggttggctatcactggtcggtctacaaagtgttttggagcttctactcaattttctgctccttgcttatcttcaactatttcggcatgcttttagttgtggtgaccccaaacgttcacattgcttttactctccgctcttcattttacgcaatcgtcaatctctttgctggttatgtcatgccaaaacctgtaagtcctctcttacctctcttcaccaagtttgtgaagttcgattcttattatgtgaaagaaagaaaaagagttagaaacagcatcaagatatgagattcaagagtttttgttgttgatgatgcagaacattccaagatggtggatttggatgtattacttgagcccgacgtcatgggttttgaacggattgctcacatcgcagtatggagatatggagaaagagatattagcgtttggagagaagaagaaagtttcagctttcttggaagattattttggctacagatatgactctctggctcttgtagctgttgttcttattgccttccccattctcttggcatctctttttgccttcttcattggtaaactcaatttccaaaagaagtgagttagcattttcctcatatataaaagtttttggtatttagaagtgagatttagtttgcagatttgtcttttgggaaaacatcttagtatcaagcaaaagttgaagctttgaaagttgttgcaaccttttaggttatgttcaatggatttttagattcctttcgaagatccatttttaatactttgtatgctttaaaatgtttgtcaagtttggtaagtggaagtttccacatttgtatctcttgcaacatatgatcattataaattgtaacactttttgggaaagaaaaaaaggtgggattttgtgtcttagaaacaactaaaatgaaaagaaaagaaacgcttccaaaatcggtgaacaacaacaagcttttacagttgtgtgcaaaaaaaaaaccaaagttgcaagtgactactttctcacaaaaccaaaaacgcataactttggtagagaatgagccgtccatatatacagaagaaggatctgagttttcttcatctccttacacaatttacaagaacagaaccatcctttggtgtaaaatgcaaaattgtgctcaggtcttgtatgagacacttttcgtctgaactctaaaccctacaggcaacatttaagtattattgagcatcaaggttgatgggagaagaattctcttaaaaaaaaaaaatttgtgaagaaccaataaagttacctcggattccgccatttcttccgagcagaagaaccgtagaccttgcttgcacgggattttttagctgattctagaagagagtgactgaggaaaaatgctaagtgttcatggcgattagctcatccggcatgcattgccttatattaatgaccattgacttattatatggcgatgagatgtcacaacattggcggcgaggcaaacccatctgacattttattttcaggaaaccaaaaaaaaaggtgaatccaggcaaaattgaaggtactttaacagagaagcgatcagtatttataaatcctacctgttcaacgttgcgttccagtttaggagacagaactctgatgcgttctagacgctcaacagcttctgctctgtgacagtgtccaactctatggatgttatagttactccatgttccctcagttccatctgatcctacactgtccaagaaaaagacgagcggtctcccacatggatccctcggatattctcttgtactgaacatatagttgctttggacccctgaccctctcctccatgtagaaaatgtcttttgcagtgtgagaagatccggaagaagtttatttccttcataaacttgaaccgcgtaaccccacacaaccgaaacagtcactgtgttcaaagaatcataacacacactctgctgtaaaatcctcccggaatcaaaacttgcagctccgataagatgagccacggattctgtcctgttcctttttggaaaaaacggatcaactgcatccaagtgatgaagagataccaatggagataaagggtgcgcacatagcagaccaaatatgttccctctgacatcaatctataaaatgaacgcatacatagtaatactcagattaaactctctagcaacaaaatcagttatagtaaggtaagcaaagcacactcaaccggaaaacaccgcaacagaaaggaacattctaactattctaaccaaaagcaaccacagaagacaagtgatctatgaactaaactttcctaatatagaactctctcagaacttttatttttcaacaatcagcatcaatgtcacagtgaaccatctcaatctctatcagattgttgcaactaatatagtaaaaactccattctttgattacctgatgaaatccaggttcatgagttaatgtaacaccaagctcagcgacgcaagagaagatcctagaatcacttccatacatatgtgaatacctcatcaaacaagaatccaaaaccttagctaaaaccttcgcaagcgaagcactaatagcaaatccaccaccaccaaacgccatatcaaacgaatacctaacattctgatcataaaactccgaattacttccgacgtaaaaccacttccggtgatcatacttagataaaaccgtcaccaaattatctacaaagaattttgtatcatcatctccgaaaacaaaccaccgcacatctttatctcctctatcaaccgtctctttaacaacacgagccacacgaatcgccgatcggagaccaccagggaaattataaggaaacctagaaacgtctttagagacaatcacaggaggaagagttagatcggactccaatccaccgcgatcgagaaacacgacggcgcgtgtagattcaggagagtaccagagacgaacgtacgagctacgacggagccaagagtcgtgagaagcggcgatcgagaagagtaagtgacggcgacgagtggagaacacagataacgatcgagcgattgatgaaatctgttcacggcggaaattggtgccgtaggagaagatgatgtagatgatgaaacaaaagatgagtaataagaagatgtttctgatgcgagaagaagttagcgacggagatttggccggaaagagcatttccggcgaaagagaatcgagtctagagagagatgaatcaggtcgtctcttacgtctcgtttggttcattttgttgttaactttcctcttttgaattcttcttctctgcagattcgacgacggttaaagtttcgaaagtagtaggctagtagcacgacgaagcagtcactttcagtgaatagacttggtcattcgggtttacaggtcgggttttcgggtagtttcggtccggatctagctttcggacctacttgatgagaccgaggttaggtgttgtgttgtgtcatgtgtatcatattttatggttatgggcttgacatatgagttttagttggagggatttggatattatactcggcccattaaattattaagctgatataaactcatttgggctcaatatgtcaagcccaataacatacggatttggatactaaaactcatttgtcaacttaactaactatatttttttttttctaagaatgtaaatattcattattacaatgaaaatttcggttacacaataattggtaaccaaatcatggttccatgacaaaaaaaggataaaaagcatggaagcatacaacattcttgaacctaatcctcgattcttgttaaagaagttgattgggaacaagataagatgaatccctaaagtgagctaggagaggaaacccaacgaagacaaataagtgaagctcacgaaacccccaaaacaagatggcagccctttcaacgggaatccgagcacatcagggagctccggaattgccgagccaaaagtgttaggcaatgcttactcactctaacgagtcccacttagaaacggaagcttagaatcttgcaacatcttaaccacaaagagccatactaacaccaccaatcgcaaagagcaaaacagagacttcaacaaaatcttcgcaagattacacatagacacaaatctgatgtgactgagcttaggtaataacataagtgacaagaggagacagataaacttgaacgcaacaaagaggactcaagagagacatgccatggaaatg

SEQ ID NO: 37646 - DNA, 3228 bp, Arabidopsis thaliana landsberg
ttagcatccatgatccatcactagcctatgtgaaaattttacaacataaagtatatatacatgtaaataacgtttataaaccctaatttcaaccgtcgtctatgtcggcttcctttgctcctcagattttaaaaaattgtatttgtgattttggaaaagaaatcaagcattcgattcatagaaaaacttaatcaaccaaatatcatacttacatgttacaacaaacgtatcaaagtttaggatttcaatcaaatttccgatgacaaaatatttatcacacaaagtacaccaaagtacattggtagccaaattcttataacaaatataatatgataggcatatacgtctaactgcatagagattaacataagcactccaaacatcttgaaacaaaaacatgtacatgtttgtttttaggaggtaaatagtcattaattttaaataaatactaatagatatgcttatggctagaagacacatagtagctatatctaattatgtttgaaaacaatgacaaaatgatttttattttttattttttttgcttcatcgtacgttatagatctactttttcccaaaattatattgctgattaaacccttgcataattaaaatgttagagtactttatgtggatattaccgagttgacgtttacaattcagaacaaaatatttgatatatataaaaacatagtattataacaaaagttgcatatgtactactcatcccttcgacctactttgatccgtttgatgataatataactaattaaaaccttaactatatcataccaaatcagagaccttttactagttataattaaccttgtaattgaaaagagagagagagagaaggggtgacagagagagagtaagcacacatagcttcaagcatgaaaccctaatcaaaaaagcatgcaagaaaccaccatgtgtgctcactctcttctgtcacctcctaattacctttcacactctacgcatgtgaccaggctcgaaaccgtagctagtcgtcctccacagccgatatcgacccatatttatttatatatatcattgttctgttaggggattaagaacaagactctagaccttacatctttctatctttggatgtgggaagaaactgagacctgtcggggctttttatagccaaatggggatagagtattgggattaaaaaaaaactgataaagatataaactcaaatctctctcatgaattattgataaatttgttccattttctaaccacgtgaactgcaactttctacttttttcttaactttttttgggtctaaataactatcaactaaatgctgatttatttactacttgatttttcatatgcgtcgtatgttttagctaatgataatgtttttgtcaaacttaattgctaattcgaatcacaaaataaatagtcaaacggtattgtctttttatctgtgttgcacgtttatttacagagatatctaatcagcattctattcttaacatatatatctaatatctatttaatacattatacatataccttattccttatatataaaatcacaggattaaatataggctcttggtggcaagttacttacggaatatcccaaaatgaactaatgttaatgtgaacaacgtatcaactaacaatgcatatatatatactaaggatccaaaagctttggaataacatatggatcatgtctgtcgaacaaacattggatgatgttataattctcatattaagacatgtagatatagattaatttaacaattctggaagaaagcataactattagtggaacaaaagattggactgaccaattacaaatcaacagagcctcatcatgaaaaagttcagccacaccctcaatatccaatacggcgctaaactaaagcatcttaaagcatgcatgcttttcgaaaaacattttataaatggtatgatttcttacatcacaaattaaattcgtcttattaccaccacaaattatataatataactacaagaatctttctactaaaacatatatatatccctaataatttatactagtatcatctttttttttttaacatcactagctagtatcatcttatatataaccatccgaaattagaattagtagggtacataatgacaaataaaactataagaatgttccatttggaacaagccacatcattgttaattgatttcaaaagttttcatttgaaataaaataaaattaacggtgatgagatctgtcgagaatgcgaatacatatgtaatgtaatgatgatgacacctggtgcattgcaagctttcagttgcagcattggtggtgcgttcaatcagagtagaataaaattagttattttctgtcagaggaggatagataccaccacaataattaaactataaatttctggctgataattccgaatatggaagtgcgcatacgttgtccttccttgacaactttcctttttaggcaaaacacacacaattgcatcatattttgtttgatttttgtttttctgttattgctctttttttttttaatgcatgcatttttgatatttacttatataacttgcatgtttcaacttaatttacaagtaaatgaaaattacaaaaaataaaaagatatacaaaaggaaggtataatatatacattatagaaattccaaaaattaattgggtatatatatttatggtatatcatcgaacgataagggaatcaaatgttgagggccatacccactttgacttctaatttggatcctttatggattcggcgtggcttgaatttgaagcctcaacaaaaggaaaaagaagaaacaaagttagaagatggttaaattaaaatgcattaattagacctaataatgtatttctacgaaaactaagtaattgtaattttattgcaagtgacttcatcaacttaatcaaaaactatccgtttaccattagttactgaataaataaactagtcatgtaatcattaatgtttcgttgactacaaaaatcaaaacttgtatccaaatccaattctagaagcgaatttcttaattagtgcaatggaagttaatatgtctctttttcattcctcttttctatcatcaaaaagctccaaaccaaagtccataattgtactttagatcatcgatcataacatggttaggctctctcttctatctggtgtttgcacatgttttaacatcctaatcaaagagattaagttatcac

SEQ ID NO: 37647 - DNA, 4777 bp, Arabidopsis thaliana landsberg
gacaaacacagattgtgggaatgcattagatttatcgcgttactttagaaattagaattggtccaaaaacgtttcgcgcatttgctgctgcgtcccgcaattttctctttgatcgtgcgtttatgtgtatccaaaaaagacttcgattctaatcaatcagaaccaacccaaaccgaagctaaccgatccggtctgataagtttgcaaattaccaggttttgataaccgaaagtgaagttataattctacgaatgcatcatcaaaccgaactataagtcttggttttcgcaatatgacaattttataagaaccagataaatttattcaaagcccggttaagttaagccatcacctatttttttccattgaagacaagtctctacaaaaacagtgaaacttaaacattacaagttacatcaaaacaagaaaggtaaaagaaaacacaaaagtactgtaagaaccgtctatcatcaaatgggctgtgtgcatttcttctgagaatgtccaagcaaatgacaccttccacattgcacaatcctctttggtctcttcaaattctcaacccgaaccactttcttcttcggtctacctggtggtctcctcgtttttggtggtcgtatcctcaagctctcaactcctcctccagcctcttctccttcatccttccacaagcttctatcaggaatctctccaatcatctgcgaatacgtctgctgatagctggacactgtgaaacacggttctgcaaacagatgcacattccgaccacacgagatcagtgctgcagccgcgtgagcacacggcaatccgtaaatctgccaacgacggcatgagcaatcccgtgtccgtatatccacaatgttggttctctctgtcgacacaatctcaaactcgacctcgttcgctcgtaaaacttggtaacaccgtgcgtctgcaaccgcttctgttatacgtctctctgcagatggcacgagtattgagttccatcccatgctcaactcacggcggttatcgaaccaagacgatatttgatgccggatatgttccatcatctgtatgattgggagttcatggcattcgagagcccaattgtataatacctctgttatccctaaaccgaaatgtccatatcgcacaccttggaaatatgctacagcccagagatgcggcaggtagagttcgaaccactgaacaacatcttgcgatatctcaatcatttcgttagacttcgtttcgaattccgctggtgtcagcgcgtaaacagcactccagaagatattaacaagcttcgtgttcttgaatgtatcccggaagttttcgctaacataacggagacaaaacccatggaaagcagttgggaaatgagtttcaacggcttccacaactgcgctctgtctctcagagagtatcgtgagcttcggcatgctatcggtattcatcccaagaagcttcctcagctccgaaagaaaccacgaccagttttcatcgctttcattatcgacaatagcgatagccaagggaaacaaaccatcatccgcatcaacagctgcagcgcagaggattgcacccaagtacttccctttaaggtgtgctctatccaattcaagaagaggccgacaagaactgaaaaacccggagatacatgctcgataggcaataaacaaccgttggaaacaattctcaggtcccaaagcagaaacagaagcaaaactcccaggattgactaatttaatctgctcacaatacgcaggaagaaaccggtacccttcctcataagtcccatgaagcgcagccatactccgctctttcccacgccaagcctgcatataagaaaccgcaaccccatgctcgtcacgtatatcctgcaatatctcctttggtttatactgcggattatctctaatgcgtgcctctactgatctagcaacccaaccaacggatgcttgctgatgatggagatcacggacaccttcacaagtatgctcactattaagcgtcctaaccgtaaatgtctgaacacctggacatttagcagcatggatacgccaaggacaaccttctttagagcatttggctatgaatcgactacgatctgatttcacaatccgaagatcaaaatgcagagctatagccaaatctttcaaagttcttctgcaagtttccacatcgggaaactctttaccaactgctaaaacatgttctgtagctaaaatatcgtcggaatctaaagtaattagagctccatcagccattaggcattgcatctggaaaagggtttcttcgtctctgtgatttcaatgcaaaatacttatcagcatctcacaagaacacacacttggtacatactaggagagacataaagaggcaaaatctcagatcgcaacacaaaaaaaattaactaatttccatgcttggatcacaagctcaattaacaaacaaaaaagacaaactttaaggaaattaaaagagacccatttccaaaatcaataacatttcccaaagatttcagacaacaattcaaagggaaattaacagacagcaacaaaacctttccagaaattggaaaactacggggatcttcgcgacagcgaccgaatcaggttcgtatcggactcggtggcctaactcggcgttaagcgactgtaatttgaagccgctagggttatcagcgtcggggagagaaattgcagacggcgacacaaaaagaaatgaaaggaggaagagagagagagagatgggaagtggaaaagcttaactaaagatgatgccacgtgtcaactatgaaatggttaattttattttgttgtatagtaagggataatacattaatgttttggaaacttaggataagaatacattaatgtttcaaaggattcagctctcttgattcggtattatatctaaaaaaagtcatgtctgttttattagaggaaaaacaaatgttttgttataatttttgttttcaattaagaaataaatatgtatgtattgtggtaataaaattgtcatccggtatgaagaacacttgttgataaatgattaaatggcctcaaagatgttaagtgtccaaccaatccctgatcagagattttgggtcatgtaattaaaagtaattcacccttactgttctagtgtgatggatatttttgatagagcaatttacacttattcatgtttgttatcgctatttctgattatctttcacatgtatccaaagcggataaatcattacaactataaacaaaaattttaaaaatataaacaaaattttttaaaatataagaacaacaaaaatgtaaagtcatttggacgattataaatatataacaaactaaaactagatttaaaattagatctaagaaaatgggtaataagaatggctctccatgctttagggattttgaacaaagtagcaaaacaacaaaaaatagaattcgaaaaaaacgaagcaaaaaaaaatccacaaaaaaagatcaccggagaagtttcattgatcttcatgtattctgattggcttcaatttgatctcttttctttctctctccttttgcttccttcctctgttttgttttcctttaaccatctcccaaaatactcttccctttaacgtgggtccttcaatctttttgaaggaccccgccattgtcaatcacctttcaaagggatctttattctttttggttttaggctttttagattattgaattgattttgaatgataatcatgatgaattgttttccgtgtttcacttcacaaaagagcagaaacgctccatgcacgacgaacgagactaacgatgataacgttgaacacgacgaattcagaccacctggtacgtttttcaaatttagaaaaaaaaatatgttagctttcttatcacggaactgtgaattagaaaacctattttctaaaaatgttgtttggggggtttgtttggtttcagttgttgcgacgacgaaacggactgaagaaagagaacctgcagagcaacaaccaccggtgaaaacattcaatttccgggagttagcgacggcgaccaagaatttccggcaagaatgtcttttaggagaaggtggattcggtagggtttacaaaggaactcttcaatctactggccaggtttgttaccataccaaagttcaaacctctggatacaattttcggagattttctttgaagttgttttctattgctttgtgagtgtagttggtagctgtaaagcagctagacaagcatggattacatggtaacattgagtttcaagctgacgtcttgtcattggctaaacttgaacacccgaatcttgttaagcttataggatactgtgctgatggatatcaacggcttttagtctttgagtatgtctctggaggttcccttcaagaccatctttacggtataattgaactcctttcacaatgttttatggagatacctttacgcttggtttagaggctgacaatgtatttgatatgcagaacaaaagccaggccagaagccgatggattggataacgaggatgaagattgcgtttggtgcagcgcaaggattggattacttgcacgataaagttactccagcggtgatataccgagatttgaaagcttctaacatcttgttagatgctgagttttaccctaagctttgtgattttggtctgcataatctagagccaggaacaggtgatagcttgtttctttcttcccaaattatggatacttatggttattcagcacctgagtacactcgaggggacgatctcactgcaagtcagat

SEQ ID NO: 37648 - DNA, 2556 bp, Arabidopsis thaliana landsberg
ggcggtgaggccgccggccagggaccggagatgtgaaccgaatacttccgtcgatggttccggttcagtgccactgccgcaacgccgtaggtcatgtatttgctggtattattgcttcgaatcattgctagtggtcttcaacaagatctgatcctcccatttggtgaaggcttcattttttgtttttatctcctttttggaattgtttgccatgtgtaggagcccaatgctttgcctattttttgggagacccattgatgaattttaattaaaaaaattctatgctgtttcatgttataaaaatatattagtatgcagttttattttttcttaacaaaaaaaataaaaggtaaaatattaatattaatatgtaatagtatctccattagtatctaaatcaatgcgtatatactatatactaatacatttaaactaaaatgttaaaaataacgtttggaaaacatgtataataactatatatattacgttttattttgattttgtgtgagtcatgcattttttggagataggatattaaattgcaacaattagcgattattataagctatagaagctaagtacgaaatatcattgcaaattaggaacaaaatcatcagaaacttgactttctgttggcaatcatgtctcttttggtataattactttataatataattcagtgacgctgacttaagaccagataacgttaagaagttaaatttctttaataatttgtcaagattatatatactacgctatgttagttttggaaagcagattatgatcgatcaaaacaataatcgatggcttcgtactgtttattatacatcttcatatatctttgttcttatcacaatgctcaaacagttcaggtagcaaaagaaacaaaatttcgatattcaattaatacattatttgtatgtaatttcactcatatatcttatgtttatagcataaagaaatagattacgaatgtgtggatatctataagcaacctgcatttcaacatccattgatgaaagatcaccaaatccaggtatgtgggttcatgatcattagaaagatgagtttatctatacacaatttcatatcaaaattatttatcaagtgcttatttgtctctatcctagatgagaccaagtgtcgagttttataaccacggtatcgacggagccggaaacatcagatttattcactggtaaagctgaagaaaggtgtcctaaaggacaagtaccaattcacataccgcaaattaactatactagtgactttatccagccgaatagaataattacagaagccaatctacatgtaagtattttaaccacgatgttaaactacagtattttaaaaatagttatagaatttgtttttgcgactttttatatataatttactaacatgataaattatttttggttagtatgcaattattagaccatttgagaattacacaaaggtatggggtggagcgcaagcggttttcaatatttacaaaccacgagtattgagaaatcaatttagtaaagcttggatttggctaaatcacagagaaaaagatgtaataagcagcatccaatttggttgggcagtaagtatactacaaaacctagctgtccataagaatcatcatatgccgaattatgaacttatcgcacaattgatcttctttttaggtgcatataggattgtaccgagatgatcgcccaaggttaacaacatactggatagtaagtgatctttactttatatttcaattcaaatgtcaagcttaatgacttttaatatctttggtttttgatgtgttagttatcaaataagtacttattatttatatatattacagtcaaatagacaccaaaacggatgctacaatgtgttatgtcgaggaggatatgtccaagtccataagacaatctaccccggtatggcttacaataaaattagtgtcttaggcaaaagacagtccactgctcatcttctcgtcggtcaggtaaaaaacatatagtaacaaaatatatttaaatatttagtaggttatatatagaacttatatatgtacaccaatcatacaggattccagaacaaaaaactggttattgatgacgagaaaaaccttgataggctattggccctatcaaatttattcgatgcaaggagcatcacaagttttcttcggcgggtatacaggggggttagctggagctatcagccctcctatgggggcaggaacttttccgagacaagtaggatatcgcaacaagtttgcatgtttcatgaaacaactcaagtattttgaggataaaagactagtagatattgattcgaacgagtttgaggaatatgtggatagtccaaagtgttacgatgtatggtatcgcgagtttgaaatacgaagtggagagatgctaaccttcggtggacctggtggacaatgtggtatctaatcaatggtttctttgttgttgttctttttttccattaaagcttatcttgttattgttttttttttaacacagattatattagttattgttgtttcgtaataatagtgct

SEQ ID NO: 37649 - DNA, 1190 bp, Arabidopsis thaliana landsberg
agtaccactatggagctcacaactgtctgtaactccagtccctgacaccctcacacagacactcgtgttggcaaaataccaatgcacgcaaaataaaaatagactattaaagaagaaaaagaaagaaagcaagttcagcaagccatgaagagcaagccaataagctacacccctccatggcctctgcatcagctctgcctccaggttcttgctctggcttcccagagagatggactgtgagatgaaaccataaactgaaataaatccctttctcagctgctggcggtggatgccgttaatctcggcactcagggagcagagacaggaggctctctgtgagtttaaagtcaacctggtctacagagcaaattccaggacagccagggctacacagagaaaccctgtctcgaaaaaaccaaaaccaaaaccaaaaccaaaacaaaaacaaaaattatcgtgccccagtggaaccattgtggtacgctagttagttttttgggctggtgagatggcttgccgggtaagagcactgactactcttcaagaggacctgagttcaattcccagcacccacatggcagctcacaaccatctgtaacaaaaatctgatgccctcgtctggagtgtctgaagacagctacagtgtactcataaataaataaatacataaatctttaaaaccaaaaagacttcccattcacctgtttccctccttgggcttttgagggggacatagccaacagtagctcccttggatacacctgcaaaaaatcaggctgggtgcatatttgctatgtctgtaccagccaaggacaagctgaagacaagagactaaagccaagtcagcagtgtgtccctgggacaaagagtgtaggcttcattcagcaggactcgatggcgttctcaaacagattattcaagaccatctacgcagtgaaggagatcatgctagctcgttgtacataaaaatatacaaataagtgacatactgagcatgttgtatttaggaacacacatatatatacatatatgtatataagtatttgtatataacaatgaaaagggaagccatgaatttgaaagagcaaggagagatacatgggaagattttgaaggtggaaaggtgtctaggggtttctattgctgtaataacataccgtgatcaaaaagcaagttggggtcagggctga

SEQ ID NO: 37650 - DNA, 4530 bp, Arabidopsis thaliana landsberg
ttccgaacactgctaatgtattctgcaggcgttctattagctagagcattttccttaacacattccgggccttcaacttccgctttgttggcatcaccatcattacccttcacttccttaagctcttccaaccgttcaggaacatctggataaagagtttcttccaacttcactccatgaaggttctccttataatcctcatctttgtcacctttctcgtcaaccgtatctgtaatcttattggcactagcagtgattgtgccatctctatgatcgtgttcaatagccaaagctgtagaagtatcattcacgttgttttgagaaacatgcatggactcagtcgcatgctcaggcacattttccgcgtcttcaacacttttcttatcggtcatgctatctgtcgtttccatttccctattaccacccacatgactgagttccctgttactctcagtgttggcatcaagttgagcgctttttccaatttcctggaagcttctatcaatccttgcgttcttatgatcatcagcagagcaggaaggcagtttacagtcatgtttggtttgatgagcaaggcctgaggcagtctctggttggggctctggctccagctctccttcctccatctcgctactggttgtactgctcttaccctgcacttcctcctcgcttttcttgacaacatttccaacacttttggattgctcactcccggaatctttggaccatgtcggagaagctagagatttggatctggagcgagaatttctggaatcgagtggtttgaatttggaaagctcgttaggcgagtctctggaccaagaaggggatttgagactcctatccctctcagcgtcccttaatctcctatctcggtcatcaacgccaaagtcattaccaggaccaccaaacctcctccaggaagagacactagcatccctattgggcctctccctctcagaacgaaatccctttggaaaagccctccttgagaaacaggcgctctcagatcgatggtaccgggcatctggccgatgattatccaagtcacgattggatcgcctacgggaaaaagccctggagaagccggcagcatcttccccgcggtcacggttgttgcccgagaagaagccccggtgggaggaagaggtcggacggtccgagttgggaggttctccgtcaacattcttatcattacagaaatcaaggtcgtcgctggatcttagtctcttcatcgttttagttgctgaatatgcgtcagaaagctagggtttatgaggatcggaaattgcagcaaaacgcacaagaggagaagggaaacaaaatagaagagagtacctgaagattggggcaagattcatgtcggaagaaccctaacttgcagattcagctgccttttttatataccaaggaatcacgcaacgaggaaggagcaagcaaggaggaggaagacgaaaaggaatattacaagtcaaactgagtgggaaaagcaccatttccctttgccctccctttactcgcttatttacatcatctgccatctcccaaagaccagagaacgtgggtgtttacgtcattttcgttgctagtccaatctttgactcttatcgcgtgtcgtcgtatcctccaccactagcattaaataattagtattaaactaaagacacttgttgctgggctctatcagtggccctttcctactccatcatagatataaaatgcgtaaagtaaggcccatcacaactacttatatactttaaacattattaatgttcccttactgttatgctagttccaaacaaacggtttcattatcttctccaatccaaatgtggtgtctaccatctgttcgaccaaatgtctctgagatgttcttcaagtccccaatgctcaaacccactgctagattctcctccacttcgtctccctatcttcctccttccttcaggttttttgctctctctcagactcagggctttaactcccactaattcggttcttactagatttttgctctccagcgtcgccccgatgatggattggacagataatcattaccggacgcttgctcgtctcataacaaagcacgcttggctttacactgaaatgattgcagctgaaacccttgttcaccagcagaccaatttggtagactaattttgttttcttaaatttgtgtcgcattgaagaatctcgctagacatgtccgttcttctgcactttgcctcaggacaggttcttagcgttttcttcccaacaacatcctattgttctccaacttggtggtagcaatgtggaaaaccttgcaaaggctgctaagctttctgatgcttacggataccacgaaattaatctcaagtttgttcagtttcttttcgccaacaccgccttgggtgaacttctatactttaactgggtttgttttgttggcttagctgcgggtgccccagtcctaaggtagccggtcatggatgctttggtgttagcctcatgctcaaacctaaggtccgttactttactcctcctcatgatttcaagagatatcttctctttcttaatttcacactttcttttaagcttgttggagaggcaatgtctgccattgctgccaataccaacgtccctgttactgtgaaatgtcgaattggtgtagacaatcatgattcgtatgatgagctctgtgagttgtttttgctttctgtttttctaaagtctcgtatggatttgccactacgctctaatactgcttttcctttactcttaggtgactttatctacaaggtttctactctatcacctaccagacatttcattgtacattcacgcaaggcactgctcggtgggataagccctgctgataaccggagaatcccacctctaaagtttgtttaccgtaacttgcctcttgcttacctgcaattgtgtatgatctatttgtttctttaaggtcacctgtttatgggcgtagttcaggtatgagtattactatgccctcgtgcgtgacttcccggacttgagattcactattaatggaggcattacttctgtttcaaaggtcaccaatcttggatatcagagactagctttctttctgcactaccagggtaagactgataaaatttctgtgattgtaaggtaaacgctgcactgaaggaaggagctcatggagtcatggtaggacgtgctgcatacaacaagtatgtgaaatttagctcgattgatctgagctcttatcagaccccttttcttgactcgctgtctatccttgacagcccatggcagacgctaggacatgttgacactgcagtttatggtgtaccaagcagtggccttacacgccgacaggttccgtggaaatattcagcttttgagatgctttgtttgtcaaacttatcaataagctaactaaaatctgcgtgttgttgggcaggttcttgagcaatatcaagtatatggagattctgtgttaggaacacatggaaacgggaggcctaatgtgagggatttggtgaaggtaggtgtggtttaaacaagaaagctgtaggtgttgagaaaagtaatacaagtcttgtgtgtgaactgaagatggtttcaattgattgcagcctctgctaaaccttttccattcagaaaatggaaatagcttgtggaagcggagagcagacgcagctttcaaggagtgcagggtgtgtgatatattggtggtaacacgttagaaagtttgtaactggtgttgagtggttgaattatgtattgcagagtgttggatcgttgctggaagaaagcttgagggcgatcccggactgtgtcttagattcacccatatctgggagtccagagagcggagacgaagatgtgttcgcagatgtgcacaatgtattgcccccaccatacgaagctggagaagaaatcatcttatgcgcttagttgtcgtttgtaatctgtgtttgtgattgtctctgtcgattaaaattgtaaattgaacggggcttacttcaagtggttgttagtcttgggctcgtgtatgggcttttttgttattctttttgtttgggccggaaatataactgggtccatcatctcaagaaaaaagattccgttgcgacgtggcagcgtttccgccaagacgcgggccatattatctggtctcaaatcacctcctccttgcagcaaaacaaacaatcatggcggagaaactcagtgatggcagcatcatcatctcagtccatcctagaccctccaagggtttctcctcgaagcttctcgatcttctcgagagacttgttgtcaagctcatgcacgatgcttctctccctctccactacctctcaggcaacttcgctcccatccgtgatgaaactcctcccgtcaaggatctccccgtccatggatttcttcccgtgaaattctctcatattctctttgatcctttcccctaagggttatttagtattcttatgatcgtctcttttgtctcgcaggaatgcaaactagtgaatttgtagggttggtccaaaccccaagtttatg

SEQ ID NO: 37651 - DNA, 2599 bp, Arabidopsis thaliana landsberg
  unsure (1)..(2599): unsure at all n locations
actcgaagcaccaccgatcttgaaatacataaatcttacacccatagaagttttgacaaaaaaataatgagaaaagatgatacctttcggagaagttaaagacatgcactaatgagcaagagagagggttatttattaatcaaaacgaaggagaaaacctcaaaactcaaacttaaagttgtgaaaaactgactagaattctatgaactttacagctatctttgataaaccttactaatgttggataaaatgagggtaattacgtattttatgatttacgaatgcatttaagtttatcaaagctgtacccactatcgttttactaatagtaaccttttgtttgactaacaatctcaatagtttccctctatctttcatttttccctaaagaagtatcactctctttcttctctgtttatctttttctcgacctgattcagttcaatcatacgggaaccttatgggccttaatggtttaatgacagtttgggcttgtaaatattctagttcttggcttttactgtttctttggatcctttgcgcaataagattgattcgtctatccttttctctgcctggttccactatacacaattagtaagtactaagtacttaatcaaaaatctaaaccgaagtaacattctttaaagtgtttggtactactgttttaaaactaaggcaaaactaaacctaaaccttttttttttgaaaagaactaaactctagacttgcataattgcagccaacataaattaggcaaagcataagaaaccacatatgagttgatcatgggaggtttgactcagctttaagtatctacaaaactttggagatcaacatcgaagaacttatctacaaaatcaacgatcgattttcatatcgaaacaaggctttgagccacttaactggatagatgttcaacctatgtattgatggaatatcttaatgtgaaccctagctctatattcattttcatatagtcttgaaaagaaaaaataatgaaaatcggccaactcgtgtactatgtttcgagaacgtttttaatggtcgaaaagttttaaagaaaactctgttatatttaatttttttttggtaagctgttaaatttaatttatcattcatcaacttaatatgatttttttcttaccaaaacaccaaaccaatcccgaaaaagtttccaatatttaacaattgaagttctgttccactttggtgtatacattttgtaaaccggactggattacatcgcataaccgaaaatcccactcaataaccgttccataatctaccgggacacgtttccttcgcagggaaatagccaaaaaggcaaacacgatgtcacaaccctaattacttacctagtacctacatcgatcttgtcgcactgttgagatagaatcttgaattgccaaatcgtgttctagggttccttcgttttttccggcgatgacatcgaccaacaatgaattaactgtttccatgatgggtacatcgaccaaggaggaggttgtctctaaagtcgacgaggaagacgacgatagtagcagcgacacgcntatggatgacggcagcgacagcgagtgggctgggtataacgtgttagcggaaactgaaccagagtgggacgtcgacagctttgatggtcacgaatttaaaatccatcccagggttcgtaagatgtacggacgtcaccagcaacattatgacgaatactacaatgacaggctcgaggctttcaagagtaaggtacaatttgtttaattcttttcttgtaaccattggcatatctgtataagcctcttcttttctcttatcagttgctatttgttttgctgaatatagatgcaccaatagatttgtgtatgcctgcctttgttgtccaagttggttttttattaaatcagtaaaaaatatgaaaacaaatgtcttttgtttgttttagggttttctttctgatcatctgaatggaatctatgatgtttatctagacgaaaaaatggatggctacaacagtactagggatttcatggcagagcttgctaatgtgtgtgttaagaaacacaacgagaccaaggtgagtgagtcgaaagaattacttttttttttttttgaagaaatttcgtattttggtttatttggaattttatacattttttttcacagggaaatactttggaattggtaaatgttgtgagagctactgaaaggggagcagctacatggaggttgtacatcacttttatggctcgagagtttcctgatgggcctcttgttgagtaccaagccaaggtaataaagttcttaggggtcaaggatcctttcccagttctctgcagagcagctcctaaaccaggaatctaaatctataaaaataaaaagtttatttaaaggtatatgtgtaactcttctttgttgtttattgtgtcaaactcatgagatctctgaagggattatgtactgtcttttctttttaacttgtaatctttgcggattgtatatatgtattgttgacgaaggctaagatgcatcgaagttataaaagaataaaatttgacagatgatgagaggatgaacagtatagtgaatgcagtaataatat

SEQ ID NO: 37652 - DNA, 3434 bp, Arabidopsis thaliana landsberg
aacttttacctcatagtcgtaacgagtgttttagtgacgaccgtaggttgtctcaatgctggcggacaatgtcttcaactgacaccagtttagcgttaccgtcaatatttcccttgttcttgtgagcaagtatagacatccatgcaagaactgcccatattccgtctttctcacggatatgatccgagcctgtgaaagatctttctttcagaactgtataggttgttttaaagttatgaacagatgtgtgagtgtggaaatagaaactgaccagttccaaaactttcttctccacaaacagaacacatcccagcatccatcagattaccaaaaaacttccagcctgttggaacctgatatgtgatttaatagagatatgaaattaaattatgtagttaggagaaaagaagctggatagaagttgcacggtgacatgtacctcaaagaacttcaaattcaagctttttgcaacgacatcaagagcagctgaggttggcatgctcctaaaacaagaagtggaagttacaaaataatccacaaaaaagatatattaaaagagttgtatacacagaattctactagaagtaaaaaaagagcccaggtgtataataccttgcaacacctttcaaaccagagctgaagtacgggatggcaccaatagcatttgcagcaattatggcaactgaatcggaaggagttacaaagaacctacaaatgaagagatactttaagtttaaaagtacttggtatactagttccatggatgtatctctcttgaaaacgtcagtaagctaccttttaccaaggatcatgttacggtctgcatcaccatcagcagcggcgccaaactctggaggttcacctccagtgtcggatttacctaatcccattcgtgccacaagctccttagcataggtcaaattgggatccggatgccctcctccaaagtcctcctgcaaatcgttgtattgtggtaaatattgagcctggaggtgtatttgtaatcatttatggaatagcgtttcttggttagacaaaaataagaccttgggagtgcagttcaataatgcgctttcttgcgcaccgagttcttcgacaaagatgcgatgtgcataggctccagcaactccatgcaatgcatcatagcttcataaaacaaagtaaaatataacattacagtgatggaacatatattacaaaacttaactcaaatggaaaaggtttgggaaccaatgttagttacataccagaatgtaaactttggagatgatagcaatttccggatggcttcaaaatcgaagattgaccttgaaggagcgagaatttttctttagaaagatcataaaaattgcacatagaccatagagggagcagattccagaatcatgcttttaaattgagggaccactcacttcattaatttaacgtagtcatctgcggaatcaaaaacttcaacatcaaattttccttcaggtccttcaaaactggttacaccaacagcagaaatatcaacctgtcgcattcatcagatagaccagatcaactatgattcaacaaaagacagatgatggaaatctataagaggattcttaagaatacattgggtagatcttgtgctattgggtactccttgattgtcttagtgttctcgtaaattttatcagtgattgattcaggagcaggtcctccattttccatattgtatttgattccaaaatcctgtacaaggggtatggaatcacctcttagtcttattatccatctagatatcttattattaaaaaaagaacaaataaagagatacaaaacgaatagttcaaatgaaaggatagcacagtagagatggaacaagaacagaacggacctcagtagggccaccaggattgtggcttgctgttaagataaatgctccagttgctttcgatccctgtaatcggagactggggttaagtaactcaaaaccatcattacattttgcgtcatgcacaaacatagcaaataaccaaaaaaaacaaaaaacaaaatgtcactacaaccatgagcatagagaaagaaatctcacatcagcccctgatctttcacgaatcacagctgatacagcaggagttgataacagagtgtttttaccaacccacacacgtcgtacaccattagctgctgccatcttaattatgatctgttaagatacagaatagaattgtatgaaaagcagtaaaacatcttcatctgtaacagtatgaaccggatttgtaacaggagtagatcaaacaaacttaagtttcagagatttcaaagtcaaacaaaactttaacttctataaacctctaatctctctatagaggtttcgatgcaaattttagagatgaacacaaagaaaaataagcaaggcattgatgataatagcaggccttcctaacacaggagttccctccaaaacattgtaaatacatgagcactaattcataattctatggatacgccaattacattcacccagatccagaagacagggaatatcatcggccttacctgaacagcatcctttgagtaataacgaccatcaccagagaccacaagtgtggcacctgcacatatgaacaataaacactcatgaatttttcgaatgagcagatatctctgagaagctaagatgagtatgaaaaaaatctcacctttaactttctccgccgtaagagcattgaatgttgcttggacaaaattctctagataattgggttgcttgaacactttcacctacacagttagaaaaaaaaaaaaaaatatactaatcagagatacaaaaagatgctagtttgatatctgcagagagtagaacaaacaatcgacactcgattgattggataaaatgatcaacccaaatttcttttatcaaaatatctgaaacagatctgatcagtgagtctcaataaacgtcattgcagatcgtatatacgttaaacgaagatctgacaataacaactaggctcttccctagtttcaattatacacaaattcaatccatatagtctccatttcgctacaccaactcaaaaaacgtaatttcaagctctatcaaatcaacattcaccacatagaagcgtcccaaacatatactcaaatcaaatataataaacgtgatctcgaacttgatccaaataaaataacgaaaacgaaatttaaaatttgtcatcattcactaatcaatatagattaatgcatagatcaaatctaatcagatggtcaatctcacttcaaaatcacactcaagaaaatctaaacagatctgatccagatgcaacaattcgatttcgtttgattcagaagacaaggatcgatcaacgaaccttcttacgaagaccagaagttcctggtttctggccatcaataggagatgtggataccgtagaaaccttgaaaaccatattcgctttgag

SEQ ID NO: 37653 - DNA, 2137 bp, Arabidopsis thaliana landsberg
  unsure (1)..(2137): unsure at all n locations
cgtgcttacaaatgttacatttattattttgttaattattaaatttatagaaataacaatctaaacatttcgtaaatttgctttaaaagtgtaaacttactaatttgaaccatctttatttatattacaagctccatgaaaagtaaaccaaaatacaagaatctcagcctcaaaagctaaattcgtaaataactttactttcttagttacaaatatttaaatgaatgtggttaaagtttacctaatctttgtgacaattcataagaaaggaataaactttgatagatacaaaatcttaggctgatgctcgctccaccaatgccttcgtcttcccaatcatttcttcttcttcttcttttttgcgtctttataattgatttcttttggttctttaaaaataaattaatttacctttttccactcgatttataaagtctgcttgggaacaacgcattctctatcaaccccacatcattttagtcctctttttttttggttttcttttctcaagacctctttttagtttctatccattttataagaaagaagacaaaaaaaccaaacataaagccaacaaaaaaaatcaaaatcctgtagaagtagaaatatgtgtaaaaattgtagatataaatcgctgtgttggctacattcacaaaaattgcattgagcagcgtaaatggagtcgtggtagacctttcagtccatcaccatcaaaataatggaatttgccataatcatgttttagggtaatttaataagggaagtcaaaactttatacatttccctttttcataagaataaagagttcctaagataatttgtctaaaaataataatccgtataactaccaaattatgcacccctaaagagtaaagactgcccttctgggtcaactatatcaaacataaaccaaaccggtttttacatcgaacgaagaagcatcaaaccggctgcaatcagataaaaagaccaaggctctgctttcaccttcaaatcctctgcatctttcaaaggtagcaacagagaacactgcaccatttgtttcacagctacattgccggatcttaccatggatatgcttgtaagtttcctaaagatatggtctttccggtagatcatcaaactccgtaaagttttagggatgttttgatgaatgaataagctaatgcgccggtgaaaatgtaactatcaactctatctaatattccacctgcaagcatgagaaggaagttagaggtagcgggaatgagaagaacggcgttgatttatggattagttaggggtgactttaccgtgtcctgggataagtgaaccagagtctttgacgccagcatcacgcttgatcattgattcagttaagatcaccaaagactgacccaaagaagttaagaaacccaaaagctactgagctgagaaaacaaatgaactaattcagaaacagagagatcacgaaaaaccgagtttcgatagaacgaaatgaaatctctaagtacctaacaagagattgaggccaggacaacgatttggagagtaaaatggtaatggaaatacaaccaacaagtcctgcaaaagctccttcccatgtcttctttggactaatgctaataagaggagttctaccaaatgcctgcaacattagttgattaacttcagccaggagaagttcttgcgagactatatgcatgccctgaaaagatacataccttgccaccaagaaaagcaaacgtgtctgaggcaattataccacagaaagaaatcaatatagcaacaagtccaactgtccaatgtgcttggccgccgaggatagtaggccagcttctcccaattcctataagtaattaaactgctcaggagacttggctttgattactttacggatcaaagctaggaaagataataataagggagtgcttgccggtgtttagaactggagcagtaagaccacaacgtagcttaacccagaaacaaggaagatatccacagtaaaacaggccaaacatcgtactactcagctgagaaaaacgcgggtttcctctctgtaacaacaatgccattgcaacaacaaacgccgctgaagttatcgagatatctatatgaccaaaatacctacanaaaagataaaacctttattcagaac

SEQ ID NO: 37654 - DNA, 6646 bp, Arabidopsis thaliana landsberg
agatatgttacctccaaaggtaagagaccagtcggtccaaggtcaattaattgtttcatttcacctcctggccaactataaacatgtagatgacttccatataagccatcagcaacgtgctgaagattgaaacctttcgaaaaggctttaggtgctccccaagatgtactgatcatggtcttgtgccgaggttggtaccaaaaatcatatccatacaaaggactatgtcctggtttctcccacctgaaacaaataaccaacaatggtatatgactaatagtgataagaaactaaaacagaatgatttgttttgcaataagatacctattcttgatgttaaaatcagagtcaagaagaagaaacccattccccttagcattcccctcttcatctccaagacacgacaccaagatctcgcccgtggcgaggcaatgagccgtgtgaggaaacgccaatccagtcttatcagcaatctctttaggatcaacatacttatacaaagacggagccctcgggttttccttagtatcaatcgcataaatgcgaccagatcttcattcaaaacaatatttatctattcagtcaatttaacaaactcacagagagagatataagagaagaatcaaaaagactaaagaatctttacataagagacggtaacacgagataacgtctatcagcagaagcatcaccatggcaagaactacaagagttccaaccagaatgatgaagctcatcaccaacaaaaggcattggtaatctatgaataacacttgaatacgaaggcgagcttggatctacatccaccgtcgccaaataatccggtttatctattccagttccttcaataccccaaccaaaaaggtatcagaatacagaggaaccatgactgaacaaaaagaacacatcacatcaagaaaatagaaacagagaaatatcaacaagctaattagtgattcgatctggaatattcaagattccgtaaagattcttactaaaaaagtgattcgatctggattctaaaacagtagaaattgatgacaaattcaaatcaaatgtgtaccggtgtagacggcggtgacgtagataagtttctccgatggaccagacatagcggcgagaggagtcgcgtaaccaggaccaccgtacttgcaacatcctttgcctccgccgttgcttaccggagccacaacttccgtttccgtcgccatctctctctctatctctgtgaagtcaaatattgaattgtgtatatggtagtcgttaagctacacgtctctctctttaaagtttatcgcaaacacacagtgacaagcttttggctatttgcgagtgaactctaatgtattgacttgattagtccttgtaattaaattatgtatttcgaattaaaatacgtctccatgcacaaaatagataacataaacaactaaccagatcttgtccattaacaaaatagcaagaagaagataacaaatctggttcatgtgtccacgtacactgtatctgacgtgtttttgagttgatgatccataattcgacccggttttgatcggttcaattcggttactcgaaagatagagacacaacataacataaatagaaagttttattatcacggaataagccacaaaggagctagtaagaacaactttaattgtcttgatcacgaatctagccacaaatccagcttacactcttagggagccaaaatcagatccagatatcggaagtgcagtctccgccgggatatctcatctcgtgagctagtgcaggaccgtctggttcatcaccaaagtccacaaagaagtcagggtttagagtgagaccacctttgtctgtatcaacatcgatttgaattatgtgtgagcctttctccatgatttccgggtaaaactgacggtcccatgcgctaaacagcgagtttgtcgcatacaatcttttcccatcaaggcttagttggatcatctgaggtcctgctcttagagacttcccctgaaatcaccaagacagtttcaatagaatgcaaattgtttcaactttagttaaaacgctccaaaagattatacattttgattacaaaccttgatctgaggaacatcgaattggtaagtgttgccatcttctccaacagccttataaggactacccttttgtagtaagcctccaacccatatttgtccagttaagaccgggtttttagggtcttcgatgttgtactgacgaatgtctccatgaagccagttcacaaagtagaagaaccggtcatcgagggagatcaagaagtcggtgataagccccggcatttctggaagtatccagttttctactttcaacggtttaaccgatataacaacctaaaacaacaccagtttaaatcacaggttaatcatagatttgagataagacaaaagaaaaagatttagaaacttcacttgcctcatggctccatgtgtcatcactgttcttgaaaaaccttatcatattactagacaaagcactcccaacataccctgtatctttagaaggatcatgcaagaatctgatctgcaaccacataacaacaaaaccccaataagagtacatacttggttactaacacagatcatcaacatttatgttggtgtaatgttacctcaagaggtaagagaccggtatttccaaggtcaattatctgtttcatttcaccttcaggccattgataaatatgcaaatgacttccatacaagccatccgcaacatgctggagattaaaacctttggagaaggctttaggtgcaccccaagaagtgctgatcatggtcttgaaccgaggttggtaccaaaaatcataaccaaacaaaggaccatgtcctggtttgtcccacctgcttttgacattgaagtcagagtctagcaaaagaaacccgttccctttggcgtttccttctttgtccccaaggcatgacaccaacatatcccctgaagctaggcaatgagatgtatgtggaaatgctaatcctgtcttttcagcaatctccttaggctctacaaccttgtacaaagacggagcctttgggtcggtctttgtgtcgattgcatagatgcgaccagaacttcattcaaacaagaaagaaacatatttttagtcaattcatcatcaagaaatgtgagagggtcaatgtaaggatcttacattaagcctggtaagacaaggtaacgtctatcagcagaagcatcaccatggcaagagctgcaagagttccaaccagtgtggtgaagctcatctcctatatatggcatttttagtctgtgaatgacgcttgaaaatgtgggtgagcttggatccacatccaccgttgccaagtagtccggtttgtctcgccccgttcctaaattaacacaatcaaataaagcaaaagctctcaaaacattacctagtactagtacgtagtccggttttataagattaaacggatttaagccaactattgccaagggacttgagttacaagtccatgaaacttaacattgttatgtgattcaattgagattccatgggatctaacaaagattctttaaacgttaaaagtataagattaagtcagatttttttttttttttttatatcaaaaaaaagatttagtctcaaaatagcaagaaattgttgaataaaaatataagttgaaaatgtttaacaaaaaaaatatatttatttatatataagttgaagatgagaaaatgaaatgtttaccggagtaaagggcagtgacatagatgagcttttcccgtggaccggccatggcggcgagaggcgtcgcgtaacctggaccggacttgcaacatcctttgcttttgccattgctcaccgccgtggctaatacggtttcggttgccatttctctctgagtatgtggaattagtgaagctacacgtctctgagtatatctcaaacgcaagcacacttgtgatatatatgagtaggaaacttttggctatacgtaatacgtgagtaagcacgattgtgacttgtgtcgttgttatctacatatatgtttctatttatatgtctctatataaagtatgtgacaagaaacaatattcgtttaataattctacttttgctaaagagggtttagttgtacattaagaaattgaaacagatttcttgcaagttgtaaccaaagtgtatatggatgtgttttgaattaagatatagatataaagagactttgttggtacatttttggttttggttttatattttataacattcctcaaatttcacgagttcaaaacttacttccgcaattatctatagcatgctaaaatatataattagaaaaaaaaattgaaaagactaatcgtgaaaaattgttcaacacaaacattttcattattttattcatatcattcattattagcataagtccatgcacgtgttgttgttactatagtcatgacttgtgagttggtaagtgaaatttgaataaacaaacatgttacttaatccgtgagttggtgagtgagtgagtgctattaaaacagtgactcttttgttgttatctacaacgcatatgaattaactcacccactttattgtttctttattgaggataaaaatcgattttgcgtgaccgtagttactatactattaaaaaaatgtaaaaatctcaacaattttcataaataaaatgttacaatagagaagaagcttaccagaagtcattgcaggaacattttcctcccttaaaatgatgatatctagtcgcatctctaactataatctctctttctgtaatctcacttatatgtttcagaacaacatgacaatctccacaaacccttagatttttcacaatccgtataggagttcccggaacagctttaagcaatccgtatgcaacagcggatcgttcgctatgccaaaacaaaagcttttctttctcttgctcatccatgtcgtgtaggatccaactagtatcaggaacataaccatttcttatcctcatttcttcctctagcttcttaagcaatcgaaaaatgtcttcttttagaggatgagatgtttctcctgcgtaaaacacttcggtttctttccgtacctcgacgctactgtgccctggatcctttctaacttccatttctcctagtttccttcttgcttctgatacttttccccacaaagaagcacttgcatagatgtttgataaaagtatataagtcgatggatctttcagtttaaagctgcttacgagatgatcagcgattcttacacccatctgacctcgtccctggcgcttgcaagcgctaagtaaagcagcccatgttggttcatctggaggaaacggcattgtatgaattaagttctcagcctcatcaaggagtccagagcgaccgagaagatccaataagcatgtataatgctgcaaagatgggcgaattccatagtccttagtcattgattggaaaagctcacggcctttctcaacaaaaccgacatggctacacgcatatatcaacccaacaaatgtgacctcattgggctttacaccgtgagaaaccatgtcatcatacaacgctaatgccttctcagcctgcccgtgctgagccattccaactataagcgatgtccatgaaactacatctctgtgacgcatcctactgaaaatatcctttgcagctataacatcgctgcatttagcgtacatatcgataagggcgttactaataaacacacaagaatcaaatcctagagctataaccaacccatgaacctgcctccccgctatagaagctgccaaattagcacaagcgccaacgatgctcgaaagaactaaaggatccaaaatgtcaactctttctctcctcatttcagtgaaaacagaaaaagcttcaagccctttcccactctgtacaaaaccagagatcaacgcagtccaagaatacaaattcttgactggtaatatcctaaaaagctccaaagcttcttcctttcttccgcttttagcatatccagataccattgcagtccatgaaatggtgtttttcactcttatagaatcgaaaactgctttagcactattaagcaatccacatttagcatacatatcaaccagtgaagacttaacaacttcatcattagcatactcagagactataaaatggcaatgaacttgcctcccgtgatcaatagatcctaagttagcacaagccttaacaagagccgagaacacaaaatcatcaggacgcaacccagagctcgaacccactgaacaaaatactgatagtgtcttaccagagagattggcttgattaagagctgtgagaaccgaggcccaggcgatgtgatctctatgaggcatttcgtcgaacacctggagagcatgagaagcagcaccgcatttcccatagacattgacaagtgtgttggccaaagggcaacattgaacgatcccgagcttgacgatgtgggcatggagggctttagcagtggttagggttcgattcctggcgcagagctggagctgatgaagatagtgagggataagcattcatcagctgttgttgcttaagggcttctagagttattatggtaacgctaatatctaaattagtttacactttttctatatatgtattgaaattaacaaatttgaaaacaaca

SEQ ID NO: 37655 - DNA, 2719 bp, Arabidopsis thaliana landsberg
gttgcaggctgattctcaattccctttcaaggtactaatggaaatgcttgttggtgttagcgccaatgtacttggcgacatggcttcacgccctaatttcggattgaacgagctagatttcgtcttctccactctcgttgtaggttcgattctcaatttcacactcatgtacctcttagctccttctgcaatatctcatggatcctccaatttgttgcctggaatctttagaagctgtccttcgagccatatgtttgaacagggtaacttcacccttatgaaccgttttgggactcttgtgtacaaaggaatggtttttgctaccgtgggattagctgcaggtcttgttggaaccgctatctctaacgggttgatcatgctgaggaaaaagattgatccgagcttcgaaacgccgaacaaaccaccacctacgctgctgaattctttaacttgggcaacgcatatgggagtgagcgccaatgtgaggtaccaaacgttgaatggggctgaattcttgctggaaaagtcattgccgccattggtgtttaaaacaagtgtgattgctttgagggttgtgaacaatgttttgggaggaatgtcgtttgttacattggcgaggatgactggatcacagtcggtggaggaggagaagaagatagagatgtcagagatatcagagaaggagaaagaggattgaatctcttagagagtttctttttttgttcctatgttgtttctgttgttcataggtagaaggcacaagaggcatcacttcttgagttgaaacctttttacacgttcttacaaaagcaaaagacatttgttctggtgtgtgtccatcctagtactcctatgtcattggtagggtcaaatttgttgttttctgtatcaacataaccaataaaataaatccaatcacaagttctgattcagaaatgaagattgaatgatttacttataggacatgtaagcttacttctgacgagtgatccatttatgactagagtatagctaagagtcgaacatatgaacaaagaataaatttaaaagcagtggaagaagaagtaatcagaacatcccaagtttcatcaataggcatgaacactagttaagcaataagcaccaagagaggcctaacagtttctcatttctaaagagagagagaggaaaatgtcacatacaaaaagaatgtcaaaatagcggtcataagagaaaaaccttcataaaaaaattagcggtcttagatggttggtgcattgcaaatttgcaaaccattgaaagatacattctttggaattattcatgtgttgaacttgtggtattatacatatatgtagaaagcttccaatttggcgatcacagttgtgtctttcaactaaaaaaagacatttgaaagttcaatgcttttgtccgaatcctactatataaaaaaatcaacaatggtggtgggtcagctcaacatgctttgttggtgtcttggtgaagtagttgagtgttatgggcacgtgggagctcaaaaacagcttaagtttcgcacgtgggaaatgggccgattgattttgattgtttgtaaaaactagggttttaaagcaaagatcaggtttcgatttcaccaaaaaccgaacactgtcttccgtcctaaagattgtaaagggaaaccgttttcgattttcagagaagatcacacatctttcgtcccttcactgccatacgtgtcgataaagatggcggctatggcggcgaagcttcagttatcggcgaaatctgatcaaagcagtgtgcgattaccgagagtgatcaacctctcccgcgatccaacgactagagtctcgtttccgcgaaatggatcagtttgttccctccacaccaatttctcttctccacatctcgcgaaaccttgcgccggaggtggtggtggtggaagcaccggtaatcacggcggtggaagtggatacggaggaggtgcgggcggtatacgaggatgcgacaggccatgacctgttcactgcgatgacccagcgcctcgagcacatgcacgggcgtagccacatataaatgtctctcgcctgatagaaaccacaatttttaccttctaatgaattcatgaaaattggatcattgaagaaaattcacttactcagaatctcttgaagctacatcacaagcttcaacaatctctaagcatagcttaagatcgtcttcatttctagtaacctgataagatttgaaccagagataagctgtcccaagaactccagtatacaagttataatctccaacacgttttccagatcgtccccatgtctcccacactacctaaaaagagtcaccacaaaataagacaaaacaaaacctcactaaactaaagaaaagtcataaattggattgttacaactacataacttcagcataattcaaaatcatatatattcaaattataaagtgagttactttatctttgaggcttaaagcataactctgaagcttctcggaaaatattttgtacggaagtgatagcagtttcttcaacgaatctttacctgcggtgaaactttcttcttctccggcggaaccttccggtacaaattccggcatctcatttcggaaaaaacgtgttcccatatctctctctctctcagcggttgctgcagaggatcgcgaaggacagagactaacgacgaagtgacacatcgttaccattgttaatgggcctaagttt

SEQ ID NO: 37656 - DNA, 5422 bp, Arabidopsis thaliana landsberg
agtaaaactctgttgattttcatctgttgctaacgttcataaaaagagtggaactctttcttagttgaaaagatttacctactcttacagcttctccttgatttgctatcaatacagagagatacattgaagagcctatccgaggtatagagatatatttactgtttatagagttttgttgacaatgactttgttactagggtgttaaacaatgataatgataacgataacatagttatagtagccgaaagtttggcatttaacgggatctaggacgaggtttttatcataggtttggaaaagtatccaccaactgagtaacaggtttacaaattacacattacttactcatctattttggtacaacatcatatgaacagagtagagaaaatggctgcacatgtggttgggccaggggatccgaagaggttgacagaagagagagagcacggtggatatcttgagattcatggaggactcctgagtattctcccacatctgccaaaagatttaaccaattgtttaaggactagagatcaaatcaacagatatttactccctccacatattaaaggactagtgaagaagtgcatataccaaccttcgccatgaagttgaaacttggactttcctgctgggaacccacctgaggtttgagatgtagagaacatacggctgctactagcaaccagctggtcctcagagccattacctctctggaagctcagagtaaagcttttttccgtttgtctaggctttgtatcataagtgttattaccccattcatacatttcttcagatctcgcgttaagggacaccccattccacaacatatttgtatgctgtcttcgatctgcaggagtaaacacgttacattagatttccatgaatgaattgtgtgtgtatgtgtgagtgcgtgtggtagagactgatggaaagtcctgaggaaatattgattacatcaagttgcagtataggttcataccatacaccctctcgggattcattgaaaatactccttgtggcttacgacgcctcgcattatgatgagaaagacgttttcggcagcttcgtttcttctcatcaaattcagagacagcatggaacctgaatattagaatcatgatcaactctctaccgtataatataaataggagcatgtaaaagttgatttgacacaatcaaactgaatgggcactctacagtaaaatctaaagagaatgcaacttaagaattattgaggccagaacataaccaccggttttacctgctacactgttggcagaaccgacgttccaggccactcacgctaacttttgggcactttgaatgcttttcgcagactttgtgcttacgatgataacccttagcagatgagagatccagttcacagccatcaatttggcaacgcgggactggcatgctctgaccacacaatttggatttcccagcgacaacagatggagttaacaacttcatagaaaccgctgaaatttcattattgtttctaccccagtattcttcagagtatgtccgctttcctagttttaaacaaagatctgattcagctgaggcaacggatacctcgagagctgtgggagccttcacctggacaaagtctatgttgctgcaagaatctccaggggaactttctgatgcaagcttgcatcgtttggcttcgggagatgatgagttgatagaggtcgactgtgagcttttcgatacagcagtgtgccagaagctggtggcagagccactactgactctctcaaggcctgagaaatgtggaactatagattcaattccttcacctttttcaatttcccactcagtaggtagctgtttgctgtcatcttcagtccttgacggattggacatgatcaaatgctcccaatcccactgggacgaagataccatgttgcagtccattcacgatatgggttgatttcatagacctaccaccagagccagagcaacaaatcctacaacaactacaagtttgcagaactttgattagtaaatgagaacaaaaatcatataagaaaagactagacaatcaatcctatatataactctggctaggcaaatagataccttatcgacgacaccctcaactaccaatactataagtaagatagaaaaagaaaattcaaaattccaaggaccagacaaggcttatcagcgtttattgctctcacccttttatcattaacttgagcaagagaaacttttctatgtttcacccagaccagcaaaaagggcaagagaggaagggtattacttttcatcttctcatctccatcacacaaaaactaagtggcatttattgaattggtcctacactcctcaaatcaaaaatttccccaaagtatctatcagtaacttgtcaagaaacacgatgtacacattgtaattgcaaacccttccctacccattcctcctttgtacttggagaaggttcctaactaacttcctcaaaaccaaagactaaaaagcttacaactttacacattgaattaactatatgtcaaagaaaacggcagcaagctcagccattagtggacctatctgcagcaataaagattgaacgataaaaaaagtgacagtaagttaggttacgatcccaatcaaggtccctccctcgcaagctagggttttcgatgaaagcaaatggtccccccaaaccaataagttcaactaactaacgaagagattaaaaaaagttaccaatgtttcaatcaaattcgtcattttgacaaattctctatacctagagaccattcaccttgaaggtaattttactgattcgtcgatctataactagtctaagaggcataaagctgaattttacaataaataacgaagacgcccaaatctaagaagcgcaagttttggaaaaatttgagggagtaaagagtacaaaacctcaagtatgagagggctgaagaaatctccggacgtcgatgatcggagaagatgctattgactaagaaatacagtgaaagggacgaccatacaccaaaatcgcctgaggaaaatcgaatgagagtagctcagaggagtctttcccactatttttcttcaactgttttgcctttttttgttttttgggctttcgtatttattttggtgtctaatttttaactaatactagtatatgaaacgaattatatttttaccaacacagattcgattctatatcgaaattggttatttatttcaggcctaatatgtaggtacaatcatatggacaacaaaatgatgaaatatttgtaagttgtaactaattttaggctctctaaaattagatgtaaaacaaacaaaaaatgcaagtaacaacattataagtaagaaaggtcaaatttatattgttggatctttcttcatattcttatcggtcgctaattaaacatgtaaaaagccgctgaaaaatcgaatttgtatgttcaaaacattaattcaaaaaggctgcaactcttttcatttgttagagaacctagtacctaccattcattcctagtacaattcgtgcaagttttaatatctctattagtattactttcacaagtacactaatactaatattttagagtgtccatccccgagaacatcacaattaaatgaaaatttattagacgtacgatgaactgactaagattagtttaggggaactatatattttaaattaaattaaaagcattactaaacatgaaattatgagtttggtcgatataccgttagtacatagtacataacacatagtacattccattcatttgtacttttagtacacatggctctttgatagacacaaattttagcttttgtggaattacgtgagtcttgtttgctgtgatgatgtcaagagaaagtgatactaaaatatagtcatggggtttttacagttggacgagatttttacacattttgctttgtcattttacaaaacgaagtaaatatgtatttccaactataccattatcatatcatcaccaagaaaatccaatgttctgagattcctcttcatatccaccaaaacaatcatattcaagaaaaactattatcaatccgaatatcatgagtcttcaagaccatatatgtgcgtttttgtggaagaccgtgcatcgtttgagatgccacactctatgagcctgcttcgaataatcgaatccttaaactctcactaaaaacacggatcatgtattcatatccaatcaaaatctatccaccaaagaacacaatgttcatgaacggtctaggaaaaacagtccgtaaaaccaagctctctataagtttataggttactactactagtagaaaattagaaatctaaaatggttgttttggaaatactgaccccaaagaggttcgtgctttgactttcaaacacgtccgctagattttcagtagttgacatgacacgtctgtttttttgtccgacgagtctcaattctcgagccttctcaagctcttaaaatctcaaataacgacccaattatagacggccacgtagatatcacacgtctcaatacccaatcatagatggtctgtgacgatgtacgttgtgagaatagcaagactgaatctctttttaggtggtgaaacacagatgtaaaaaagagagatatattgaaatcaaggagacaaaaacttaagaaaaaaaaccaaaaaaaaaaagagagaggtgaaattgattttctgctcgcgatcgtcatttcaatttctaattagctttcctggtgtttcttctccggcgtaatcatggtatgaatgcgatctcgatctttgcctataacacttaatatggtattgttttgtcgattgcataatgaggatctgaattcatgtttgattggcttaagatatgctttgcagctccgatctgagtcaatatgtgtggtattatcaatgattttgaattttgagtcggattagctttacgttatgccaaattgaaaattttaatctattgattagttggaaaagatggatctgttttcgaaatttgaacagattagctgagttcttatctgcattgtgtctattgttcttatgattccgatgcatggccgaattttacctgatcttagcccaatttctctgctaatttgcacaaatacatgaattggtacccaaattggatgctttgttgaatgaagagagattctgattttagtaatatgctgcatgatctggaaataaccattactaatgcgcagaggcagatgtataatgatgcttcttattactgaatggggttgattttaaaaattgttgcagacaacctcaaaaagactagcagacaggaagattgagaaattcgacaaaaacattttaaagagaggatttgttcctgagaccaccaccaagaagggcaagaattatcccgttggtcccatccttcttggcttctttgtctttg

SEQ ID NO: 37657 - DNA, 3188 bp, Arabidopsis thaliana landsberg
  unsure (1)..(3188): unsure at all n locations
ggctcgccataacatatgcgtggccgattacgcactacgctttgtgatacaagcaagtgtggtatggatgcttaattattcttatctgccaatataaccatcttattagaacagagagaatccttttaaatggaaacaacctgaactgaattagttttgacatacttggttgtctcagacggtcaagtggtggccagtacgttctaagtgagccaatggaatgaaataaccggcgagcatggactaacttatgttgttgtattagtcgcggctgttaaaatcagtgctgcacatcttcaggttgaatcttgacattatccggactagctgctgtctaacattgtctgcagatttcatcgctctattgttgatgaagttttcatagcaccaatttggatcctcatctgcgagaattcacattgatcaagttagttacagtcattacatttgtctaaagcaactataaaccaatgaggaagataaagggataatcacttactgttttgcttgaaagcgtggtagacattcaacaatgtgaggtgatctccatcaatgtgtccaaacctagctttagcttcatctgctgctttttgagcctctctaggccgaataaagcaattcggtactagagaaagaattggtaattataacagaagaggtccagggaagaggtcagcagatgcatagaggcgatgagactgataccatttgcttcatgagagagaataactgagaaactgcaactatttgcatcaacaattgcttaggacaccccctaaccatggatatgcagaatccacactagagacagctgatgacaacctaactctattacttaattctaaatgacaattatacacatgaacgataaaagatgagatctaatgcacattagaatatatgcagaatggaaactgccagcaagtttacgcctacccttaactacatacctaacccaaggtagcaaaaacaaaaagataaaggtaaagggcgtacctgatagcatagctgaaactgagagaatctcgtttgagcagttgaattcaggactgactatgagcatctttgccatctgtggatccaaggggaactcactcatgatctcacctgtctttgtcaagttaccatcatcatccagtgctcccaagtaattcaaaacttctaaggctcgcatcagtgtttcgggagcagggggatccataaaatcaaagtgcaccaagtcatcaatacccagttttttcaaggtcagaactgtatttgcaaggtttgatctcaatatttcaggatacgtctgcggctgcaagtcattattaaaactcttctctgtgtaaagcctgaagcattttccaggccgtgttctaccggcacgaccagatctctggtgagcacttgcctttgaaattggggacaccaacaaagactcaacacggattcgagggttatagactttttgcttagcaaaaccagggtcaatgacgtagacaatcccatctatggtgagagaagtctcagcaatgttagtggagacaacaatctttctcccaggaggaccaccttctgttacaggctctggagcaggatcaaatatcttctgctgcatcgcaggtggaagagtagaatacagtggcactactttaataggccccacttgatccccaagattaccaacctctttattgattttgcggcatgcatcttcaatctcctcctccccagttaagaaaacaagaatatcgccaggtggctcacacatgtgaatctggacaacagttctaatagcagcctcaagatagtccctctcaggctcctgagtgtaaannnnnnnnnnnnnnnnnnnnnnnnnaggaactttcatcagaggagcaccgctaaaataatcctgaaacttttcagcttctagagttgcactcatcacaactaacttaagatcaggtctatttttcaacacttctttcagaagaccaaacagcacatctgtggctagagtcctttcgtgggcctcatcaagaataatgactttgtatctctctagaagagggtccgccattgcttctctcaggagcataccatcagtcaagtacctggtcatagtgagtaacacatgattagatacaagtccacaaatacatcaattataaagatgagaagctaaaagaagagacaatgcttacttaagaaccgttctggggctactgcagtcctcgaaacggatgctgtaaccaacttcttccccaatagttacatccatctcttcagcaacacgacgggacacagacatggcagcaactctacgaggctgtgtgcatccaaccaaccacttcctacgcttatccgatgtttcagcatccacagcatctatcacaaactgtggaatctgtacaaataaacaaaattcagcattagcctttcattctctagacaaaagaaactctcctccatatacaatcattcccaagcctacatatcaaattccaaatatctgaatggaaaagatgaaaactttacctgagtagttttaccactaccggtttcaccaaccagaattagggtttgattgttgttcaacgttttgagaaactcctctttctgcagccagacaggtagagtcctccgtttctccagaatgtcataatatctctgtgaataaggcttcccgttccatttattgatcagactgttgattccgccgtcgggaagaccactggttttggcgttcttcgccggagcagacggatcgtccataacatcgaacagactaattttcctctttctctcagtacccatcacgatacttctcttacgaacaaattacggaggtaagagagataggacgaggaagcacaaggcaaggcctttagcaagaagcaagaacgatgatgaatgaaaattttatgaaagctagggttcggctgcgtgagttagaagaagagagaggcggcttaagtttaattataattttcaatttgaccccaaatctaaacaatatatactttagccccctcaaaatatttggaaaaggagccaagtgttagttatgttggctaatataggcttttgtaataagtataaagttgtcaggccggcccaatatctgaatatactgaaattatcgtcttaacacttggaattcatattttactggaataatgagggtacatgatgaatccaagtgctcaagatatactgca

SEQ ID NO: 37658 - DNA, 3538 bp, Arabidopsis thaliana landsberg
tctttttagagttgatttgtttcttcttgacaagtcaacgatgacaggtaatggattacaaatttcaaacgagtaaagattttgatttatttattaatgagcaagagaataaaaattttattttatttaaatcaaataaatgattgtggatggaatacgaaaatttttaaattaaattattaattgaaccaattattggaacggtcaaaggttgttcggtggagggaaaacagtcgtgctaagcgttaattcaccggaactggtttgtagaaatggatgccaaaagatttcttgacaatagaaaaatgttatagctttgattcgtattttaaagaagataatgttttcgacatatgttagctatatatgaatcgaatgttccacatacgttacatattgcatgcatgaatgttcaaattttcttccaaagtaactattttatccttaatatatggtctttatcaattcttttaacaaatttcatgtttattaatgttcaaatcctcttttaaagtaatatatccatgagatatctgtgaaatttatcatatgtaaaatatttatatagttttcagaaatagatatatatcatataagctatataaattacaactaatggtaatattatatgtaatgttgtatgtaatgttaaaagcatgtttaagattgatacaaacgacaaatggatctggttcggttgcagtttcagagcttaacatatgcatgtacatacactttgattccgtgtaatcaatgacttgatccttttaaaccactttgttactatatccacacgacacacgttcttcctttttactctctctttagatgatttcctttagacgaaattggaacattagttttactcaagaaactaaaagtgaaggactgataaaaaaaacactaaagcaggtaagatttggccacaggttaaccaaaatgccaatttttgcacttaatgtaacaaaaataaacaaggatctctaaagacatacacaagaacagaagaatatctctcactttgaagcatctccttttcattctgtcagtaacaaacaaagatattgcaatgcaaaaatcttttaaggcaatatttctcttattttattatacattgacaagaattagagttacaacagtttgatacatacatacatagtacctcctttggtcatattctttttgttgttgcggctccacaaaatcttaacccatctgcgataacaagacaaagacgaggggtttggttttgcacaaaatttaaattttggaaagtgtgtggtttataacatatcaatatagatagactgattacctcatgaggaaagattgtggcctgtggcaatctcattttctgagagcatctgatgtgagaagtcccatctgctcagtaagatggctcatatgttgatacttgctccacacattactcatggttgaaaggaactctatatgcttcaatatcagatcattttccactgatcctgagattaactcatctgtctcaccaatcactgggctctcaccaatgaactgttcccaaaaagaatcttggacttcaggaagcaactcatttaaggtatcagcttctagttcgagtgcgccatctaaaacagccattattggatcaaaacactctccattatctgtctcgcatccaacaagatccgaacttgagctcccagaagctgctgctccttgcgttggaggtaagagatcaccttgagaaaaaggcaaattggtctccatgacttgatttgtttcacaaggctcgtggtacttcattgcaggatagaagcctgcaggaatggatgaaacatctgccaatgtaacttcaggtgatccatttgaggagctcccattgtctgaaatgttagaatttggaacatcgcccaaaagaaagctaccattattgcttgagagagattcatggctaggtgcattactcatctgctgtatctgttgaagcatagtgtttgttgcatcgttcatcgatgactgatatctcacaatctggcggctaagaccattaaccccatgactgccagaattcatctggtcctcaacaggtagcctcctctttttgttgctttcagaaatgtgttggtttgcttcattactctgctgagaaaattggtttaagaaacctggactttggacagcctttgctagaaaggacatcatctgttgctgcctctgctccatcacatgaactttctgccccacattctgcagatgatgttcggtaacttgttgttgctgcctcaaccttacaagttcctgcataaggacgttcttatcgcgctgaagtctttccacttcctcttcgagtccaaatttgcccacttcaacgcacgcacccacagatgagtgctgaacttgaggttgttgtggaggctgcacttgtgcaggttttcgccggacaatactctttagtatttgcttttggcctcttaaaaagccctcgtttgcaaactcccagcggtctggatcaacttttctaaaaccctgaaaaaaagaagcatggagaatggaacagtcatcaaccgcaagaagttacttggattccgttgcaataggaagccaacatagaagatttgtataaacataaagaccattaaatacgttaataacaactattctagatatggtatgatacgttcactgggtctagctgcagcaccaaactaccatggtccaaggaaactaatacagttgttagtgtatcggcatgtacctggacggacaaatacaaacgaatggaaagctaacatgggacaactgatagaaattttgttttgtgacttaagaggccagaaatggaagtgctgaatcaaccaatcgtcagacacatatgagcacatgtccaaataagcctgcaaagttcgtggaaccttttggtaagtaaataagaacaggggaggaacaagctacgcaagagtatacacttgttagttttgcttgacctaagaaaattcattccagcctcacagacacggatgcaagctcagatacttagaaaaacaaaaacatatatgcctgcagttcacagggtatacatgtacaaaaaacaactgaagaacaatacaaatatgtgaaattatcttgcaagagtttgtcagaacccaaaaagatccaatctttaacagttagtgcaactaaaatcaacattaacacaacctactagacgtgcatagttcaaccaccagcgtcaacaactatataggaacatcaatcagtagcatcatactatacactaaataggagtcgacttctcaaagcaccttcttgcaaccttaaatcattcgtgagttttatcaataactaatgcttaattcaaccacaaaaaaaaacaagagagcaaaataaaaatgaagcacataaagtaagattccctaaaatcgaactacgaaattgaagaaaatcgaatcaatgaagagaaaaacaaataaaaaagaatcgatcgaagttcactcacataagtattgtactgtctgacgaagctggagaaattgttgtgcttaaatactttggtgaa

SEQ ID NO: 37659 - DNA, 4021 bp, Arabidopsis thaliana landsberg
  unsure (1)..(4021): unsure at all n locations
ggaagagcttacattcctgttgatcaagtcattaacggcgattatgtgtatcagtgggttgagatcttggatggtgagagaaaccctattcagggaggatcaaagattcatgtcaagcttcaatatttccatgttgaggaggatcgtaactggaacatgggtatcaaaagtgccaagttccctggagtgccatacacattcttctcgcagagacaaggctgcaaagtttctctgtaccaagatgctcatattccagacaactttgtccctagaattcctctcgctggagggaagaactatgagcctcaaagatgttgggaggatatttttgatgctattagcaatgcaaaacacttgatctacattactggttggtctgtttacgctgagattgctttagtgagggactcgaggaggcctaagcctggaggtgatgtgaccattggtgagctactcaagaagaaggctagtgaaggtgtcagggttcttttgcttgtttgggatgacagaacttctgttgatgtgctgaagaaagatgggctcatggctactcatgatgaagagaccgagaatttcttcaggggaagtgatgtccattgtattctgtgccctcgtaacccggatgacggtggtagcatagtccaaagtttgcagatctctactatgttcacgcatcatcagaaaatcgttgttgtggacagcgagatgccaagcagaggaggatcagaaatgaggagaattgtgagttttgttggcggtattgatctttgtgatggaagatacgacactccgttccactccttgttcaggacattggacacagtccaccatgatgacttccatcaacctaacttcactggtgctgctatcactaaaggtggtccaagggagccttggcatgacattcactcccgtcttgaaggtccaattgcttgggatgtcatgtacaacttcgagcagagatggagcaagcagggtggtaaagacattctggttaagttgagagatcttagtgatattattatcaccccttctcctgttatgttccaagaggaccacgatgtgtggaatgtccaattgtttaggtccattgatggaggagctgctgctgggtttcccgagtcgcctgaagctgctgcggaagccgggcttgtaagtgggaaagataacatcattgataggagtatccaagatgcttacattcatgcaatcagacgtgctaaggatttcatctacgttgaaaaccagtacttccttgggagttcttttgcttgggcagccgatggtattactcctgaggacatcaatgccctgcacttaatcccaaaagagttgtcgctgaagatagttagcaagattgagaaaggagagaagttcagggtctatgttgtggtccaatgtggccagaaggtctcccagagagtggatcagtgcaagctatattagactggcagaggaggaccatggagatgatgtacannnnnnnnnnnnnnnnnnnnngggcccagggtcttgaggaagatccaagaaactatctgacattcttctgtcttggaaaccgtgaggtcaagaaagatggagagtatgagcctgctgagaaaccagaccccgacactgattacatgagggcgcaagaagcacgccgtttcatgatttacgtccacaccaaaatgatgatcggtaagttcacatttcaacggaaaaaaacttgagaagtatacataaatgttgtgcctgattcatttgatgaaatccattttgcagttgacgatgaatacattatcattgggtctgctaacatcaaccagaggtcaatggacggtgcaagagactctgagatagcaatgggaggttatcaaccacatcacttgtcccatagacaaccagctcgtggccagatccatgggtttcgtatgtcactctggtatgaacacctgggaatgctcgatgaaaccttcctcgatccatcaagcttggaatgcattgagaaagttaaccgcatttctgacaagtattgggacttttactcaagtgagtcactcgaacatgaccttcctggtcacttgctccgctacccgatcggtgtagccagcgaaggcgacatcactgagcttccaggatttgaattcttcccggacacaaaggcccgtatcctcggcaccaaatcagactacctgcctccaatccttacaacctaatctcactaagcatgtcaagtaatgatctctctctccctctctgctttgctgctgttgtagctttgaataaaacttgagtgtctacctttagaattaagaagtcaaatggttgttatgatgatgcacttctttacccctttggtttttatattcgtacaatgacgtggtgagagaatgtagctttgtgatcttgttttgttgatgttatgtacctttggacttatgaatcttatatctgatccttttctttttatttagtgtgtttcacatcaaagtttaaacaaaaatagcaatgaactaggtaaaacatacttcattagaaaagtgaaagtgacaatctagagataaagcatgaaactaaattgattggtcatataccaaactagggttcatatagcacaaaactaatacaaaaggggttttaaagttttaagccggaaacagggcacgacacaccggacaaatcccactgttcctaagccattcctctccacaagtacgatgaaacacatgcgaacacggcattcgacccgcttccacatctgacccaactcggatattatccatgcatatcacacaatagccttcattctcaacaacaagcgtctccaagtgcatctccaccgcctcatcgttcgctggagcaaccgcaagttgcacttgcacatctacgtgatcatcttcaccgggaaacctcgagacagtaacacctatctttacttgtaccctctccacgtctttcgcaccatctttcttcaaatccttaatctcatcagcaagagtgttaacaatcgcagaataaggagggacttggagcgaatctagaatgtgatagacgatggctagtgaatgatcaccgtctccaccaaacaaccaatctcgatcaaactcgtgtgtttgctcaagggttagagtttgaagattgtcaaaatcgggaaaatcttcttcttcttcaacgtcatcatcttcttcttcggcacgagtgtaatgcacttggaaatcgaaaaacaatttttggctcttgcgtagttctccgtagtcgttgtagatccgcctgacatcgatcacgttgtctacgttatcgtttacagggaaagccatgattttgttggaagaagatgggcttgattatttgatgtgggttagggttctaatatagagagattagagaaagatgaggcaattttgagttaacggcaaaaacctgaaaaaaggaaagtttgcttttgcttttatcttgctgagaggaagatagatcagatgatcaaagaaggagatcgctgaagtttcgtaacaaggctgagccaaacactcgtgttatatatcccactcctcaatttccgtttaacttgggaaaatttccttttaataaaaaataccgaatattatttataatatgaaagtaaatcaagtattaaccaataatattttttgaggatatctaataataactactttccttatttccctattttacaaaaatactcaggtggattccgaatcaaggtcccgatatctcagatctttttgtaaatatcatattttgtaaatatcatttcgtagaagttgtggccatcgacgatcctcattgttcttctttactctcgagatcttctttgctcaaaccttttatcgtggacgtctagaactgatggagccgcatgaaggttcttttctatgataccaattattatttcataagtttcataaatcgcccaccatatgttcgatgatattccccacccaaatataattaccttgaaaactttgtttcttaatgatttacagatgtgaaggattaatttggccaaagagcttttatg

SEQ ID NO: 37660 - DNA, 7965 bp, Arabidopsis thaliana landsberg
ttgatccactcagctgtcatactagttcttcgtttctaatttttttaactgtgaagactttttccaacatgtcatggtccaaatagattgcgcgcgatgttatagctgttttttacaagttcttgtgtgataccaaatagtttacatgattactcttatctatcttttaacttcaggagaatatctttgagtggcaattcgccatccgaggtcctggtgatactgaattcgagggcgggatttatcatgggagaattcagttgcctgcagattatccattcaaacctccttcattcatgttattgaccgtaaggatcttactcttatttcatatataaaaacacacagatgttgcaagttccataagagagtatgtatctaaagaatctctgtacttttgtttcagcctaacgggcgctttgaaactaacaccaagatttgcttgagcatttcaaactaccaccctgagcattggcaaccttcatggagtggtaaagtcatggatctcaagagaccttatctcttgacttttatgttgtttcctaaaagactactcagacacttgtaatttacatgaggttgaactatatcagctcttttgtattatgattgagctttgtttcttttcagttcggactgctttggtggctctcattgcatttatgcccacaagtcccaatggagcactgggctcagtagattatccaaaggatgagagacgtacactagccattaaatcacgtgagacaccacccaagtatggctctcctgaacggcaaaaaattattgatgaggtatagttccccactagaatacccttgggtgttgaaccactatgcataatatcctgatgaaaatatatgaatttagctagatgcttgctgaacctgtagagtatgtgccataccattgcattgcatcattataaaccataggactagctggtggtcaaaacgggatcgcaatatattatatattaggcttgcatatctctagcggttatgatttaatgtttgctctaagagtatctgctttgttttaactgcaatcacagctgttattattctctccatacagtaaaatttgctgctcaagtcctaacacaccattttactgattattgtcgtttttaaaaagtagtcagttgcacaaatataaaaaaaaagacaatagtagtgttaacaatctccttttggtctaaactctcgtccctttcttcatgatttttgttatgactttagtttcatacctctgattcatcttcaattttggaaaaaacttttagtaaccatgaccttttaacaagcgcagattcatcagtacatccttagcaaagcaaccgtggttccaaaacctcttcctctggaatgtagccaagcaccttccatcgtatcagaagctcactcccaagttgagccacaggaagcgataactgtagtagaagagcggtccatcgctacaacagacaccatagttgatgatcaaatcatagaagagacagctgaagcagtcaatacagcagctagtgtggttcccgctgcagcacctttaccagcggttgaagttgcggtcaaagcttctgtaagtggtgagcaaaggatggccagaagagcggctcagaagccagtcgatgacagactcttcacgtgggcggcggttgggctcacaatcgctatcatggttcttcttctgaagaagttcataaaatcaaatggttacagtactgggtttatggatgatcagtcttgaactctgatgaaagtcaatgctgcgtttaagaaatggggttgtgttgtttaatattttataaatataattaaagtgcataatggcgtaaataatttctgtgtgacattgtcttgcaacttagttgatagattggattatagcttgtgaccaagttaacaatatgtattttggaattgaacactgacgaccgttttatcaatacattgatgctttgttaatagaattgttgattacctccactatgttcataactatttcccgttttgagtacatgatgtctaaaatgtatccaaatttttaaatcaatagatttcatggtcaagtttaacaatttgatcatatatgtatgtatatgaacacacatgtagtgagtcgtgtggtttatatatttgtgtgtattttcattataaattacagaaacatattagttttggggtatcttctgcacacattagtttggtgtgatctcatcttgtaccttatttttttacttttcagtttagaaaaggttatcaactttgacctttgactgccatataacgttaaaaagagaaaaagttaccgaaggttcaaatttaataaatgaagttgatcgtaatgaaaataatatttttttaaaaaataagggatggtggcaaaagaagctaagttaaaagtctatcagtccttattgctcagggatcctcaggtactaaaactagcaaacactgcttttgcgtgtctttgaagtcagatttttaacagctattgtttcatctgcctattactataaaataaaaaaacactttgatttatgggaacgtgactgctttttccactattataaccttgactcgtttttaatgaaaagaagcatacatatttggatactcacttttgcccatttataacaccagagagagagatatagggatagggcgagagagagttatactaaagaaacttgaaggagaggaggttctgagtgagatagaagaagaaagagagagatgggtaagagtagtaacatagtttttgatcggattaaagaagaacggcagatgttgagctttttcaagatttttcagagggcagatctatcctctgactgcatggtaacgttgttcttgatatctttgtttgaaaagtgggaatctttttcttctttttgttgaatgggtttcaagtctacggcttattcatcttttggttctctttgttttaaagattgcaactgtttttcctctgaatcttttacgttctctgtctttgaaacgttgaatctgttgtttccctggtgttttaagggtctcagcttctcgagggttgaatctttaggttctgtgtgttttaaaagttagatcttgtaaaaaaaaaaaaaaaagttagatcttgttagcttttggctgtctttgtttaatgaaaggttgaatctgttaaatctctgaatatttacgttctctgactttgaaacgttgaatctgttgtttctctgctctcaagactcttaacagtttaatctttgagttctctgtgttttaaaagttaaatcttataatctttgtttaaatggtagagtcttttggttgtctttgtttaataaaaggttaatctcttaatttttacgttctatatgtttgaaacgttgaatctgttctttctctgggtttttatgggtctcaacggttgaatgttaggttctctgtatttgaaaagttagatctttcagctttggctagaaggtagaatcttttggttgtctttgtttaataaaagtttaaattctgaatcttcacgttctctgtctttgaaacgttgaatctgttgtttctctggtgtttttaacactcttcattgtttgttccaaccagagagcgcttccttacagcttcataagcaaagtctctgagaaagacttctcttacaagatggttataagagcgcaatggggaaagacatgggatgtagaagtctccaagaacccgacatactactacattgagacgcgtggatgggatctgtttgtgagtgacaatgctttaggacaaaacgagttcattaccttcactcacagaggaaatatggtctttcatgtcaacatctacgagcagaatggcttagagatgcgtaaacctcgaaaattccagacgatgggtccttctagtaagcttttgtgcttttaatgctttctttaaaacagagaatatgaagttgaagaagactaattattttactcttgatgattgatgaaaacaggtgggatcaagaaagaagaaggagagaacagcctcatagatgtgaagaaggaagaggaaagtgatgaatctccgggacgagctgagttcctagttagaaagaagaagactgaggattccaaatcatcaaagaagaagatgacgagaaacaaagtgaagaagaagagcaagagcaagagcaagcaagtgctggatggtgttccagagttcaaaatcaccataaggaaatcatacctcaagttcctggtaagattcaaaccataagacagaaccaaaacaagaacacatctctgtatattggtgataatgattttctggtttttatgtatcaggcaataccaaaacattttgtggatgatcatatcccgaataagtctaagattttcacgattcgtcacccgaatggtggttcatggaaggtgctttgcttggtgagggagattcggacaatcttctcaggtggatactcgaaattggcaagagagttccctttgatggttggtgacaaatgcacctttaagcttatcaaacccttcgagtttgtccttcttacctccaagaagaacagagagaagatggatcagtgcatgatcgattgaggaatgaatgttaagtgtcttgctttctttctctatggagacattttatgtatgttttgcgtgcttattaatttcgctgaaactctttagcttgtatttcctgtagaactacttatgtcctgaacttcgttgtaagattgttatgctaacaaaactatctatgttgttgttacttgtcaagtttaattcctcttctcttcaaccataaaaacaaatggacaaatcataagttaaaaacacattgatatgagtggagtttggtccaaaaatcaaaagagtctgtatttattagaaggtggagtgttgtttatccatacagatgaacaaaacaccagtcacacaacagttaacaatagaaattccgaccacaaaaacacaaattatagaatacacggtggtgttatttagagttctccgagcaaactcagatgtgagccttgacaacggtaacagggcatgcaacgttgttgacaacatggttgcttacacttcccataatcatcctcttaagaccaccaaggcctctgttacccatcacaaggcttgagagaggaatctgttcagctgctgcacaaatcttctcacgaggatctccccaatatatcttcatcactactgtaatctgcacatgtttcacaacagttgaattttggttaaatacagaaccaaacaattgtggtaaagaaagtcacattcatatggattgacaatgttcacttattagtcacaactaacaaggcaacataaagctttcaatgaacttctgaataaaactatgatagatgtaatgtaacatattcaatgtcagtaccgttacaggttattcaatagagtatagtcccaccaatcctcagattaatttgtctagaacaccagagatagaccattattttgtacaagttatcggtactcttcagtgatgcatattcataaactatccgcaactggaagatcaccatctttgggaatcataatcttaatactctgattcaggtattgttatgtgaacattagtaaactaaaactgttgtaagcataaaagtgtttccagttgcagagaggttttatggattattctttcattaaaagggaaagaagaagtggcttaccgttttcttcctagcggcagtattgacaatgtcaagggtttcagcatctggcttcaatgcatactttttcatcacagcagcgtcagagaattcactcataggaataaaagctgaaaagttacaaacacaaaaccagagtcaaacaacaacgagatcattagtaggaattcaaaccataaacttgggaaagaattaagatgatcatgagcaaaacacgatcaactactacttcaaatagattctttccaaatttaaacaagcaaatcatacagaaccaattatagatcaaacgatgcataaataagtcaggttccttcaacaaaggtatgcaagatcagacaaaaccggaaaatcataagttaaatcatcagcgatcacacccaatttctatatcacgtttccaggaaaacaatataaaggtgaaaaggaatttgagagagagagagagagagattaagaaggtacgtgatccaacggtctcccagagctgcatctcgccttcctcgtaattcatatcgtgagcaatagtgattaggatcagatgatctccatcgcgaaccacgttatcgatcgcccagctcagagccttcttactgcagtccgagaaatccaccgccactccgatccttcgtccaccactctccgccataactctctctgtaggtatacttttttctctgaaagctgattctctcactcaaagacaaatgggttctgatgtggaagaagggactatgtattactaaggagattgaaatggatcaacgattaataattattagttattcgctgtaatgctgtctaacgatacagaaacatcatggccgttgaatggagtccacgaccgatcgcagccttacgattaaaatagctcaaaaaaacagtgggtggaaaatatcttcacggaggcaaatgtaacggacaagataagggcggggtctgggcccaccaagtttttcaacactgtccaaaaagacaaacagacattcacgttcttaattcaaatagtctctccactagtttagtattttaaagacggtcagagtctgttttttcaactaatcatgacaagtaaaggaaaattcatggtagcttcaaatcttgagagctcgtgtgatttcccagcaagtgtcgtccgtttcatgaccggaacccaaattccggctaccgctgtttgctaaaatcactagaaaccattcgttctccaatgaagacggatacattagctgatcatcctgaaccaccaataattttacattgcttcttttattcattcattttaccgccatatattagctactattataaccaaatatatataataacagattgctttgttacctctgggaggtcacagaattcatcaggagatatttgaagtatagctgatgcagactgaccagtacaccacgagtatagtttggtttcctcgtctgcaagtgttatcgttatgtggaatgttctcactacttctgtgttactgttgcagcttactcggcagaaactacaatgcaggttcgctccataagatgatgatgattcttcatctatgaaatggccgcaaaggctatgagctagtctagtgttgatgttatggcattggtcgatctcatccagcttaacccgacaaatctgtccaataaagaaaaataaacgaattatccagacgtgcaaaggaaacgccacataaagctctgtgaatcatttagagagcaagacgaacatttattgcaggttttctctgttttgatatttgggagagagtggagatcaggtgaatacaagaagaggtcagaaatgcaggcaagcagctaaggtttacgaatgtagctttctcgtctttctcatgccataacatctcaatgctgctcaacccaaaaacaagaactccattaatgtttaagctaaagcaataaaccaatacctactgttacttattgataagtattcagttcatgtttgagctaaatcagtttcccaatagcgatggatccgtagtatatctatcagtttcaaagcaagagaaacggcttaccagttctcttttgtgattttgcaggataacccagacacgtacacgacatgaccaagccctaaccttcccaacgacctggaaaccatatattatatatggttcaaatttctgttaaacagaatgttaaagccttcaaatttctgttcagatgtcgtttcgagattcatgaaacacgcttataccagtaattggtaaaatggagcttagcccatattgctccagttgtgtcctcgatcttc

SEQ ID NO: 37661 - DNA, 3805 bp, Arabidopsis thaliana landsberg
  unsure (1)..(3805): unsure at all n locations
atctggtcctctttattttaaggactactgttagtccatagtgtatcatatatttgataaatagatcggcctgaaccagacctggcttgctcaaagaatatgcagaacaaaagccataaagagagctctgtaaagaatatacagtaaacatgttttatgaattaagaaagcttgaagttgaaaataaaacataactcttctttatgtaaggaaatcaaatttgatcataaaaaacttaacaaactgtgtcaattaaaagcaaggaatactatataccaccacttgttattgaaatatatcagtttaatgaattattcaagattacagtgaagtaaatccaaaaaaggtacaaagggtttgccctgtggtttaatcactagctcgcctcttcttcttgctggaattgagttaaacttggaacataattaaacaaaaatggccagtttgaaaagaatcctaaatccacttttctgacttgattgtcctctccaacatgtatagcacgtttttgaagttggttccatcatatctagaatatttatcacaacacacgaggactttcttctcctcatcgaccaaaaagcttttaccataccaacacctcaaataattcaaatccaatgctacgaccatgctccaagacaaaacgttggtcatctcatcaatcttataattatgacccatatctctgtccttgaggtaggattaagttgtaataacaccgaaagtttctcttctttaacaaccaatagagacgcaattgcataaaaaggatactgacacggaagtagcagacttctaaatctctctgttttataatcaaaactaactaaaaatgtgcaaagatcaacttcctttttatcaaatatttatctttttcgcaagcaaaccaatgagtatttctcttcaaattttttggttactatatctcttttttatcacctaagcgccgtcgtttctcttcaaatctctctgttttataatcaaaattcagttattttttaacaactgattttttgtgattatttagaaagtgaagacaaaatgttaatcctcacctcatggaggatttaccaaaataacagagaaattaacgctaaattaacagttacagtattacttttgtcagaattaccaattaattataagcaaaaatatgaattatttgattaatgagtaatgactatcggttccatcttccccaagttcctctgctccaaaacctcttaaaccctaattcgaatttagcctaaaccctaaaatggccaaatggagacttgcgactgcgacgctccgtcgacaacttcaatcctcatcgccaactatctctaccttcaagaatccaaccaaagcattgtctgcggcggctcatcagtctactcgcagctacagtacaactcagaccgatgattcgagagggaaatggttaactttacctcctttttctcccaccatcgatggcaccgccgttggaaaggatctcctttccgacggagactctgtcaaatcttcaacggataactcaaaaacgacggcgcttaggtggattcttcgttgtcgtcccgatttacccagaactctcgttcagaaactcttccgcttaagacaggttcctagtctcttccaatcttgtattcaacgaattgttgtcagtttcttacattgtaattgattcaggttagaagagaaatgtctatgagtgttgatggtgatgaactacaaagaagccagcttaaaagggtaatgttattttgctatctattgattggaacaagaactgttttgttgaaaggctgctcttttatctgatgatgttgatttctgacccttgaaaggtggcagctaaggagtccttgaatgtaagagatagaatttaccatcctatatcggttgacaatgatacgccgcagacgccacctgctaagaaagaaaagctttcaatgtagtgatgaagaacgcanattcgtttgcagtttggtgttgtataaggttttgaaactgtatactattggtttgcttttttgtttttttattgatgttatatacttatatagattgatagatcttaactgtgtgttaatgtgccaggatccagccattattgttttgaataaacctcatggtttggctgttcaagtgagtcatttatacttcgcattctgttgtattgtgtatcatattcttggagcttgtgaaatgtgatgacatttgctctttaatagggtgggagtgggatcaaaaccagtattgatgaactcgctgcctcttgcttgaaatttgataaatcagaatctccccggctggttagttgcgaatcatagtaaagcactgattaaaactgtatctaaacgaaagtgtatgatttattatgttgtttttgttaatttgaaaagtatgaatctattggcttatgcaagtatgggatatgtattaggtgcacagacttgacagagactgtagtggacttttggtgttggcaagaacacagacggctgcaacagttcttcattccatattccgagagaaaacaactggtgcatccgcatatgtaaatcctctgctttctctccgatctttccattgcttgtcatggatcgtgggaaataaacataagtttctcttccaatgacttttattttacttggcagggtgtcaaaaagaacgtaaaatccttgaaaagaaaatatatggcacttgtgatcgggtgtccaccacgtcaaaggggacagatttcagcgccactcagaaaggtcttcacactctgttttagctagagagttttatccatctgagtttttagtctattttgttttatctaggagttgctttgtttgttcgaattcggtcattgcttttgctgctttactggagtcaaatttgaaggtaaaatatatgttaaatatctgggtaggtggttgtggatgatggaaaatctgaacgtatcactgttaatgacaatggagaactcgtttctactcagcatgctatcaccgaataccgagtgattgaatcttcaccacatggttagtgagactgacttccatttctattcagttaaacttaaagcaaatgattttgccttgagtttttagcacattgttgaattgcaggatacacatggcttgagcttcgccctttaactgggagaaaacatcaggtctctatagatattcagtttttgtttcaactttctctcgtttttatgttctcttaatactaatctgttttcaactgttcttcgattgccacagcttcgtgtacactgcgctgaagtgctaggaacaccgatagtcggggactacaaatacggttggcaagctcataaagcccgggaaccttttgtctcttctgaaaacaacccaaccaagcaatcatcatctccttttggattggatctggatggtggagatgtctcttcgaaacagccacaccttcatctccattcaaagcaaatcgatctgccaaacatatcacagctcttggagaaaatgcaggtctcttcagactctgatatttcggatctcgatagccttaaattcgatgctccattgcctagtcatatgcagctaagctttaatttgttgaaatgtagagtcgaaacttgtgacaaaaattagattttttttcttaccgagctttcttctttgtgttcattgaggcccaagtatttgtgtatttggacctgaatattctcatacaaagataaataactataattaaatgatttttggcatatgatcattattgtgcaatgatcaacacagttggtgtgatgactgattgaaacaataattccgtttggatt

SEQ ID NO: 37662 - DNA, 4535 bp, Arabidopsis thaliana landsberg
ccaagtaacaatataataatgaataagcgaaataaagaaaataatatgaaatacaagactttgcttgtgttaagaacttaatatgcatgtcatcttttgactaaattaatgactatatttgcgacttcgatctttccgtatatttgcgacttcgatctttccgtaaaaatgcacatgtcaaatagaaaaaagggaacgatagcgtaaaccaaaataatcatttttactatctttacaaagtttaaataggttattgatgtattgtataccatatacaacattgcatgagactcgagttaattttgtctttatttacgatcttgacttaccacaaaatcggagctcttgtagattttcataatatttcaaaaaaaaaatcgtactattattattgcaaatatcaatcgtttcagatataagtaaaacatcgaaacttcaatatcttacagtaaaacccaactataagattatcttttgacaagtactcttttttttcttcataaatttccaataatagagattacaaggtcaaaagactcaagagaggcacgcatgcccaaacaggaaaacaacaaggcgctaaaccattattaattagttatgtccttaaatccatgcaaatctaaaccattcacagattaaaaataaaaaaagataagttagactgtaattgtatatatattggttgatttacagagtttgatatatcataaaatgtatcaaacaatataatcattaaatgatgttagtttgatatttcagaaaatgcatttgttaccatattacggaatccattatcctaaccgtgaccgaattgatgaaaaggattagtgcatgggttgattcacaatttgagcactattacttgtttgtgtatttatagtaaatctccatgcgaaaaccaaacatagtaattaagtgtagactatctagtatatagcacacagctctcgactgacataaatcttagttcaaacacttatgagatgggcagacaaatttactgctttaacgcttaatggttggtctgtgacccctgattcatgaattttagtagtccatctctaatatattgtatcgttacacaactatttgtacatatcgtgatcataagtcattttcatcttctttgttttctttttattcctcttgtttattaagagttgttaatttttagtgactgagttgcaacagatcaacgacagtcctaaagatctgttgctaataccaccactaattagctatgtttgacaaacggtaagatcttcgccttcaaatgaacataaacattggatcaagtctgaccattaaaataaaaacgaaggatcaacaagcttatgaagattaaatctcatacttaaaattaatcaagaactttggcttagcaacaaccatcctagaatctaacataagtctaacacataacaaaccgtacccctctaacaatcacagagagactcgttaactttaagcatatcaaaaaacaaaaagagatgatgttgttctccgataaacaattttctcaacattgaacattgacaaaaaaagatcaataactgatatagtccacgtcctaagggagttgttgatcactcctgcgccgttcctccccatctctgaactcgactctccgcttgctcagcctgcataatttagaattcaaagctaattaatgaaatgatcaaaccaaacacaaaggaggaacatagcagcaactaaaagacaaagtaagagacctctttgttccagttagggaagtagatgattccaatcaatataagtgtctgcaagcatataccagctaccatacctccccatatgccctacaaaatttacaaatgaattaacaccagattaaaaagaacaaggctaattcaaaatggtcatattagtaaatagctaacctgaacgccgaggtctagtgtgaatccaagaccaagcccagcaggaagtccgataatgtaataacacgcaatgttcacgtatttctccagtttctgccaccccgctccaaccggagcccctgtgaagactggctggaggctgttcaagaggacagtgaagcccaacaagacggctattctcgtggtttctgctgccacagcttcactagaagtgaaaagataagggaagctgtcttttgtggctaagacaacaatcatgcacactatcccgataagagttgaagttatggagacgactatcactgagaatttggctaacgctgcgtttcctgcacccagctcattcgatactctcacactgatcacaccaagagacaaagttcaccagttcatgagatttttattagctttccaaatgtggctcctgtaacataaaggtagagaacttacctaatcgcagcgttaaacccgatcgaaatcatggcagtccacccttctatattcatgctgtgaaccccaaaacataaaatatgttactaaacaaacctattttcagtgagaaactaaccaaagatcagcacaaattgattaccaaatggagatggcatcgactggtatcaacgggttaggaaggagaccggtaacaacaaccagaaccatcaagtaccaaaactccaaactgcaaaacaaaaacaactaacctgtccttacaagcgaagtctcagctaacgtaagtctaaagctatctactagccaaaaaaaattggataggtaccaaagcataagagcagaggctaaggaaagtttgacaaatccatagaggtcccgaaacgctagcatagaaaatccagtccacgcaccgtctgatttggtgattaagatatacaaaagctgaccaataacaatcaaccaccacgaggtattgagagtgatagctgcacctacaagtccccacttaaagtaaagaatgaagagccagctaaaaactgcatgtataactaaaaccactccagagatccaagccatcacaagaactttcctctgtgactgcaaaaatttctgtatcggaaagttggctgcataggcaaatagttgtggaatcatccacaatgcgaacttccctgtaaattgtaacaatgtagaagttgttacgtgacattgactccaaactcaaaaccaattggcaataaggaataacaagaatgatacccgcagctttagagatgtgaggagcctcgccgaagaaggaaagaataggaggagcccaaatgtagacgggaagcaaaaacaaagcagtagtaaagagaatgacccatgaacgctgcatatatattcccatcatcctaatctgtcccgcgccatatgcttgtccgcacagcgtctccaatgcactccccatccctaactgccaccattttccatcatcaaaatgtttatattgtttgatctctaagcttttttcataggaaacttaaatgacaagcaacaaaattcaagagagcttacacaaggaccctagtagagattacttgtataacaaatattataacactgaactcaactacattaatataacatatactgttaggatttactttagtttgagaattgaaacagtttgaacttgaaaaagttaatatgaaattttgtccatcacaattacgaaacaatttaaaatgtattggaagatctactacattgatattaacgaatattgatattaattaatagaaaaaagtcctcaaatattgacttttatttctgtggctattattagaacacattatccattaccaagaacctgacacgtgtgaagggtgtttacgtaacataccatgacaccgaaggcaagaccggagataacagagttttcaactgaaacggcggcgagctcaagttcaccgagacggccggagaaagtctgagtgagagcaccaagagagtattgacttatggcagtgaatatcgccggtcctgctagctcccaaagccgctttgactcttcgccgaactttttggcccatacttttgacgccgacttggttccggtgagttccggtggctcacgagggtcaagcaacggcaaagtcttatcctttcccatgtgaaaaagctctgttttagtttctcctctttgctttctctttgttctgacttctgatatatgtatataaatatagaagatggagacacactagtgtggtaggtgccataatgaatagtctaaaaaggtctgacatgagatctatccaaaagaaataaaccgccaaaaatgactaaacgaaggtaatggaatgatttagtacatattctatagttttggtatgaatcggcctaatttggtagttaaatattatcagcataatttcttaatatgaataatctcaatttaatgggattgttaagagtatggattggttgaaaacttgaaatgatagtgtgatatgataacaaagatttttgtaatagtttatttggtctttgtttttgggccgaagtttggggccgaaactttaaacacgtagttgaatgcaagaaaaaaaaagacaaaacttgtcgtaatatgcaagaagtacgtatgtactaggtaagtacacaaaagttttttctagaaggagttaaccgagtcgt

SEQ ID NO: 37663 - DNA, 6547 bp, Arabidopsis thaliana landsberg
  unsure (1)..(6547): unsure at all n locations
ttgcctctttgctgactcttgctccatacacaaaagctactaacaccaaatgtttaatctgtatatgaattcgtttgacagaaggagctgagcagtcactaacaagtaacaacaaactatacaattcaatttgggatttgattctgcaagacctaatagagacatgcctactacttgccaacgatagcatgtcgccctgctttcttcttgcatttgaaactgaatagcaaaaagagaatcaacggttcgtgaaataggcgcagaaaaagcaaatcgcaagagagaatcgctactttattggcccaaatcctatttcatccagttttgtgtcttacaggcgatacataagctttgccaccattgccaatggagacaaagttcagacatttaagcaccgcacaatcaacagaagcaacgcaaacggatttgtaagctgtaaaagtctaatactttttatttatatacacgagggaagaacacttctgacaatgtgaggactctcagacaaatccttcaaccaagatcggtttcatctcctcttcttcatcttcatcactctgatccttcttctcactgcttctctcaataccttcaacatctagatccttcaaaccatcaacgcagctcttcccttcttctccttcgccagccaccaccaaatctccggcctgtttcgattcagccaacttctcaatgccttttccagctattcacggtttagtatccctttcattgtctcctccaacgataatcttgtctgcagtttccggaataggatccgctaaacaaccgtcttcctcctcgtggtcgaatatcgacgctgcgcgagacttcacggcgttagcggctttgcgaaatgcttcctgaatagattccggcggcagagcacaatcctcgagaccggcgtctgcaagtgccggcgggaggatcgtatcgagcaagccaactctttctttcgtagcctccatagatgcagagagattcagagctctcttccctgaaatgtgaatgaaccctaaattggataattaaatcctttttccgaggaaaaggcggtgataagggtattccagtcattatacttcattgttggatctaaattacaaaatagcccagtgttttagtgagcccaaggttcgacacctagcgagatacttgattgattgcccagtgttttgttaacaaaaataaaccattaatgaaatgctaacaacaacgaagagagagaattaaaagatcctcctaccgtattcccgggaacattcgccggagaaacgtacggaatcaacaaccttccccgggaaagaatccattaccgccgattctatcaattcgtataccgtatttgactacccagccattgattctctctccctctcttcccttttcattgtttctaaaccagctcatctttcctgatccggacgtttttcgaagatcgggtcctaattccccgggaatgggtccttaagttctggaagaaatccgtccgctctgtctggtaatttcattgaaggacggattaagcaagcgtgtgtgagatcagaaaagacggattcaactatgagcacccagaagcaagtggtgactattcgggacctggtagatgaagccaagaaacgaattgtaatcgtggtcatatgcgtcgtcggactttcctacctcatgtcccgtaagtttggtgttgttcttatttgatcgatactatgaactcttcagttttagtttatattgaagtattggttcagtagctacttatatgaatttatctcagcaatctctaatgagtatttacgtttgtttaaacttctgcagtgacaagttcatcggttttggttaaccttactcctgctgtgttattgatcatcctttttcgttattacactctcgatagtgaaatgaaaagaaaagctgcagcttacaccaacaagccatcttcgtctctgaatgcaccaactctaaacaaaacacctgaactccctaaagcagctccacggtctgactggagaagcaaagtgaactctcaagtcgttgaggatgcaattgatcactttactcgtcacctcatttctgaatgggttctggatctttggtactctcgaattacaccggataagcaaggtcctgaagaactggtgtttattattaacgatgttcttggggaactttcacggcggtttagaaatgtaaatcttattgatctattgacaaggtctgttcttcttagtgtcttcatctcattttgagttactgataaggtagcttcttcaagaatctaaactgttgtatttgatttagggatttgattgatattatatgtcgccgtgtggagcttttccgcgagtgtcaagcaaagattgagagacaacaaaggagaagcctcagttttgaagacagagactcagaactaagacgtgtgatggccagtgaagataaattgcaccctgctttgttctctcctgaatccgagcataaggttctctgtagtctaagttgcgatgagctgttatttagatttgtttgatgttgtaccacttataactatcaggtggtgatactatggtctctatttggcaggttctgcaacatatagtgaacagtctcattttagtaacatttaggccagaggatctgcactgtgcttttttccactataccgtgagggagctttttgcttgctgtgtgatccgaccagtcctaaacctagccaatcctcggtaaactattgcttctttacatcacattttgttcctcttattctcacctcaacggtactcattttgtcttccaggttcataaatgagaggattgaagctgctgtaatgtcaaggataaagactactatcagatctagtgctgcagaagaggcttctcagtctgaagatctctcaaatgtttctcctgatcatttttctagatatatggacccctctgtcacaggtgttgagcttgtgcagttgaaaaatgaacagcaaaaaaattctaaaaagaaaagcgctacagataaacagcatgtaaaagagctctctaaagatccattgctttctatggacactcgatcttcccgatcgtggaactctttcccctcaacatccaaaataggtgatggtagtaaagatcctcaaggacatcgaggaggagagggttggggtgacgtgttagacatgatgtcacaaaggaaaactgagacccttgctcctgagcatcttgaaagcgtgtgggcaaaaggaagaaactataaaaagaaggaaggtgggaaagttgatgagcgcgtgcccccgagatggtctagcaaggctggtgactgcaatgaaaacactgtgaatgcaagagagtccagtcagcgtaaagttgtaaatacagacagtcatttatcaagttattcctctgctgaagaggatgaggagcaaacaaagagtagtcattcttatacatccgaggatgaggaaatggtaacaggtctaaacagtcctgggactcgtgtctgggatggtcgaacgaagaaaaatcttggtgtttcacggatacaccatccacttgaaaattcaggccgttctttaaaaaagaccagtaaagggcatgaacgttatcagcaagtacccggtcatcaatctggcaggaagagatccagaatttctggtcatattatagacgatgatgatagtgatgattctgaagatggttctttgactagatcatacagtggaatgtctgcaacgtcatctacatcatacgtttcagcggcagaaagtgaccttcccaatgcccctaaaagttctttgttggttgattcctttgcgaagttgagatgtgaggtacagttaaatgtcggttccaaacactcataaagctgcagacaattatgtccttatgctgtatcatacgatagataaatttaggttcttcttacaggttctgggtgccaatattgtgaagggtagttctaagatgtttgctgtgtattcagttgcagtcacagatgaaagtaatcatagctggtctatcaaaagaaggtgatcgaataatattgctacggatctgatgttggtgctttgtcttttacaatttttaattatgtgaactttcagatttcgacattttgaggagcttcaccgacggctaaaagtgtttcctgagtacaaacttcatttaccgccaaagcatttcctatcaacaggcgtggacatacctgttatccaagagcgatgtgtactacttgacgagtatatcaaggtcaaacgccatgtctcttgtttttaactatctgttcatgctttacatggtgtattgtatatggagtatgttttatttttctactggatttgcttttttgatgagtagtttaccgtgaattagtttttggttttcatactctggtagctactttggatttctgagaagctaatactgaatgttcttatgtatgaaacttcaccatctactgctctgtaattttactctgaagtctgaagtttagtcaggcttgctttgatctactgaagttatgtacctttgtagtttgatctgctcaagtagctaaggctgatagttctaatgcttgaacttttgtacacagttgcttttcaacgccttctattcttccatgttaactaaatgtgaatgtttgctttgcattgaagtgattctgctgttttccttattctgcgtattatcctttctctactttgctcagaagcttttgcagctacaacgaatttcaggatcaattgaagtttgggacttcctcagtgtggattctcaggtagattctcttctgctgattcaaagatcactagtgctgacaaattttgatatgtaacttggtgctgctgtgcagacttatgcgttctcaagttccttctcaatcattgagacgctaacaggtgagtaatccacaacgcaattagatttttgattttagttagttcgatataatttattgtcactagtaaatcgtttcagttaaacctgtcagtaagacatctactgtcgctacaaatatagcaagtttgactcaggcagcaccaggtccgcttcctcggagggaaaatctgagttctgagaatgggatatcgggtcaaaatatgaggaataacgttatggtggatgatgtaaagtcaaaagtgaaaaatcttggaaatgatcatgtgaagacacctgatgtagatgtgagaaaccgcaaagagaatggcgggctaaaagtgggtactcaacatgccgatgatgtggcctgcgctggcctgcccaccgaggtatatccacacctagcatcagccaatcgaatttttctgatattttatcttttgcatcgtgggaaagcatgaggcaagtgcttgtatttcttgcagtggnnnnnnnnnnnnnnnnnnnnnnnnnnnnnagacttagtagatgttgtctttcaactccaggagggtgggtggatcaggtacgtaattttataaccagggtccaggggacatactaattttctctatctcagtcaagaaagtggagtaattctgattatttatttttgcacgttacaaggcggaaagctttttgggttgccaaacagatacttcaacttgggatgggggacgcattggacgattgggtacttgaaaaaatttgtcttttgcggcggggaactgtagttgcttctggaattcaacgggttgaacaggtgagaacctccactagaactccttccttttgcacagtgagaggtagtggcgaaagtcacagtgaataatggaaaaagtatgcctaacagggatatatctctgtgatgtctttggtcttgttatatttcaatccgtggtgagatttgaaagagctctttggtatgacctctcagatactatggccggatggtgtattcatgacaaagcatccaaaaaggcagcaacaatccagcatttctgaagaggagcagaaacaagaagcagagagacgagcaaagtttgttcatgagctgatgatcggtaatgagcgtcctgttatctgattttttttttttgcatcaatgattgcgaagcttaattgaactaacataaatgtttgaaataaaccctcaactcacagaaaaagccccagctactatagtgagtcttataggacaaaaggagtatgaacaatgtgcagaagatctttactttttccttcaggtaaacattccacttgatttcaggtttgtgcgatgcttacatgcatttgatgatttcattgttaaaattattcttgtttcagtcatcagcgtgtttgaagcaattggcgtttgacattttggagttgttgctactatcagcgtttccggaaatggagcaagctttcaaaaaattgcactacgaaaaacacctctttggtcaatatacaccaccgaactgatacttggattttcattgtaatcatcttccatattacgtggagttttgctagaattctttaaacagtaatagcacggatgcatttcattgatgagtgataacactatcagaaataggattgcacagtaaaggaagtacaagagcaaaaaagatagtcaaacggattaacttcccagaca

SEQ ID NO: 37664 - DNA, 7801 bp, Arabidopsis thaliana landsberg
  unsure (1)..(7801): unsure at all n locations
tgaattggcctagtgcgatttgcaaacagacgttaatctcttataatcaaaatttttttttagtcttttgtatgagtcctccatggaacgaaacatagctggtcaagtgaatgtaaactgatagagagttctttaaccagacggcatttcttacatgtacagtttctgcacaagtatttaacggcttacaagaagaagtaactgctacggcatctaagcgtcaaagattgacaagccgtgttagacggatagagtcagcgctctcacctattgaaaaggctgttctatcccagacaagccacatacattttgcatacactgcacgaatggctctacttttatgtataagcttcacgtcttatattagattttctattatgaacgttctctatgtacttatactgacacgcacactacttgtgtagagggatgaaagcttttatgaacacatagtctccacaatntgtgtgacatatttttttatgagcttttgtacagaaaaaaattcttagtcttttgtttttgtttctgctgtaggctctgagtggcatcctcgtataaggaatggacatagtcattttgttcagagtgatttgcctctgtgtgttatggaaagttatgagcaatgcagagatcctcctcctttgcatctgcttgaccggtaagggacaagcttttagttcatcctaatatatatagaaaatgcattggatctttattctgaagtggctgcttttcttcctccttgcagatttgctgtaggtggtcctggatcgtgtctgagaaaatactcagacccaacattctttagaaaggagttaagcaaccccagtaaaacagatgatatcaaagtccagagagatcaggctcaccgcaaaagaaaggtttgtaattatctttttttttttggtttaggttatactaagagtttcttttctggttatgagctcttttcgtcttcttacaactgtacctcgtaccagaatggactagtaaagaatcgtgtgacctgataaaatatatttcgttagacatctcaacggctatggttttttattcttgtgcttttttggctatcgtctgctgacttacctgatttgtgcttttgctgaaatgacagaaaaagaggttaccacaaagaaacatttgcagatcaaatgcagtgtctacatctgatgaaactaatgggtgggttattttaaaatatagatgtagtagttctcgtccattgaagtgtagtcgatcctgacaatttcttttgttaacctgaatttctgtgcagcgctcatctcagttcttttactgatgacagaccaacaactggtgggagtacgtccacagttgacatgccacgtagctctaatatgcaagatttatcggatattgtataccaatcttattttgcaagggcagtcaggtgcgcaagaacaaagtgaagcacaagtacaatcagatttccaagagtcatcaaaagctcgtgattctataactggttcaggttatatagagtatgtcattaatcaaagtcctgttaataagcctgaagtgaagctagtagagggattcctgtctgggtccttatgtcctgctgatagaataggttcaactgttcccgaaggctgcattgaagtggtagatgataatatcctatatagcccctcagaagacctacttgtgccttctgcttctaatgtttgtgatgagaagaaagaaacacttgaatcgatggtggagaaaagccgcaaagatgatgaaccatcagagctacatgagtcaaaatttggcccagtaacaccagacagggtaaggcaaaatcaaagggactttgataggacatatattttgtttgatgaggtagatattgtgggagaaaaacaaagtaagagccaggccaacaatattgatggaacactaggaattgagaacgaaggagaagataagagtgaacaagagagtgaagcagatgagtttgttgatgctcgtaatacaattgaatcagaatcggagagtgatattgatggagtaccaaaaccgaaattggagcattactttggggatattagtacttattgttcggaagatgctaacagtgacaacaatgatggatcagaagatataacatatgaagaaatggcacatgatccacgccatgaaaattctgaagatgaatcttgttcaggttcttaccttcctgaagactcaaatgtttccagttgcctatcagatccagtgtgtgaggaaactctgtttcatgatgagaattctcaaaagccatgggaattttttaccatgtgcccttcgttattggctgaaaaagccgttccggatgtaacaattttgcgagaagaacctgtcatggcacatcccttgtttgcaggagactctgctaatgaaaagatatcatctgaagaacgtattatctcatgcccgtctctgaaagatgctattcctgctgaaaagatcttgccagaagaacatttggtcaactatccatctcttgaagctattccccatgaaaagatcttgccaggagagtctattgccaaatatccttcttttgcagaaatcataccgcaagaaaagatcttgtctgaaaagtctttggaagaagctgtgcttgacaatatgaccccagcaggagaacctgatgctgctcatccatcatttcccaaagctgttcaagacaagaaaatctcaccagaagttcttgattcgaaaatattttctgtgccaaaagctgtttcacaagagccaatctcccttgaagaatttgttaggatacatccatgtttggctgaagctgttcctgatgaaaggttcttgatagaagaacctcccagcacatgtttgtctttgacaaaagccatgcctactgaaatattattgccagaaaaacctttggaatcgtctcattatttggaagaattgcctgaagaagatatcttgcaagaaaaatctgttgattctacacatccatcttgtgccaaagctgctgcagaaacaaatctatcaccagaagttcttgattccacaaaattgtctgtggcagaagctgttccgcaagaacaagtctcacttgaagaatttgttggcatcaatccgtgtttggtagaagcggttcctgatgaaaggctcttgccagaagaacctgacaccacatatctgtctttgacaaaagccgtggctattgaaaaggtcttgtcagaagagcttttggaaacatatccttctttggcagaattgcctgaagaagagtttttgcaggaagaaactgatgatgccacacatacatctgaagctgttagtgatgaagaaatctcccaagaagtttctgattccacaaatttgtctcttgaagaagctcttccactagagcacatctcacatgaagaatttgttggcatagatcagtgtttggtagaagtggctcctgaggaaaggttcttgccagaagaacctgtcatcacatgtctctctttgacaatggaaggaatcttgtcagaaaagtctcccgaaacgtatccttctttgtcagaattgcctgaagaaaagattttggatgaagaagctgatgatgccatgcacccatgtctttctgaagctgttagtgatgaacaaagctcacctaacgttcttggttccacaaattcgcctgtggcagaagctgttccacaagcgcaaatctcagttgaagaatttgttggcatagatccatgtttggtagaagctgttcctgatatgagggatttgccagaagaacatatcacctcatgtatctatttaacaaatgtggtgcctatcgaagaagtcttgccagaagaaccttttgaagcgtgtgcatctttgggaaaattgcctaaagataagatctcacaagaagaatctgatgaggctacacatacgttgtcttgtgccaaagctgaaagtgatgaacatgtctcactggaagttcttaattccacaaatttgtctgcggcagaagctattccaaatgagcaaatcacacttgacgaatttgttggcatagatccgtgtttgggagaagttgttcttgatgaagaggttttgccagaacaacttgacaccacatgtcggtctttgacgaaagccgcgcccatcatgacaatctttccagaagaacctccggaagtgtatccttctttggaagaattgccagaagaaaagatcgcacaagaagaagaagttgatgatgctactcatccatatttttctgaagctgtttgtgatgagaagatcccgccactggaagatcctggttccacacatcaatctttggaagaatccgttccgtatgaggaagcctcgcatgaagaacttgttggcacaaatccatttttggaatcagcttttcccaacgaaatcggttttccagacgaacctggcgtcacatatcggtcttcggcagaagctgtttctaaggaaaagaacttgccagaagaatccttacctacatatccgtcttgggcagaagttgtacctgatgaaaagatctctcgagaagaacttgattccacatatccatcttctgcagaagctgtttttgatgaaaatatctcaggctcagaagctcctggttccacaacagaaactggtcgacaaaacaaaaccttccctgaaaaaacttttgccacggaaaattccttgaacgaagcagtttttgatgaaaagatcccaggctcagaagctcctgtttccacaacagaaactggtctacacaatgaaaccttcactgaagaacctgttgccacagatatttccttgaacgaagcagtttttggtgaaattatcccaggctcagaagctcctggttccgcaacagaaactggtctacacaacaaaaccttccctgaaaaaccttttgccacggatctttctttaaaagaagcagtttttgatgaaaagatcccaggctcagaagcttctagttccacaacagaaactagtccacccaacaaaaccttcccaagagaaactattaccacagatctgtcctcgaccgaagctgtttttgatgaaaagatcacaggctcaggagttcctagttccacaacagaaactggttcacacaacaaatgcttccctgaagaacctgttcccaaggaaaatattctgccaaaagaacctgctgctgcatatctggctttggctgaaggtattcctgaccaaaaagtattcttggatgatgccgcacttttgttatttgcagaagctattttcgatcaaaagttttcaccagaagttccggattccacgtatccttctttgaaagaaccagaaatgcatgttgccgcaccatgtgtagtaacagatcttcctgctaaaaacatcaaggtaaaagaaggtgaagtacataatgagccctacacagcatctgatgtttctatgaatcagaagagtggtttattggaaccagaatctactgaaagaacatttccctcgagcggtggtactgttacgatttctccagatactcagaattctcttccaaatggtacaagtgttgaatcaataagtatatggagcaatggaggactccttggactcgcgccattgaaacctccagtatttgctgagtctaattctggaagccaacatatacagaacgagatcaacgaagctagtgttctttcgacaaggaagcaggaatcatcaagccgatcagttgaaaatgctgagaagagctcacttccattaattgtttcagatcccacgtctcaacaacaaagcaacatgtcgagtctctctcccatgcagagcactggaacatcgttcagagtttttggcttaagtcatagattactcatggctgggtttcggggaaactcttcttcaacttgcaaatttgaatctgtacctagtagtagctatgataccagagtagctgctatcgaagacaggactcagcaaagtcctggtggttcaagctttgaggagcaattggattatgaatcatctctctttggctcacctacttcatccccaccggttgaacatatgaaaatatcattcaacccaatagaagcctctccagttcctaaattgaaactgagaatcccatgccaacctcggtacaatggtgaaaatgcggatatgttcccttcgtttcagttggttccagaggctagcaactctgatgacggcgatgacaacagtgacaccttttgtcagtcatctccttgtgtttccgactattgtttgtcagattctgagctgtgggaatctgatgaaagccctagaatatctgtatcaagcttgaagcaagttgaagagagaagtagacatggtgatatgggttctttttctggttcgtttcttgatctcccatgttacgacgccgtagatcatcaatccacattttcaagactagagcaagaacaagttccggaatacaaaccatctgtctcagagatcatccgtgcttggccaccaaaccaaccaaaaagcagtccctgtaatgaagcaaacgtagacgcaaacacggtgtcgaagaaaacgcaagatcaatctcttgggtacttatagtaaaactcactctcctttcatttgcattagtcgtagatcattagcctcatgagactaacaaacaaattcttcgctgttaattaggcttgtagctacagatgacgagggtggtgatagtgtttgtcttgatgaacataaaaccaaagggatctaattgattctttgttgtacattcctctctgtcatttcagttttcatgtaaacacaagcactatttataaatcagaaattcaaatgtgatgcatgaaaaaaagaaaataatttattttatttactgcattttttttgtgttttatcaaattacatttttgttttgttatatagaaacaaacaatagattacacttaaatgacgatcttgaagtcattaaatttagaaggtgacatcaggaacgatcccgagctccttgaaagcagcgggacattcagctgacggagtttgaaccatgaaaccgagagggttaacgatacgtgtctcgtgagagacgattccgtcattcgcggtcaggctgatcttagcggcgttacgtaggtaagcctctttgctaacgtcactgcaaccactgtctggtgattcgacgagcacaagctcgcaaacttcctcctcatggtcaccggtcacttccattctgtagctccctgttttgtccgttacggcttcttttgtcaatgttacggttccgtttgttctgctcctgcattctagcttcactttcgcgcctatagaaaacaatgtagacaaatttgaataagcagaaatactaataacataaacaatgtgtaatgtgtagtatatagatgtatgaaaatgtttaccttcaaggaacttgctgagacgggtaacgaattggacacggcatgtgtcacaataaaccgatccctgaatttggaaacggtcaaagtcatcggcatcagcgatggccacaccggcgagagaggacaggcacacggcggagacaaagaagaagaagatggctttggacgccatttgtttcaaaatgttaaaagattctagtcttctttttgatacctcttctcttttgtaatcgttttctttgtttgagatgttagagaagaggacaactaattcacaagagccacaaagttcggttttatacaaaaaacataaagttaaaaccatctgttatttttagctaaatagagaacaatcgttcattagtaaattagtgagtttgttaattcttttaattatagcctctaattcttttgtgtccctaatattagaaatttagtagaac

SEQ ID NO: 37665 - DNA, 1966 bp, Arabidopsis thaliana landsberg
attcatcattatcatcatcatcacaaatcgatctctctagaaacaaatttcccaacttccttcttagagctctcttgtcagtttaagctatcattatgtcaaacgaaccggaatcctccgactcgtaagtacttagatctttgatttttgttttccgttcataaagtttcgatttttttacttgggtttttcgatattgagaatagggttttttagtttgatctcatctgaaagctgattttgtttgtcttcctggggtatttgtttcaggaaaactaagaaggatttcagtactgcgattctagagaggaagaagtctccaaaccgactagttgtcgatgaagctattaacgatgacaactctgttgtctctctccatccttctaccatggaaaaactccagcttttccgaggcgatacaattcttatcaaggttaggttttgttccttatgtcactatgttagggtgttttgagtttagacttggtttggattgtctgtgtcttgactgtatatcacgaatatgtagtaaacatattcagttatgttttttactttgtctgatcttgtaaacgtattgagttagggtacaacttttttgtctgaagttttttttttgagtttagaattggtttggattgttctttttatctctgtgattacttacttgattggggttttggattttcagggtaagaagaggaaggacactgtatgcattgcccttgctgatgaaacatgtgaggaacccaagatcagaatgaataaagttgttaggtctaacttgagggttaggctgggagatgttatttctgttcaccaatgcccagatgtcaagtatggcaagcgtgttcacatcttgcctgttgatgatacaggtgaaggcgttacgggaaacctctttgatgcttacctgaaacgtaagttggctttaatcttttgattctctctttcatatcatagactagcttgtcttttggagtttcgggtttctaaacttatattgatatttttcaccagcttactttctggaggcgtaccgtccagtgaggaagggacgatctttttctattgagaggaggaatgaggagtgtggagttcaaagtgatcgagactgatcctgctgagtactgtgtggtggctccagatacagagattttctgtgagggtgaaccagttaagagggaggacgaagaaaggcttgatgaggttggttatgacgatgttggtggtgtcaggaaacagatggctcagattagggaattggttgaacttcccttgaggcatccacaactctttaaatcaattggtgtgaagccaccaaagggaattctgctttacggacctcctggatccgggaagactcttattgctcgtgctgtggctaatgaaaccggagcattcttcttctgtatcaatggaccggaaatcatgtcgaaactagctggtgagagtgagagcaacctcaggaaagcatttgaggaagctgagaagaatgccccttcgatcatattcattgatgagatcgattcgattgctccaaaaagagagaagactcacggagaagttgaaagacggattgtatcccagctcttgacacttatggatggtcttaaatccagagcccatgtgattgttatgggagctaccaaccgtcccaacagcattgaccctgctttgagaagatttggacgttttgatagagaaattgatattggcgttcctgatgagattggtcgtcttgaagttctcaggattcacaccaagaacatgaagcttgcggaagatgtaatgttctgttacatataattattttcttcttttcttttaccttttcctatttgcttagatcctgacattattttctcttattcaggttgatttggaaagagtatctaaagacacccatgggtatgttggcgctgatcttgcagcattatgcactgtagccgctctacaaagcatt

SEQ ID NO: 37666 - DNA, 6111 bp, Arabidopsis thaliana landsberg
actatattgtacttattaccttatacaatccgatttgtatatatacgaactttaactaaaaataaagttaaatgttgaagagtttaagacactaccatagctcccccacatccacatgcactatttcttcgtaacatatcaaattaaaaccatgcatttattaagttgtcagttaaggaaacaaaaagttgtgaatgtatttgattttaatttattttttcagtttttttcttttaggtagaaagaatgaaaccttagttttgtacataataaaaaccttactatcttacattccagtcaacaaattaaatacagtgagtacattttgttagatatacgttcatttcattagcacatacgttatatacttatatagtaatcataatcataaaactgtacatatgaatttatttggttgcaaaataaagttagcttcaatcaattataataaatgcttcactattttagagttttggtttatttaggggtatttaaatctaaataaaactgaaaatgaagcaaaagcaaacttaaattaaagtacatcttttattgggtccgaaaaactgaaattaaatttcgtagtagtcttaaatgattttgacctttttaaataatatattcaaatgtgtttcaaacacgaatcaaactataccaaaaaaaaaaaaaaagttggataaaaaataaaacctgactacacctcaactttggatcaaaatctatgaatatattttcaaaattatcttagtcaaattttaaattaattaattatttatataaaatttaataattatcataaccttggattaaatttatctacagtcaaaaattaattttaaatcaattaattaatagcattatacaatcctttattgttcgggacgaataaaaaagtagaaaactcaagttcctttctttaccatacagctttttcgattggagttgtataagtctttatctgacacgtgtaaccctggcacatgcctgacactaaaacacgtgctagatctgtataaatcaaacctacgcgtttcatctctcttttcaaaactcaccgacgcgatccgatctcatctctctcatttcgaaaccatggttgagccggcgaatactgttggtcttccggtgaacccgactccgttgctgaaagatgagctcgatatcgtgattccgactatcagaaacctcgatttcctcgagatgtggaggccttttcttcagccttaccatctgatcatcgtccaggacggagatccatcgaagaagatccatgtccctgaaggttacgactacgagctctacaacaggaacgacattaaccgaatcctcggacctaaggcttcttgtatctcgtttaaggattctgcttgtcgatgctttgggtacatggtgtctaagaagaagtatatcttcaccattgatgacgattgcttcgtaagttacttgaattttgagttttgtattcgtttttatgcttgatttgagagttttgtcaattttggttctagatctgtttttttgagcttatttgtttgtgtttgtgtggatttttcaagttcattgcttgaatttcgtagatttggtgagagatcaattatacgattcactaaatttgacggatcttaggtttgtgagataatccttggttcgattagctaggcaattcaatgttttgtaccagatccatagatctgcttgttgagtctgaatatgttttcacttttgtgtaattagccatgatctctaatgtttacttgtagattttctgtgagctgatgtctcttttgttgacgacattgttgttgagctgatatctctgagtcattatagctacctttacgatatggttgcacgtccttgttcatcacttttttcttttgttttacctttttgagatttgtggggcatatccaaggatgagtctcgatgacgcttgtgtttagtttataattttctgagtattttttggaggaactctttgatcaatggcttgatctggattttaaccgctttttaattcatgtatttctttgatgtgtacatgtaggttgccaaggatccatcaggcaaagcagtgaacgctcttgagcaacacatcaagaaccttctctgcccatcgtctccctttttcttcaacaccttgtatgatccttaccgtgaaggtgctgatttcgtccgtggataccctttcagtctccgtgaaggtgtttccactgctgtttcccatggtctttggctcaacatccctgactacgatgccccgacccaacttgtgaagcctaaggagaggaacaccaggtgacaataattatcatcataacatgtttatgtgtttttttgtcaggatattcaaatgtcagtttttgctaaacgtttgatatgtcaggtatgtggatgctgtcatgaccatcccaaagggaacacttttcccaatgtgtggtatgaacttggcttttgaccgtgatttgattggcccggctatgtactttggtctcatgggtgatggtcagcctattggtcgttacgacgatatgtgggctggttggtgcatcaaggtaatttcttcttattcccttgtaagactcataattgagtatagctaaatatgaagcacatgctctgtactaagcgatacctccatttggggttgaatcttttataggtgatctgtgaccacttgagcttgggagtgaagaccggtttaccgtatatctaccacagcaaagcgagcaacccttttgttaacctgaagaaggaatacaagggaatcttctggcaggaggagatcattccgttcttccagaacgcaaagctatcgaaagaagcagtaactgttcagcaatgctacattgagctctcaaagatggtcaaggagaagttgagctccttagacccgtactttgacaagcttacaaaagccatggttacatggattgaagcttgggatgagcttaacccaccagcagccagtggcaaagcttgagagcagtatgagccaaaaagaaaaagccaccaaagttttggttatttttagctcaaattatcgttacttttaaatttctgattttacgaacctttcttgctttttttacacatttgagtagttttcatcatcagtactttctcattgtccggttatggtttttgcatttggtttaaatatcaccggtttatttataaacagtggtggattagtagtactattttctgagtttttttctttgtttcattaataaaaaggccttttcataggtgtttgcaattagtttttttcccccattaatcatcgattatcataggtatgttatggctttaaatggtataaggaaattgcttatagaccaaaaaaaagttgaattgctattgagagagcttttacaaaagaaagagcattgttcaataagcttttcacatttggtcgatattttgatcaacctatcataggtatctcaattaataaaccggaatgttaatatgttttgcaagatatccctacaatcaaaccgtgaagacccgacccggttgcgcaagatccattttcctacttggttaaatggtcaagcccattaaccatactataggcctgttgccattttcgaccgacctctctatttctacttactacttaaagaagcaagaggagacgtagaggttcatacagggtttaaaaacaagagcaagtcaccatgatgatagcaagaaatcagtccaagaagttgaagacggagaacaattcacaaactttgcaaactcgaaggaagggaacaaatatgtcgttccttttgacctagtgatcgagattccgtagctaggtctgtcctcttatccaaggtatgggggaaaatagtccgcagtagacttttcatgacatctttcccgtttacgtcactgtcgtctcagcctgatcgtctcttcgttgttttcattgatttcattaatatcttacgttttttgcggtgattcctcttttgtggaaaagtattatcaccatataaaccagttggattcactttatgtgatgctggcactatattgtttatgcctctcatctcaagttctcaactattctttttgcggtttcctcatttcgtgatgagattcttagacattgcatgtgtattgtgcttttcttcttcttatcaagaaccaactttgttcaaattagattctcaaagtgggctttcttttagcatctacgcgattgtgtggttgactacttttcttttaagtataatttcatagttttgttttatttcattttagtatatacagtactacatctgtgtagttaacttactacagtagcatgtatttcatttgaccaaaactttggtatatcaattaacgtttttactttttactttttactttttacactcctggtttacccaattttgtgcaaaatgatgcttatccatgaagaccggacccggttatgtaagatccacgaggtttattacgttcggatctgctcctttatctccatttctcagctggggtagagagagagatctagggtttcgaaagaagagcgatcgatcatgagaagacgcagcaaaaagatcaaaaccgagaacaacagcaatccagaaacgtcggaagagagaaacaagtttgatgaaatccctcatgacctagtgatcgagatacttgaaagattgcctttgaaatctgtagccaggtttctcacagtatccaagttatgggcaacaactatacgcagtccagatttcagaaaatcttaccggggtggatcttcgtcggagcctcgtaccctaatcgtttccgacctaaattttaaggaaccaaacccaaagttgcatttcttcaggccgtctatatcatcaccgtcttttctatcaagtctgacatgtccgttcacatatcctcggcacgaagagtactattatcatcatgttaatggattgataagcgttggatatggtacagaccaaatcgtaattaaccccacgactggaaaattcataactttaccaagacccaaaacaaggagaaagctcgtaataagttttttcgggtatgattcagtgagtgatcaatacaaagtgttgtgcatgacggaaagactgcgtggccatccagaagaagcatcatctcaacatcaagtgtacacattgggagctaaacagaaatcatggaaaatgattaattgtagcatccctcaccgtccttggtcgtggaacgccgtgtgcataaatggtgttgtgtattacattgctaaaacgggggagggtatgtttcgtcggtgcttaatgagatttgatttgaagtctgacaatttggatctttgcactattttacctgaagagattcaaacaagtctacatgattactttttgatcaactacaaggggaaagtagccatacccaatcaacctaatttctatacatatgatgtgtgggttatgaatcaggaaggtggaaaaattgaatggttgaagaatataactttcactattaaacctcggaagggttttgttcgttatctattcgtcacaggcactactcatacgggtgagtttattttggcaccaacgtcctataccgatgagttttatgtcttccattacaatcccgacatgaatagttttagaaagataagggttcaagcacccggagttaagtttagttttgctcagaaagcttcagttgttttttcggatcacgtagagagtgtttggttgttgtaggagagacatggttttgatacccataatcatcagtatcgaaccttggaagagtttattggcgtttggataatttacacattagaggctctactcatacggctacaggtgagtttattttggcaccacggttctattctaatagcttttatgttatctattacaatcccgacacgaaaagtttaagaaaaaccaaggttgaagtaaacggaggctatgacttcagtttaagaaaaaccaaggttgaagtacacacggaggctatgacttcaagcatcgggaaacaaaagcaatggtttttccggattatgtagagactgttcggatgttgtaggaaacacagtttcatgctttggtaacaaagactgatccatatggtaaggtaacgggaaatctgattttt

SEQ ID NO: 37667 - DNA, 5337 bp, Arabidopsis thaliana landsberg
ttctggctattatcttagattcccaaaaaagggagttacctgatgattttttgctatctttcttagctttgcttgaagtgaagaagtccatattgggttgaggcaaaggatgggattgagaaatgatctgtggttagaccggaacataagaaggcatgcaaattagtaccttggttgtatagtaattatacatatgttaggaattcataagagtgagtaccttgctgctggaggatctaaagttgccggagaagactttttggttcgtttcgtttctgttcttcaacgcgtcatactacgactggtatatatgattcgatagatataatggagtcagagacccctttaagtctgtgtattatggatatttttataaacaagaaaatggcaattggaaaagtctacgataaccattcatttgactattgacttataaattattagaaacaaacaaattcctaaagatataacaatattggtcagactcagatctaaatcacaaaattgtttgttttcgtttttctttatcaatcaagtggcagcaaccatgacttggtcaatagtggctacctttctcctgtattcaaatgggcccataagcagtcacaaaatgggccttaaaatagaaaaaagaaaggcccaaatagaggagaaattccttaaaaacccagccccgcccagatgatcacatgcgtcttcatcgctgctcgccatcgccggccaccggggttgccgctgatgcgattcgatccagtgggaacttttgtcaccttgcctcttctctctttcctaacactcaaatctctcctcagccttcaggttccttttctttttctttctgaatccattcctgtttgaacgaggctcgcatacgttataatgtaataaacataacttctgctatggttcaattgaagtagtcattttcttttctcattcatcacttgttgatatcagagctttagattgccgtaaaaaataaaagagcttcttgttcactacacaaacttactttattaattctgagtttgttatatgaaataacactaaacagatagatagtctttgaagcaaaccaaaggtgaaaactgttctgcagttggtgatgacaagaagaatcacaagcttttgacttatgtttgagaatcatcatgggacaaggcttccgcaatcgaaatgggactttttcagcagcatcctagaaaggtaagacgacaggaacctgtctctgaacatgttcatccacttccctctgctctgctgtatgaatcctactgtatatgccgttgttataagatcaatgcttctccatttcctttctcctgcatacttcttcaaaccttcttcaatcctcttataaccctcttcttcattttcttctgtttcacctttcagactctttgcctttatcgcttcacctagacaacgagcaaggataactccatcctccatggctgagcaacctccttgtccgatatcaggagtcattgggtgaagtgcatctcctgcaacgcacacgttgtcttttgtgatgtttgaccatagcagttcccatggaggtcggtacttcagttgagacatcaccatgctatcaagatcagtggtctccaccacattcttaatgttttcaggcaagtctttgatcttgttcagcacaaactctttgaggatttccgaatttgtctcctcatctaacaagcgcaaggagaagagtcaaagacagtagtatgatatgaacaagaagctgcttgtagttagatattagatatcaggtaaagttgcatatattcacctatatcagtggaggtgtgggttaggaaccagtagacagtgttgtggtcacatgggataaaaccggaacgaacgccgtctccataaaactggaagaaccttttcccaaatccatggccttccggaaaatgtgtgagccctcggattgctaaccgggcagttgtagcgggatttttgaagcctagccacttaccaaccactgagtacactccatcgcaccctaccaaaacctgcatttcgtttagaaaccctacaattccgtagcaagaccaggcctcacatggtttacagaggacaagtagttatttaccttggttttgagaatggtcccgtcggagagatgaaccttcttgtagcatccagacaattcaatatgaacaaccttagacgaaaacctgatggtctcttcaggcaactcacctgctagagcctctaacaacagcttcctctgtacgcatcgagactcatattctctgacaaaaccattcaacaagattattgaagttatcttatttattgttttaacattcatatgctctgtgcagagaagaagaaacatactcggattctggaaacagcatctctgtgggaggagttcctgcagaaattgttccaaccacccatctgcagcaaaatcaaagatgagtccccttttttactgagctgattatatatgaatagtaataatagtgttagtttgatacccttcaaggcgatcatggagactgcgaatatgctgagaaacgccgagagcttccatggccttccaagcattgaaccaagtggtaaatgcaaatcctgtcgctctcagtgtctccgaagattccagcaccatgcttctgatcccaagcctgtgacacacaccactttagttaacttactctgcttaataacaactcaaaaggcacgccacacacacctgtgtagtccaacagcggtggaaaggccggagataccggcgccaacgatgatgatatctgggctgccttcttcttccatggtgcgttgatgatcttagaaagaaagctctgtttttcttcctctcttgtatttatttttaactttcaagtaaacaaaaagaaatgtggttgaagttggcaagtcaaacaaggcaccccgttctaggcaggcggctacagtcatcaaatatcgaatctttaatagtatttatatgttgtcacactttatcccgttctagctagggcgcaaataattgtacattataaatttataaacgtgcaaacagagatacacactgtgtggcttatttcggaaagaaaacgagattcaacgaaacgtataaggaggatccaaggcgaagctgacgagaagcctcgtgttcttgtaggccttgcctgttcgatcgtgaagccggacggctctaactccggacttcagttccggcagaggaagacatgtctgtcctgcgaaatcattctgggtgtcattgtcgtagtcttggactttgaaccacagaagcgccagttctggaacagacagctgaaacaggaactcgtcgttgccccatataggaaaccactgatcgacagctgtttccgttctgtatgagaccgtgtctctcggtactcctgctattccaatctgatgcagcaaatgcaacacacacacagttacgaagaaatctagtttaaaagaagagtagtagttgttgtttaccttgacgaagaaatctggaggagagtattgatcaaagtgtgtatgatggaaatccaaatcccatccttcgccagtgtaaatcttaaccttaagagtggtcttaatgggaaaccttttgcaagggtcgaagagtgtgtgctcgtctagcaagatgcgaggctttttaacgtacccacatccaccattccccctgaacattccttgcattatccatagttgcttcccatgtcccttttcaacacaaatattattcaaccattttttaacaagtcaaacgatgatgagccagttccacttacttgcatgttaaaagcaaccatttgagcaccgtgtgtccacccaacatgaggatcgtagtttgacgagtccactcttgtgccctttggatatatcctcaccagattcctctgtgtaaacctgcgccacaccatgattaacaggattcatattgagttgccaaactgcaactattacttagaaacataaaaacataatatgactatacctcacaatgtgcttcgcatatttttctgctgccttttcaagttgttcttcgcttaagctaaggcgtctaaccttgtcaggatctacctttaaacactcagtaattccgccttttggtttcccagcatggattgcaatcaaatgtttatactggggtggtgcattaatcttagacttgtcttcatcatcatcatcgtcatcatcatcatttccatataagtcatcctgcaacaagaaagaaaactaacatgtttgtccatgaacagcaacagaacagaatgaaaatgatttgtcttcgtacacaccttagcttcacttttgttcctctgaataaagctcggaacttctcttccccaaacttcttcatcccccaagtctttacctttctgcaccacttccacatcttttccttccttgtactcttttgggggtttggttgagatgataatacgtctttttaaagagtttggcgatgggaactccttcaaagattctcccacaggaggagtaaacagaatttccccaaatatctcagtaaccatctatcatacaacaagaaaacacatctcaaaaccaatgtactcatctattaaagcagcaaagaaagaaatgcaaaataaaaagctacctcagcaactttagactgaagatctggagtaagatgatcttcaagagttacaacaacaggatagtcagatacatcaaaggcatgtgctctgatagctttgagacatttgatcaaccccacaggtgtagtgagagtcctgtttaagaatggttcagtaaacaagttaaacgccaagcacctaaccttgacttgtttttcgaaataaatttgaagcaaaattatacattccgtgaagaacatcaatatcgtctttgttggaattgggccatatatccaattcaatgactctaacacctttcttcaacgcatcaataataggtacctcactacagtcactgctcagctgattaccagtcagataagaattatgaccagtgaatatgaaataatgcgatataggagcatccatgtcatgatgcacctgaaacaccacaaattcattagagataagtctataatcaatctgaaaataaaagctagcacaattgagtcacaattacatgtatagccggaattgtaaaaatattaattacttgtatcatggatttttgtgtcagagttcctaatagagtaaatgtcacattcctagatatgttactttctcaactttttatttttttttgagacataaaaagaaaaacaattctattgcttcaaattcttgaatcagacttattacacaacacctaaaaagtacatagctcctacgactttctaccaaacagcagcttcgaaga

SEQ ID NO: 37668 - DNA, 4705 bp, Arabidopsis thaliana landsberg
cccacttgcttaaaacaatcagcccagaatttgctcaagaaaatcttgtttctgtcagagacaatggactcaggaaacccatggaatcgcacaatctcatgaacaaatttagtagcaacatctatagcagtaaaaggatgacgcaatcccacaaaatgaccatacttactgagacgatccacaacaaccagaatagcattgaacccttgcgaagccggcaacccttccacaaaatccatattaatatcctcccaaactttacttggaataggcataggctgaaaaaggccagcagcagacaacgctgaggtcttatgcgtctgacaaactgcacattctgatacatacttctgcacatgcttgaccaagccactccaatgaaaagatagttgaatcctcttaactgtcttctatactccagaatgaccccccagttgactagtatgaaaaacctccaagatcaagggtataaacttagaatcagaaagtaaaaccactctgttcttataccataacttcctttctttgatagtatatcccttgtgagccaaactctgtgaatcctctgacagcaacttctttaactcatcactttcatcaatgtctttatatatatcttgcaactgtaacactgaaggaaccattaatgcaaacaaatccatctgtgagactgcaagagccgcatgtgagatcctagaaaacccatcagctactttattgtcgatgcctggcttgtacagaatctcgaaatcatatggcaatagtttgataagccatttctggtaatccatagaaacgtcacgctattccagcaaaaacttgagactcttctaatcagtatgaaccacaaatctgataccaaacaagtaatgtttccatttctgaattcccaagataatacccatcaattctctctcataagctggcttgagttgttccctagctgtgagaccatgactcaagaatgatataggtttcttgtcttacatcaacactgctcccaaaccaaaacctgacgcatccgcctccaccacaaatacttttgtaaatttggtgacgaaagaaccggcgcagaagtcattgccttcttcaataagtcaaacgcttcctaagccgctaaactccactcaaaacagtccttacgcagcaactcagtcaatggtcgtgttatagccccataacgttgaacaaagcgtctataatagcctgtcaacccccaaaatcccctcaacttcttgattgtgcgaggcacatgccatctagacatcgtagtggtcttggatggatcagtagaaaccccatttgcagaaatgatgtgccccaaatattccacttgtgattgagcgaaagaacacttcttacgattggcaaacaactgatgttcttcaagtaaacgcatgacgatcagtaaatgttttgcatgagacttgagatctttactgtaaaccaaaatgtcgtcaaaaacaccaggacaaacttgcgcaaatacggacgaaagatttcactcattggtccttgaaaggtagcaggcgcgttcgacaagccaaaaggcatgaccaagaattcatagtgcccattaatagtgcggaaagccgtcttctgtccagttccagcatccttatctgatggtagcctgccctcagatcaaactttgaaaatatcacttctccatacaagtcatccaacagttggtcaatgactgaaatggaaatttatcgggaatgttagctttattgagtgtccgataatcaacacaaaaccgccagagttgtccttcttcttgaccaagagcacaagactagaaaaagactatgactaggcctgatgatacccgcctgtagtatctcagaaacttatgtctccatgacagccttttgggcatgcagatagcgatagggacgcacagtaactgcagtaacgtcatctgccagcaagatagagtgttcacggcccctgacaggaggtaagcccttgggttcttcaaacacatgtgcaaactgaagtaaaacctcatatatcaccacaggaaacacgacagaatcttgttgcaaagaggagtaccccaacacttcctcctcatcatcaaatggagatatagtctgcaaaaaacttgtgattcttgccaactccggttccccaagcagactcactttcaaatccttgccgctaaaagagaattcttgtcgttgccaattcacctaacagtcatccagagtacgtaaccaatacacacctaaaataacatccacttgcgcaaactccaagataataaaatctgaaatgaaagaccaaccctgcaccaagaaactcaattgtgtacaaaccccactgcttgtagctgtaatacgagtgcccaacacaatagtcaagtttttgttgttcctcaccttcaaccccaagcgcttaaccattgcaggcgtaatgaaattatgagttacgcactgtcaatgagcttggacacttcaccatgattaatgataccacgcagcttagtagtcgatggagaagacaaccccatgtatgaattgtaggataactccatcgcttgacctgtaggtaccacttctagctcttccactggagtatctgcaactccttttggagacaaacatggcctctgaaccatttgtccttacatttaaaacatattctctttcttcgcatatcatccaaatcagcatttgagtggtgtctctgaggacgttgtgccactgaagaacagtgcttctcaggagctttgttattatccgacaccacatgtttgcccttccaagtaaccagccctttacattgaggagcccgcttagatttttctggctcaatctccaccaaatctggtttcatagccttccggaaataactggactccatagatatagccacggataccatctagggaagactctgaggcttcatcatgtaaactagttcctgcatctcaggacacaattcattcaaaaatatcccttccaacttatggtcatccaacccagagacctgcgcagaaagatcctcaaacaacctaacataatcagccacataacccaaccgtttaatgcaaaagagactctgactaggacccttaatccgtagataaccaaaacgcaacaacaaatgatccttaaactggaaccaattatagaaaaggactaatctccaaattgaaccaacccaaggcatctcctgaagttgaatcgacactaaatccagcttttccttatcactaaaacccccaatatgaaaatacctctctgcaagtgagatccatccataaatgttcatcccatcaaagatcggcatctcagaattcttcaacaggttctcgcgtgaactgggacccagatcctggtgacggattgctggtaacgaccgaggagtctgatgacggcaatcctgagaatatgattgatccatcgtactcggctctggagaatcacgattcgaacccagaggtggaagacgaagcaagatctgctccagagtgtgctgcatcgcctttgatgtgactttctcatcatgaaactgactgttgagagtgttgatgcgctacaacagctcaagaatcggatcatcgtcagcttcagatgaagccaaagacggaatcggcaacaacttcagatctttcaccatcggcacttccttatcgctggcgacttcttcgactcgagcccaatcacctcccagttccacctattggtactcttgtgctccaccattttcaaattcacgaaaaaccctaatcctaatccagatttcagcagaaacccaccaaaactgtcgagcaaacaacctcagattccaaacgaaaacattcaaaagtttttgaaatttattacctccaaatccaaaaatttgtgtttcttacttttgtctctttgtctctctctcggatgtaaaactgaaaggtcgaggcaatgagtattcgctttgttcttcttcttttttttaatatacaaaaaaaaaataaaaattataaaatgacagagacaccaaaacgtcttttaagacacaaaatattttgtgctgttgtgcgttaacgacgccttctcgtgtttgaattcttcaaataacgattcaattttgaaattgatgagagtttattatcaaattatactaaccagagcactttcctgtaaatcttcggtggctaacattctccctcgggagagcacttccgacgatttggtattggtgaagctacaagtacaaaattatgaaaagattgacgaaattagaaaacaaaaaacagcaaagcgctaaattggaagaaggagaagtaagaactccggctagatttaacgatattttaccctgaaaacactcattttcgtcttcaccgatgattgaatcctccaaaagatgcaaaccctctcttcttatacgaaataaattcgtcgtttgttcacttttgtaccaagaaaaattgaagaatccaactatccacacatatatcaagttgccagcgctcaatatatgaagaataaagggaggagatcaacctatgagtaaaaattcatggaggcgtgttgcagtcgaacctgttgcaagaatttgtgcctacgcttacttgacttaccacttcgattacactgagtggaaaacattttcggagagagaggtttgtagttgttaagaattatgatttaatgtatttgtttgcatgggcaattaaaacccctaagaagaaagttgaagatgaaagagc

SEQ ID NO: 37669 - DNA, 8056 bp, Arabidopsis thaliana landsberg
gatttactcctaatccttttaacagagcaagcatgagaaattcaattgagagaaacaaaaatcaaaagctggaaactttttaccagaactcaaatcagagtggatatctctcggcgacaaagatcttcgaatcaaagactgtgaaagttattttagtgacttgactcttctttcttcctattttgggtatgcaaagttaaagatttgagatctaacggagaccaaaaacaatacccatatgagagtatgaatgttaataattgtgcaatataataatcacaacgagacaaaagtagacaactttatccacaactagtggcgtgtgttcttctaatagcgttttttttaccgacatctcatctttgatttgctcatctacgattttatcgggatcatgtacgaactttctcttgtgagatatttttttataagagatcgaattttgtttgaatgttgagtgggcctaaagcgcagtgaagatactcttatcttcttatgctagagaaaaaagttttttaacgttggggccgaggacggtggttcatgaactcgattctggtcatgcccacttttgtagaatccattaaatatctaaagtctatatggcttaaaggtgagaacttgattctcattagtcattaccaagtagaatctataatcaaaatccactgcttttactttacaaaaggaaaaaggtaaagataaaaaagttctctcaaactttgaatcctcgtatacccttattaatggaccattgcctacggtttatgattcgatttcggatagtcgtaaaatagaagcaatctaagttttttggatgtatattttggtgtcaacttggtgtttggttataaatatttgggtgaagcaaaaatataagtaaaattaaaataatccacattagaatttcagtctactctagtgattcggttttggtatgaatctgcaagagtagcatttctttttgcaattgcaacacaataacaccattcctcacaaatcacaattgcacaaacccattatcgaagagctcatcaattttgggctaattgctaaagcagaaaaaaataatcgcaaaagataaccatgcaactgccaattttcttcttttcatgggtaaaccaaatcagacacattgaaaaaaacgatatcctggtttagaaacagaccagggacaatactcatcaaagagaccaaagaggttataaaacagtgtttggagatctttcaaacacacttcttattcggacaaagccctgaaaggctttaaatgatctcacaccttatagatgaaaattttgctccagaagggtttaagagaggcatgagtacgccaagtccttctcttccttgagctcctctgcagtcaaatccatcttcttccttgatacttcatcaatcggaaggcctaaccaaacaaaatacacattagggtctgcagaatctaggatttcataattgatgagcatttgagtttgtaagtgcgtcatatttaccttggacaatactccagtctccattgcgacaagttacagggaaggagtagataagtcctgatggaacgctgtaagagccatcggagtatactcccatggaaacgaacgtaccctgacaatttgaatcaaagaaagaactcatattagattaactgttacaaaaaaacagcactgcaaataacggggaagagttttattatgaacctctggagttccaaggacccagtcacggatgtggtcacaagcagagctagcagcagagagcgcactagacaacttcctcgccttgatgattgcagctccacgttgttgaactgtagagataaattctccgtccaacctacagaatgagcaatatatttaagtgaaactagattttgcttccagagaaaagaaagggtcttaagttctatggcatgttatacataccatgcatcgtccttgacgagctcacggacaggcttctctccagacgaggtctgcactttagcatggttgacatctgggtactgtgaggatgagtggtttccccagatgatcacgttcttaacatcagacactggcacgctcaacctctcagagatctgtcccaaagccctgttgtggtcaagccttgtcaaacaagagatgttcttttcagggattgatggtgcaaattccttgaggatcaatgcgttggtgtttgccgggttggccacaacaagaacctgaaaaaaaaaaagacaaaacgagagcgaatgtgtgagcaagagagtcgtaaactagaacccaatagagaacacaaagcatctgttacactccaatgaacagagaagattggatgcagtggcttcatttaacttaaaaagcaaacagatcgtatcaccttgcagttaggagcggcatgcttctccaaggcagcagcctgagacttgtagatggaaacattcttggacatcacatccttcctctccataccttctttcctcgggaaaccaccaaccataacagcaacattgactccagtacatccctcaacggcatcagttgtagcaacaacacctgataataatacacatcaaatattcatcttctcctttcccacttatacaaaacaacttatggcacggaatgcaaatatccacagcaaaacaaaacccttaactacctttaagaagagggaaagcagcatcgatcaactccatcttaacaccgttcaaagcttcagcagctggaggaatatccaacatgtggaggataacaggttggtcagcaccaagcatgataccccttgcaatcataggtacaagagcatatccgatttgtcctgcataatcacaatcaatagttactttcagtagctgaggagatctaaagtcacaacttaaactctatccaactatataaacaacggtttctaaatcagagttcgatccatgaaataacttttactaaaattagatatgcgaccaactcaatcaatcgttggtcagcgttgaatccaacggaacaagagttgacctatatttcattgatctagggaacaaccagatactatgcagagatctgactagattcagcaagcgattcactagccagagatctagaagttacacgatctaatcggatatagatgaaagttatacctgcagctccagtaacgagcacacgaactggttctttcgccatcggatctagatcggagattatcgccggaaaacggatcgaatttgggatattcgacttttgagagagcgtagagtcagcttttgtctgaccgtgaagctcactcttgcgtatttatcgaagatatcgaaggatgtaccgccacgtcatctaatataatcatattatcttgaagaaataaatcgaaatctgagattagacctatcatattaggaaaacaagatattattcaatatatatttttgactctaatgggcctcttacattaggcccaaatcgtttagcccagagtattcaaatacgtgaatcaaaacagtagataatggtggcgataaggcgagaagaaccacgtccacgacaacctccggtatggcgtcatcttacgtcacctactcaacggtcactccggtggtcagcagcagtaacattcgaggagtctttcgtttggcattcacgcgccgccgtgttactctatcgccgaatgctcggaggagaatattgagagtttcggcgaaagcgtcgacgaagaatgctatggagtataggaaattaggagattccgatctcaacatcagcgaagttactatgggcactgtaagaacaatatctctttatctcctgcaattgtagtccattgttcaattttgaagttttgatgaaatttggaatttcagatgacatttggggagcaaaatactgagaaagaatctcatgagatgctgagttatgcaattgaagagggcatcaattgcattgacactgctgaagctgtgagtttttatcttcattgttcatctttctcttcttgcctggtgaatttgattgcaagtgtttatgtgaatgttttatactttatgtataattctggtgaatttagcactgttgtgtttagctttctggaatctgcttagtctgtggtaaattttcaagtatcattgtttatttccagtatcccataccgatgaagaaggagacgcaaggtaaaacggatctttatatcagtagctggttgaagtctcagcaacgtgacaaggtatcaaccatttatcatactttggatgcatattggtcacgaatgtatatgatatcagcaaaacctaatcgaagttataaaaattgatattgatgttcattgtttctgtatacagatagttttggcaactaaagtatgtgggtactcagaaaggtcagcttacataagggacagtggtgagattctgcgtgtagatgctgctaatatcaaagaaagtgttgagaaaagtcttaagcgccttggaactgattacattgacttgcttcaaatacactggtaacatcgccttatttttgctttatgtcttaactcatattctacattgtttgagcaagtgtctttctatttcatgcgcaaaatatttcgtttttcatcatcaaatgtcagaaaatcatgacactgatctttttttcagtccaggccagatcgatacgtaccactcttcggtgatttttactatgaaacgtcgaaatggagacctagtgtgccattcgctgagcaactaagagcctttcaggatctcatagttgaaggaaaggtagtgctactccttaaaaatcagatgttatattgagttatataacctcaaacacagagttttgaagtgttcctcgaattctgcaacaggttcgctatatcggtgtctcgaatgaaacttcatacggagtgacggagtttgttaacacagcaaaactcgaaggactaccaaagattgtgagcatccagaatggttacagcttgctagttagatgtcggtatgaaggtaaatctttctagaataccttgagagcaagtgtgtcggaggagcatgttctaaactcttttgttttgggttaaaaccacagttgatctggtagaagtatgccacccaaaaaattgcaatgttggcttgcttgcttattcccctcttggaggcggctcgttgtctgggaaatacttggctacagaccaagaagctacaaaaaatgcaaggctgaatcttttcccaggatatatggaacgttacaagggatcactagccaaggtttcttcttgatccaactatgcttacttctttttatgtcgtaaaacaatttaagaaaccgtattagctcgaatttagttgtaaagcctattcgtaaaagtgttttgaggtcaattttatctttgttctgatttcaggaagcaaccatacaatacgttgaggtggcgaagaagtacggtttaactccggttgagttagcactcgggtttgtacgtgacaggccctttgtgacgagcacgatcatcggggccacatcggtaaaacaacttaaagaagacattgatgcttttctgatgacggagcggccgttttcgcaggaagttatggcagacattgacgccgttttcaaaaggttcaaagacccttctttcgtttgaaagaaaataaggtttctcatgagtttgtgacctcaccgtgaaagtacacagttatatgtagcttgaatttgtttcttacagttgcttatgatatgatagatattacagtactcatgtaatgtaccacagttgcaaaacgtttcaacgcttttattgatctataatggaccttaaatcaaatcaaatttatccattaagcctcatatcggacatgtcaacaaatttaaaagaattggtgggtttgggcctatctcgacagcccatcaagaatacaactttaagtagtttaagtgtaacacgtgttgcggtcttgcggacaaggtaactgtgagttagccgttgagatgtcagaacgggaacggtaacttagaaacggtaacttacttcaaaattcagaaactatccgttactactttttctcaacggtaaagaaagcttctctatatatatagtaatacacacagcccccgatatcgttaaaaacataatccaaaagatgtaaatggaaactttaaaaactctcgtctcttcttgtccctctctctttcttcatctccggatccggcggcaaaacgcagcaaatcataaggtgagagttacctttatacacgttttaattttaattaagagttttaaattcacgactgcgtccatatctttagataagtgtgctctatctagtttaatttccagtttcttgccgtattgtttgggtttttattcgctcggattacttctactggctcaattagtgctttgttttgacctatgttgattttgatttctatactattatattattgttgctatttctagcttagaacttctggattgcaatgctaaataatcacggcacaatgttttatactatgatcagtctcataattttgctttgattatataggcttgataatgttattaatcaaaatacttttttttcttccaaggaatactgttgaggaggcgataaaaaggaatctgttgaggtggagagagctttcaagccaacaacaatttccactacttagagcaacagtccaaaacatgatctgcaattgaggtaaatttttcaatgctttcctaggaaccattagtatcatcaatatttttgaattaatctcttgttagtcgaaaggaatctctttttagtcgaaaaacttgacactttaaaacacttatttgaacatgttagtgtatataaaacccacactctaagcatgttagttaaaaatttaaaatattttgtcgaaacacgtatcatcaaaaaggccaaataaataaaaacactcttcttaggcacaactccaactctttgtcaaaaataaaccgaagcacttagataatagtcacacgcctaaagacacatagtcatagacacacgcctaaaggcacttagtcacacgccaaaaaaagaaacacttagtcataaagaactcacgcctaagaaaaacatacttggtaaaacactatataaattcagccaaatcactttagtagcaattagtcattaccttgcgtctaaaaacgcactttacaatttacactaaatcaattgaacaaattcactttagttagcaattagtcgaaccacttagtaaacactatatcaatatccatttaggggcgacacatttttaaattttttaacacaggcacatattctttttactcgtaacatttaaatacttaatcgtaccacttggtaaacacaaaatcaatattcatttaggggcaaaaacattatttttcctactaaacgaaactttgtggaatgctaagaaatatgataaacacactttggaagaaatgtaacgctagtcacttctccaagtccactttcataacatgttatagtacttaataaggcaaccaattattagcccgaccactttaatcaaaacacgagtggtttaaactcaagtagtcaaacaaattagtccgaacattttagtcaaaacacaagtcgaaacattttaactgaagtgcatttcagcattaagtaaatgtagcaaagaaaataaaacaccttaatcgtaataacaacatgtcgcaactgcaaacaatataaacacattcgtcgaaatactattgtcgtaccacttttaaatcatttcatttgattatcagtcgaatttgattatcagtcgcagcgctttggtcaaagtagtcgaaatgggagtatgtgttcaagcagtcaaaattcactccaagtcgtaccactagactccagtcgtaacacttccgtcgaaataaagtgaagggtcgaaaaagggaagctatttttagaaacactttgaaataatatttgatgtcgttgtttcttctttcattttcgttgtagacattcgttctcctcttttactgtttagttatggtctgtctttctgtagatttcttgtgtttaggttacaactgtcgacccttatatggcttatgagcttcaaaacagagtaagacctaa

SEQ ID NO: 37670 - DNA, 3083 bp, Arabidopsis thaliana landsberg
  unsure (1)..(3083): unsure at all n locations
cttgcagaccaaggtgacgattattgttgtaatgatgtcgaagcaagtaacaaaagtttatgtgccattcgttttgatgctccaagagattgttgtttcctcccgtgtggccattgcgtctcctgttaccaatgcggaacaaagtaagttttttatcaactaagtacaacttctggattgcataattgtaatggtaatgtgtttaccatattgggattgatctaaaatattgaacgttgtgatttgacaatatttgcaggataaaaagaaccaaggggaggtgtccaatatgtcgaaagaaaatgatgcatgtgaagcgaatctatacagcttaagatgtatcattatctgtccaatgtgatgttgaatcgttagagcattaataaaaatcatataatttgatattgacaaggcttaggtctttctttgcattaattcgtttcatctcttaaccatctttgtgacaacaccattggttaactaccatagggtaggcaatatagtgaaccattgtttgttgactcacatcacgaaatggttcgaaacccgaatcggtaattaaggatttcataaattaattgttaatttctgaataaattcggatttcgtatatttcctccgtttcgtaatataagtagttttggaccaatttttttgtttcacaacataagttgttttcaactttctatgtaaataatatattattttaatattttttgattatttatattatgtagtctcttttatgattagttaaactttttaaaaataaatatttttaatttgcatatttttagttaaaacaacgtatattgtgaaatggaaagagtatgaattattgattaaataattaaggactgtaatttattttattaaatttaatattcttttccaaattctccacatattttataccataaaaaaagaacaacacccttacacacataacatatccgaatcagtggttcttcgacatcacacgatggtatagggaaatgagcttccacgtcaacaagataataatctcttcgggactatacatttacaacaaaaagaaacaaatcttgtggtcaaagtttccatacgtagcttctcttctctacactcacgtccaccacaatcctcgtgctccttcctctaaacccgtccgattcacgtacttttactatcttttctcaatccaacagctcacagtccacaaacaaatttcaaatcgcgtcctataaaatcccctctcctctgctccacactctctcaaaaccctagaaaaaatggcaggaaccggagttgtggcggtgtacggcgaaggagccatgacggagacgaaacagaaatctcccttctccgtgaaagttggtctcgctcagatgcttcgtggcggtgtaatcatggatgtcgtcaacgcagagcaagctcgaatcgctgaagaagctggcgcatgcgccgtgatggctcttgaacgtgttcccgccgatattcgagctcaaggcggtgttgctcgaatgagcgatccagagatgatcaaagaaatcaaaaacgccgtgacgattccggtgatggcgaaagctagaattggtcatttcgttgaagctcagatcctggaagcaatcggagttgattacgtcgacgagagtgaagttctcactctcgccgacgaagataatcacatcaacaaacataatttcaaaatcccttttgtttgtggatgtaggaatctcggtgaagctttaaggcggatccgtgaaggagccgccatgataagaaccaaaggtgaggctggaactggtaacgttgttgaagccgttacactgtgaggagtgtgaacggagctattcggttacttagaagcatggnnnnnnnnnnnnnnnnnnnnnnnnngaaaaagatcgctgcgccgtatgatttggttgtgcagactaaggagcttgggaggttaccggtggttcagttcgctgctggaggagtggcgacgccggcggatgcggcgttgatgatgcagttgggatgtgatggagtgtttgttgggtcgggtgttttcaagagtggagatccggtgaagagggctaaggcgattgtgcaggcggttacgaattatagagacgcggcggtgttggcggaagtgagctgtggtttaggtgaagccatggttggtcttaatttggatgataaggttgagaggttcgctagtcgttctgagtaaccaatcaaatttcagatgtttttatccataacgtttgtcactttaatatgtatccacaaaccaatattctcgatttattcaagattttatagaaaaaaattggaaatgaggattttgttggctagtgcctagtgccaaaccataatttcattggactaatggcaaattctacaactaaactatgtgaaattaacaatatcaaacctcaagagagagcagcaatataacaagaaaaagtgaacacgagaatctgaattgataccaattttaaaagtatttctttctcatagtgtaaagatacggtttacatattatttagtaacgactatatcaaggacataggaataacagattatacttggaatgtctatcaattataatctagttaataacagtgagtcgacttggttttttccacaaggacccttttgccttatcagagaacggtactcgtcgaacctgattggtttataaagagcaggtcggttttcagttactagttcttcgattggtccaaccgggatatcacttctcgggttatagaagaatgccaaagagactcgttccataccggaattaacgatcacttgatgctccacgcttttgtaaattccattgctaagtatctacacattgatatatccatcggttagtatttaatttgtagagtccatttcaagatagtagatcaaatatcacacaatacctatatgatcgttttgccacactgctaattaaaacgaaaatatttatatatgttgtaaaaagacataaagtctctaaaaccattaaatagtagttttagacaacgaaagtaaaacacacaacaaagcaaaacaaatagactttcgataattaacgtattttagagagacaactaaat

SEQ ID NO: 37671 - DNA, 2845 bp, Arabidopsis thaliana landsberg
tatccttttacaaacatcggagccagagcattctcggaatgctgctagcaaatggacacgaagctcctgattaatcaatcagagcctctacgtcttaacatggtctcatgaaataaaagacacagagatctcctcaacagaacttccagtggttgtcacagttaacacatgtaacataagtcgtcattggctcatcagcacttcttgtttgcatctgatagtaggtgcatttgcgctgaccacaccgcccgcacttgaactggtcggtagatgcttttgcagcaagaccacgctcacaatcaaacagggctttctctttgatctggttgttctcttgtttcctcttgtcacttgccatatcttcggcagacaatgttatgagtttctctggtgaaatctccccagtgagaaccctccttcttaagtccgggttgttactatccctcaggttgaacattatagatctgtacttaagcttctgagctccagttgagcgacccaatttctcaaacatcagtgattccactgagacagcaacacgtaaaggatcactagcatttactgactctctctcatagtcatcagcttctccagcaaccctgcacaacgcctccacaagcaactcacggattttgtcacgcacaggatcattgcatttgagcattgcagttagttttggaggagcattagctgctttagctggagctttcattcttgattggttgtcctttgagaccttttcatctttcacagcctgaccacgataatctatcttggttccattggtgactttgatgtcaggtacctttctctctatcttcacaccggtaccaactttattgtcaggttcctttctctcaaccttgatactctcagccgaatcacccctctgaagtttccgaactataacaggagcaggacttgaaggcttctcaacatacatcttattcaccttagcctgtttacaaccgatagcgcctacggttatcttagcttaggctggctctgcaaggacaacgttcttccgtatctcaagcagatcaatagctacacttttgataactttgaccaggaggttgggaaagagacctaatcttctttcgcacctgcaagcatgagaagaatataactttctcaaaagcaaatacacacactatcaacattccagaggataatgtccaaattggtttgttccaacaatatcaacggggacgtacaaacaattagtcaattatacaaatcagttagctcaagcttcttcatctattgaattaaagttactctttttaaacttctataaactttttcagatgaaattaaataaccctaattaaaaatctaaggtaacaacaacacaagtcaatgcaacgagattaagcaatcaacacctagaaaaaccctcctaaatgcaacatatataaaccttttcctaaatgcaaaataaatcaatcttttttagggttacgagaagataatcagaaacgaacctgagtcgcaacgagggtatcgtatgtgacaggaaacttcttgagctgtttaagggcatcgatacattgagaaacctcaggacctgaagaggtaacaccgtcaagagccgccgcatcggctgccttcttagctccctcgaacaaatcaatcaaatcactctccatcgttctgacaatccctagctcaaaaaacaaagcaccaacaccgatagatccaaggcgactcagaacaaagaacaatccaacaaaatctctcaagtatggagagaaggattataatcggcggaacctcgtttgagtcacgacgaagaagatagatagagattacggactgaaactgtgttcttaatttattttatacgaccgagacaaagtgatcaacggtttcagttaaaaccttgaagaatcaacggtttggatcacgtggctaggtctatggatactactagattcacgcttctgctctctttctccttatcccgatattactgcatcaagcttgggctcacccaggcccttattgggccaaagtttgatgggcttttcacaaacaaaataaaattctcgtttttattggtttgttgatattaataaacgactcactaatccaaatacaacggaaattagagggattgatcgcaaaaattgtccacaacttaaaaagagatatcaaaagagttaggcctatatgatgctgatgttgacgacaacacttctttttcttaccccatttttctttatccttcacttcttacaaacccatcgcttgattcatcttctgcggcatcttctaaggttggtcccttttctctcttgaccaccatcttgtacaagtaaaaccctagcacaccaccactgcaacagtaatccaacaaacttttaagccttctttctgataagactcctaattaatccattatatgcaaagtgtgttttgctcttccccgtggaatatttgaatctagcaggaagcttggtcaagaggtatgactaaccttccttcattcagatatctctttgagttttagtttaggctcttctatcaatgatcttactatcgtgttacatttatcaaattgcagatgcacaatgattaatgatatggttttcaaagtgtaccttgcatgggtggtcaaaaaacctaggaacggccagttctataaagagaataaggtgagtgacatatgtttcattcaaagccattcttcaaaccattagaaatataacattgagcaatgaaagttacctgagacagtagcgaccgcaaccatctctaaaatatgaatgtcactatagactgacgaacataagatcacggaaacagtatacctgcactaagcatgctttacatctatact

SEQ ID NO: 37672 - DNA, 7746 bp, Arabidopsis thaliana landsberg
  unsure (1)..(7746): unsure at all n locations
ctcgactttactctctcctgttttccaccactcgacaaaaacaatcaactcgacctcataagccctagccgtactcgacctccgccgcatccacacagttcaacgattcactcgaccggtagaactactcgacctcggaggaccactcgacctcggcgccaccgtcaccagttcatttcctccttcactcgaccaattcatccacatcaaccgccgtctcttccaaaagaagatactcgacttctttacccagtttcgcatctcactcgacctcgaggaaacactcgacctctgcgccgtcgcaatcgaatactccgcctcgcacaccgtcgaagtctcaaggtctactcgattacaacaaaagaactcgaccacaagcattcgctcgacctcgagtattcactcgacccctacaaccatctactcgacctctaggcttctcgcctgaactcaacctccacggttcactcgatctcctgaagcattcccactcgaattcggagaagttactcaatccaactcgtcaaaggggaactcaggaacagctcagtctactcgagtactgtattgtactcgctaaatagggtctatttcattgcatattgataacaattttggtttctctgttatctttgagactaacctattgacatttgagctttgagttctaaatctctacaggggaatcatgagcaattacagtggcagttcttatgttgatcctgactacaacatggatgagacagagtcatcatcttcaaggccagagagagaacagagagaatatgaaagctgcagaagaaaagctgagatagcccgggggaaaagagcgatgacagagaggtatgagcttatagacgaggatctggaagacgagtacatgcctgagcatactcgcagagccaccaaacttctgcacaagcccgacgtattgcatgctgaggaatatattaggctcttcaagctgaatgagttctgtagcacgaggtatccttgctcgaccacacttgcacaactcggattgttggaggatgttcaccacctgtaccagagttgtcatctggacactctgatggcttatccgtatgtagcatatgaagatgagacaattcaattcttctccactctgcaagtggagctctaccaaggtatgacctctgatgagttggattgtgaaggattgggattcttgagattttctgtgtatggtcatgaggataggttatcaatcaagcgcttggaaggattgtttggtttccccagtggaacgggaactaagcccaagtatgacagagaagagttgaaagacttgtggatcaccattggcagctctgtaccgctgaattcttccaggtcaaagagcaatcagatacgcagccctgtcatcaggtacttccagcgttctatagccaatgtactttactcccgagagattacagggactgttactaactctgatatggagatgattgcaatggccctcaagggaactcttcgccaaactaagaatggtatgtctctccaatgtgaagtcaatgacacacctctctctgtactttccatctatgtggatacaagagctgggctgtcaacaataaccacaagagagcacgaggcgctctgtgcataggtggtgttgtgacaccgattctgatagcttgtggagtcccaatcatttctgctggactcgagccgcgagcaatggatatcgagcacctacgtcactacgaattcctggagtttgcaatggttgacgacttccacaggttcaggtttgagcactctacagacaggagagctagcatattgatttttggcctgaggttacacggataataaagggagataatattgattttcggcctgaggttggacgcctctactatgagaacgctccgccattggatgaggatgatcttctagaagaagctgcttcggatgggttggatgaagatagagcagtggagttcgacactagcatgtatcactttggtgaacatgtacctccagcgaggcagagcaagagcttgactgaagctcataagaataacagtaaattgcagaagtggtgcaagaagcaggacaagctgatcgccaagtgtttcaagcttctgacagataagctgagttgctcttcctccaccactgctattccacaggtacagcctcctctggagatgccatcgaagggatttaatgtacctgcgcacaggcctaagcttagcgagcagagagtcccacatgtccaggctaggcattcgtcattcgaatcccgagagcacaagagaagaaggaaggctacactcactcgatctagcagcagatcacgcctcattcactcgaggagatcactcgaccgcggtgctggccgcagaagaaggagagaggtcgagtatcctcagagcggtgctggccgccagagagctgatgaggtcgagtacccacctgctggagctgatacagaacaaggtggttcgtctatagcctgggagcaatcacaggcatccattgacgaccaactacgttcattctttgactgaggtaagcgcctcacttcaccattgtattatatcatctcttgtgatttgttctttattttgtttctgtgattggatttatcctgaatactctcttccatgtttagtcacacagtggattgtgtgatttaagtttgggggagggttcaagaagtgagtgttgcattgtttatactcttgagtctgcactcatctaaggcatagaaaaacgaaaaaaattttaaaaaaattcaaaaaatgatttcacaaaaactgagtgttcatgtagttgcattacatttaggatcgagtctagaatgtttcatttaagattgttgcatatgcataggggataatgatgagatattcttgtaagcattttggttcaccgaataaactcagtgccctcgttgctagttatttgttgcgtagtcagtgaaattgaagtaaaactgaaccatgcctagattgctctactcgaccacactgtcatgatctgatgcattccctatcaatttgaacctcaatctaatctttaattatcatgtctgcatcaaatttgaactcatggataccctaaaatacttggattttcttattcattttgatcactcttgttaattcaagtagctgactctccttattagagcagttaacccaaacccaaacctagactttctttcaagccctatatcacttgtgagtgtttgtgaggtcttattccgattaagcttggtagaaagtgttaggttcgtaacgacagagatagtgtctcatgtagttctagttcgcatttttcggactagataggactaggtgggcgcttatactttgggttgggatgtgtttaaaggaaaagaaaaaaaaaaaaaaaaaaaaaaaagggggttgattcattgatgagaaaaggtaaaagactctaggtgaagtaagctaaagaagcagaaaaagtctagtaaaggttttgggatttgtaaagaaaagaaagagttcttgttagctattgaagatgggcaaaagcccttggttttaaaatgttaaaaacaggaaccttagttgttaaagaaatccaaaatccgctagatgtatcaaagtgttgagaaagcttctcctagagttaagagaaaagaaaagaatgattagaaaaaggcttaaaagattcatgaatgcaaagggtagagttgagttcttatattgggattggagatgggattaccattagagcttcatttgatatactctgggtagatgggatcttatctctgtatgcatagcttgtgacttacctttagcattctactaaagcttaatcattttttgagagatcccctgttactgaagcctattctgtaagggaccatctttgtctcttgaccttttaccttagccaaatgagttctttgatgatgcattgcttgattcacgttccagaattaatgaatgttaaagggattggtagatttgaaagcatgtgtaggtcgagtataagagacggattgattgataacaaggcatggctaacgtttttgagtaaaattcaatcatatcgcatcttaaaactaccaacttggacattgattttatttgctctatcagatgctttggttctgagtccccaccttcaaacctctccttcaactatgtcttcttatttgcttgagggcaagcaaagactaagttttgggggagttgatatgtctataatttgcatgttttcagtttccattcatcatcgttttgagtccagtttcgtatcactcatcactgttttatatcatttctcatcattcttgcatactttgcatgattaggatggctttgcatacatattgcatttctgagttgtttttaggtgatttggagctgtttgcgagcaaattggaagaaacgaggcagaaccagaagacatactcgaccaccaggtcgtgtgcatccagcaccatactcgaccccctggtcgagtgactttggagccattcttcccatctactcgacccccaggtcgagtatcctcagctcaggccactcgatgacgccactcgaccccctggtcgagtatcacttcgccacaccacctgacctcactcggctgttcactctaccacgttactcgaccccctggtcgagtatcatcactcaacaccaacaccatcactcgaccgggcactctatcacgtcttcatagtctactcaaatccgcactcaaccagacaagctgagcacaaggaagagaagagaagaagacgaagtgtttggaaggggccaggaccttcatcggatcacgaagcccatctcggcccattatcactctatgggccgggcgattaggttattggcccgtctactatcattttatttcgttttgtataaatagatgtcttagggttctgtcctgagacatctagtcgacattgagtttttgcttcagttttattttctgttttactctggctgcgccgcttttgcttctgcaacctgtaattcgagatttttccaagttattcagattccgcaattgatttcatctgtcatctactctttatctctttacttatgttatattattatttacctgcgtttatgtctttgagcatgttgtctgagtagtgacttagaattcttaaggatgggatagagtagttgtggaatccgtagtctgtagaatggttgagttttagaattgattgaatcccttcaggactagttgtgtttactgcttatttctttctgatcaactggaattcgatcccaagcattctcgcacccaaaagatgttcgatggaatgttaatctaccagttcctgagatattcgtctctatcccaagggattggctgtttggagcgtttattgaagaaaaatctcgaattacaggttgcaaaagcaaaagcggcgcaacagagtaaaacagaaaataaaactgaagcaaaaactcaatgtcgactagatgtctcaggacaaaaccctaagacatctatttatacaaaacgaaataaaatgatagtaaacgggccaataacctaatcgcccgacccatagaatgataatgggccgagatgggcttcgtgatccgatggaggtccaggccgcttccagacacttcgtcttctcctcttctcttccttgtgctcagcttgtttggttgagtacagatttgagtagactatgaagatgtgatcgagtgtccggtcgagtgatggtgttggtggtgagtgatgatactcgttcagggggtcgagtaacgtggtagagtgaacggcgagtgtggtcaggtggtgtggcaaagtgatactcgaccagggggtgatngtgcgtcatcgagtggactgagctgaggttactcgacgtgggggtcgagtagatgggaagaatggctccaaagtcactcgaccagggggtcgatgatggtgctggatgccacaacctggtggtcgagtatgtcttctggttctggctcgtttcttccaatttgctcgcaaacagctccaaatcacctgaaaataactcagaaatgcaatatgtatgcaaagctatcctaatcatgcaaagtatgcaagaatgatgagaaatgatataaaacagtgatgaatgatacgaaactggactcaaaacgatgatgaatggacactgaaaacatgcaaattatagacatatcatggtctgtttggaagtgtagctccggggaccaaatctatgtgatgctgaatgtctcgcagaggtggaagcttttgaggtagctctgtaggaaacacgtctgcaaaatctgtaagcacgttgtcgaaggcggtgcgctccggggaagaaacgtttatagaaactgaaggtagtagtgctagagcgaatccttcggtttttaattctttttcaaacacagagaacgaacacaatagaggagcgtgaacatgaccggtggttgttacgtgcggcttgagaagaggtttgcgagctgttggtggtgacgggtccggagtcagtgcagtatctggtgatggaagtagaacaatattgtgagtttcccaaataaactcataagtattcgcagcaccgtcgtgaataatcttgcgatcatactcccatggccttcccaaaatgagatgnnnnnnnnnnnnnnnnnnnnnntcaaagtatgtacggtccttgtaatattggcctattgagaagggaacgagacatcgatgcgaaacgcgaaaagaaactccatcctgcaaccatgtcatcgcataaggcgttggatgttcttcaaatggtagcccaagtttacgcacaacttgttttgcgataacattacggcaacttcctgaatcgataacaaaagtacaaactgcctttgatggtgcaagtagagcgaaatatgtttgtgcgcagccaatgttcttctcgttgttgcggagttaacccaacaaaccttgttaccaacatgcgtccttcatctcctttagtgatatgtgtttcttgaaacggttcatccatgtcctcctcagaagattcacaacctgtgtctatttctttgccagcgttttcaatcaatagaccacgatgtgtttggttaggacatgcggtttgtctgtgacctggatctccacaagcaaaacaacgcaaggcatttgggagagttgaacgtcgcaattggtgttgagaatcgtcttctttagccatcgggcgattagtgactgaattgagctgctctgtttcctctcgtggtggaagtcccgtgaagttagacttgaaatctgttggtcgtgagcgtgaatatgttgagcttgtagcagtacggaattgttattcaaatgatgatgcgcgcctatgagcttctgatacagtagatggatcaaactgagacaaggcattttgaatctgaacacgcaatcctccaataaaacgcgaaactaattgaacctcacagtcataaatttcgtttcttgtgcaaagaagatagaatttttctgcatactcatcaccagatctagagccttgtcggagattctgtaggcgattgtacatcgtgcgatcataattgtgaggaagaaacgtgtctcgtagtttctttttcagcttctcccaagagcgaatgggagttttacctgtgcgtgatctcgttgtctttagttgttgccacaaagacaatgcatgaccacgaaaacgtgtggctactaaagtaactcgaaaatcttcaggtacacccttaaaatctaaggtttcttcaacagggacaaggggatccataagtgcat

SEQ ID NO: 37673 - DNA, 7073 bp, Arabidopsis thaliana landsberg
taaaacgctcttatcattcccacgagttttagtataaggtaagtctattatatattccaagactttcacggaccacctatcgaagcttacatattctatagacttaataaatgtatagttgaatattatttcactaacgtacgcggctaacaggtttgttaatccttcctatcacatgattgacatacacacacacacacgcacgacacattatttgtattcagtattcacatatacgatatataattacaagagacgtgtatattgagagattcattttttagtgattgtagatcttaagagagagagagagatggagatatcgaaatccaaggcggtgctagcgttagtgatgttgcagtttacgtccgccggagttgcactcttcacgaaagctgctttcatggaaggtctcaatcccaccgtcttcgttgtttaccgtcaagccatcgccactctcttcatctgccccatctctttcatttccgcttggtaagttcagtgtttttgaaccaatctatatattatttatcacatgaattctgactcatttccatgtgaatggtaattaggaggaaagaaaacaaaccttctctgggagtaagaggcttttggtgggtggctttgacggctgttattggtgtgactgttaatcagaacgcttatttcaaagggattgacttgtcttcttcatccatggcttgtgccatgactaatcttattcctgccgtcaccttcattatctccatcattgttgggtatgtatcatcaacatatatgttctaagattctatattgatggattggttatttattattgatattggatgtttgtttcaggttcgagagtataaagaggagaagtatgaaaagtgttgcaaaagtaataggaactggtgtctgtgtgggaggagccatggcaatgacttttctcagaggtccaaaattgctcaatgccttgctcaaccaagacaacacagcttggttactcggctgcttcttccttcttattagcacatttgcttggtctctttggttgatccttcaggttcctattgcctctcactgtcctgaccacttgtacacttctgcctgcacatgtttcatcgctaccatagcttctttcctcgtggctctcgccttaggcaacactcatttaccgccctggaagcttgattccttcttgaagctctcttgctgcatatactctggattccagttggcgatatctttctttctacaagcttggatcgtatcacagaaaggacctgttttctctgccctcttcaaccctctttctgcagtcatcgtcactttcttcggcgctctgtatctaaaagaacagacttacctcgggaggtatgccattttcttactatcctctcttcgttctgtagctcaattcacatttttaaatctgttttgctcgtttctgcagcttgttaggcgctttggctatcatccttggtctctacattgttctctggggcaaatctgaagactatcaagaagaatcaacagacctgaaattggaaaatgaacacaacacttcctctcaatctgacattgtttccattatgattggtgataaggcctttcgtagttcggagctattagaacctcttctcatgtgagttttattgaagtcagttctacatggtgtaagtggaaatttttgacaatggacacttaaagaatatgaaaatgataataacgcaaagtgaaatggaacttcttttacaaatctcactcgtctcaacagatgtataagctactcaatacacaaaagagtcgaaatagaagcacaagcaagtgcttttgtaactcattatgttgcaaatttaagagagaaaatacattgaaattgcaatcccccacacacaagacaagcgatcaacgagttgtcttaaatgctgctttaacttacttgacagtaagatgatgacacttcagatatcttctctggccttagtcttggtttcaaagcattaggatctattaccaactgcgtttcctgttgttcctgaacgcacaacaaccaacagagtagacgataatgaggaatatgaggaagacaatgttgaccttagccacctttttccatgagttcttgatgttgtcaagcagaccagccttgcaggcttcacagtcgtagcagagagttcctggtttgttgtcccacacattacagtcctcgtttttgtatggaccaggagtctttgtccaagtagtcgggttcacataggtgaagttacagtcattggacggcttacaacaaccagactacacaagtaaagcaaacaaaaagtagttagtaaaaaatatcactattatttctaaagactaaatctttctaaaaggctttgtgtgtttgtttccatgggagaaaaagtaagctttttgttcataaaacaaaatcactttttgaggaaaaagcaaagttgaatccatgaatctcatcaaaaagctagattcacttttaaaatcccgatctctaattctaaatcacagatgaaaatttttttaaatcagatcaaaattgtgaacctgaagagcattaagattagatttgtagaaatcttcaacgttaatgctggcataacgagtacgataagtggagcaaacgtcagagtacatcaaacaactcctgatccgttcccaattcttagcattgttgacacgtttctgcaaccaattagagtaatcggcgacatgatactctttataccctcgatccgatataacctcaccggcgccgcggtttgtgactgcgaaagcgaagattgtgaaacagaagccgaggagaatgaggaggaacatagcgaagaggtaaagccagaggaggcaagagacacggcaacaagcaccgacgagtccggcgattgagacgaacatgaggaagattccgagtacgaccattggtttgtcgaggaaacgttcgcattcggttgctgcatttttgccgagccagatcccggcggagagaattgggattgagaggaggaatgtgaagaaattgaggattccgaggagattgttgctacactgaaccatcgctttttgttccggcggaaataaaaatgtgatttttttttctatctccgatttcagatcttattatgcaaaaaaaaagaattgggaactttgtccgttacgaaatctgttgggacttaaacggaactaattggttcttaagacagctagacaactaaaagttaaaatcttttgctatttattgtttacaccctttaagttgttggaagtgacaaaattgtctcgacaaataaaattctgacatgatgaatccaaagaatgtcttgttccaatttatttaattgatcatccaaggaaaaacgattaatgaaagacaagagttatagatttcatgatcatccacacgaccttttttggtctcaaacttaaaatgaaaaagagagattcttgtgtgaatcaaagagggccagggaatgttccagtctccctctgctcattccacttgtcaacctgcgagaagataatcacatatcttgttaagaatgtgagtagctaggtgaagctgacggataataaaaaatgaaagtacaaacccattccccagggcagagagcgcggtagtacttggcgaacctctcgcattcatttgcatcctcaccttttgcagttgtgcacctgcacagatattgtttatgttattgttgttgaagttagagaatgaactgaagagtcactaactctatcacacaagagtacctgtggaactcaatgtaacgggtgaagcagtgcctcgtttggtttgttgttggaaaccgaaaatcagcaggagcagttttcagttcaatctaaattcaatagaaacaccaaaacaaacagatttagacacgagataaaacccttggttttaaaaagcgcgctaatggcgtgccatggcgcatagcgcaccgatgctctaagaatagggcaacaagacgtggaggcgaggcgacatctatgatgcgcacgccatacgtgagccttggccgatgcacaaggtggcaaagcgatcgcctcttgtgttcaggcgaaaactcttcgaaaccaacaacagaattctgtgattttagggtttgcacgaagaaatgactaggaggaataggataaaccattttctaaacctagctggttaatacatgattcaatttaagtggtttggtagcctaatccacgactagaaagtttaaccatgtgttataattagcttatcaaaccaaatcaatcctaggtttatcttaaactaaaacggatttgacccttacctcttaacccacgacattttaaccagttagaagatgtaaaatccctaatttttctaaatagaacaccatagacgatataagcttgaaggctaaaaccatatgcagagaatctgttaatagaacgccacagatccaaaaagcgcgcgctttggtgagccatggcacatagcgcactaaaggactctctgtgccatggtgcgctttgtgccatttaaaactcagataaaaccataaaatttcctagtgagtcacgaagatggagaccaacaataacaacattttcttttagacttcaaagatccatcttttcttctctttcagttcccaagtctactaaaaaaatgccaaaatggtttgacagagaaactctattatacaattccagtcgagcaacaatagaccaccacgcctttgagaaaacgatttgacggaaaatcttccatcacttttctacaattctaatgaactcatatgtctttcttctctatacaaacactccaccagatcatcaatagaggatgagtggaaaaagccagagtaacgagcagctaatttcacatcaaatcgatttccatcaaaaagaaatctaatgggtatcaaagttaacgtaggcatataagaaatgatcaatcagatctcgaataaaggtctccgaagtattataatctccggcggaaaaacagagctaaatcgtgtttataataaatatatacgaaaagatgtaagattacctcgtcctccatggctgatctgaaatgaatgatgagaaactttggttgggtagcaaaagaaacaggagacgcagtcgattgataatatagtttgcaattcgccaacttttctcctccggtgtcgtcggctagaagaaaaagaagcctatgagtccgctttcattgttgggctccaatactaatgggcctaagttcactttacagtttaaaccgattcaatcggttattatcgctctagtcgtttgatgttgaatcttcttttagttcagagagtctgagcttaagcaggtgcgagtagtgagaaaggtgcatcgctccgattctttttctcttcttcgttgaatccgtcatcctccgatcactgaagaggtttccgattacctttctctctctctcattctcattctcaccatgcgattgcttcttctctcccttcgccgtgtaactctattctcgaggcatcaacgatacgctttcgctcccattcataattgtttgatctctatcaatcccagcacatcttcttcatctctatactcggcttcttccttctgttcgtctccacattccaatggagatggaaagattgcagggccgttagtggagtatgaacgcagaatcgtagctggagagttattggatggagatttatgtcaggtactttccttttatggttcattcattagcagtgaaatcgatttttgaatcttttctttttttttggttgcagctaggtacactaagagaacttcagagactctacgacgagcttgttcaatctgctgatgcttgtcgattggatcgttattctgcatctgcaaagtccactaggagtaattggttctggaacaaatttgtgtctcactcttctgtctctcctgtcaaaggcttatacttatatggaggagtaggaactggaaagacaatgctcatggacttgttttttcatcaattgtaagtaggtggtcactgttcatatagtttctacatttttttatggattcatctgatcctgttttaaatgagttaggccagctagctggagaacacaaaggattcactttcacaatttcatgttgagtgtgcatagccgcctgcaagtaaactcccagttcaaagctttattttttaagcttaggcttgcaataatcattggactcaattctttgtgtatttgaatatcctctgtagaagcacaagggtcttgaagatccacttgaagtcgttggcctggaaatagctgacgaggctatattactatgcttagatgagttcatggtatgtctttgtgacgctcgtctttattgttttaaaatgtgttcagggaaaactcatgtttctttattgttcttcatgtataggtcaatgatgtagctgatgcactgatactaaaccgtctctttagacacttgtttaacaatggcattgtaagtaatctataaaacctttctttttctcaactcttctagcctactggacctaaacctatagttatttaaaagtttttacatgtcggtaattggagaaaagtgtagattcttgttgctacatcaaaccgtgctccagataatctctatgaaggtggtttacagagggacctattccttccgtttatttccacactaaaggtatacaaatgcaaatgcatgtcactatcaacgctctgaagaacttgtttcatgtgatccattatgcttcgtaactgatactgagaaatgatttgttgtaggaaagatgtgtcgttcgtgagattggctcatcggtggactatcggaaactgacctctgtacgtgatttcacgtctctcagtaactgtcttagttttgttgcaaagtgattacaatcttatagctatgtattcttgggtgcaggctgaagaggaattttacttcattggaaaggatatctcaggccttctaaaacagaagtttcagctgttggttggcgatcaaccggctggtcctcaagtggttgaagtagtaatgggaaggaaattgcaggtttctttgcttcttctttcacagatgcatcaatatgcagttcttcacga

SEQ ID NO: 37674 - DNA, 2212 bp, Arabidopsis thaliana landsberg
ctctttacaaacgaatgcatttgatgtaagaaattgtatttgaagacttttacaccatgaccttatatactagtatctatcttcttaaccacaaatgagtgattatctgtcaaattaaagcttggtaagtttgtgattatgcattaaaattgatagtctttcataacttttgcatttactcgagtacacaaactttcacatgtttaaataaaaattattttatagggtttagtatttttttgcaaatgtaaacgcaaaactcaagcacgaacatagagtactcattgatttattgttggcgtttacatttacaattattaaaataaaagtggtcaacataattaaagttgttagatcagtcattaaaacggcaagatgttctaaagagtaacattgaaacaacaatagtttcaagtatcaattagtcccgcggcgtgtggcgatggcgcgtggtatccgccaaaaacccttcccggaactagaaccctaacttctctgcaagtctctctgttctagtcacaattcactgaattaaagtttgaaaacccatgatgaaatgttgaacctttccaatttccatggcgatttcaagtgtgggttttgcatgcagatccttttcccctgttcgtactctccagtctcgctgcttatggaaggtgaactatttatatgaaccagttctacaatttattcgattctgttatatatttttactttcttaattagattttttacgctctcagatacggttcaacactgttgctgctgcaattgttacattggatgagtcagatggttttgccacggacagtgatcgtcaagacaaggtttctgatgaaccaagtaagcttaagtccataattgaactggaattagtcatcaatccattgttcctactcataatgttagggtatcaactctgttcgattttggttgatttggaaaatgaaggggatcgtgagtggaagcaactgaattcgaaagatcttggactaagcagctcaatgattgcaaaatccacaagaaaagtgcttaatggccttaaaagcaaaggttggtagtttcaaagtccttagatttctctaagtttcgaaaactttgttcaaccatatctcatactgcttctgtaatctgtaggacatgatgtttaccttgtgggaggctgtgtacgagatcttattctgaagcggacaccgaaagacttcgatatacttacctctgcagaacttagagaggttggtcttgttctgtttttttcttttcttactgtcaacataatttcaatctgatttggcattgttaacgtttaggtggttcgaactttcccaagatgtgaaattgttggaagaaggtttcctatatgtcacgtacacattggagatgatttaatagaggtttttttttttttttttaatctagtctttctatttctttcgagtacaatgtatgcataccaataggaaaagcttttgtttttggatttcgatttgtttttgttgtgttttcatagactttcttttatttgagtaggtttcgagttttagtacctctgcacagaattcttcgagaaatacgagaactgaatgcaaagaatcgagtggctcagatggtgatgaggactgtatccgtttgaataactgtttgcagcgtgatttcacaattaacgggtaatcttgttatatacttcagtggtttctttttgaatcagtagtttggagattcttataaattttcctatctcaggttgatgtttgatccatatgccaaagtcgtatatgactatttgggaggaatggaagatattagaaaagctaaagtgtgaatgtattctactctaatttgctttcagatttatctcagatcatttttggttatttacatgtattctaaatgtggttctacaatcacaggttcgaacagtgattcacgctggaacatcttttcaccaggactgtggtaagtttgtcaaaagaaaatcaagaatttttctatgcaacccattaaggctttatataatgaaaacttatcaagcatctataatatttccagctcggattcttcgtgcaataagaattgctgcgcgtttaggtttcagaatgtccaaagaaaccgctcattttattaagaacctttccttactagtaaaaaaacttgacaaggtaggctcacattactgcatctatcctccaaagaaatatatgcttggtatatc

SEQ ID NO: 37675 - DNA, 1484 bp, Arabidopsis thaliana landsberg
tacatttgatatgatataggaataagccagctttaatttggctcttggtgaaagaaaaaaacaaatatttaacatttttcattctttcttaaattagttgggaagattcattaggttttcactatttttagctccgtttaagattcataggtttccactatctttggatcggcgataaaaagatgatttagccggaggatttataaagttataataatcacgtaccacttgatttttaagagaaaataatagtaagtctagaaaactactaaagcaaactattgtgaggcattactttgttgttatggtttttttgtagttgattaccctcgtttccttttgtacttttgtgaacaatttcaagtgttatatttcatatgaatcattcagacgaaaaaaaaaagtattgtgaggctaagaaacacctttaatgagccataaaacattaaagtatgatacgaccagtaaggaaatacatttgaagaaaacgtatatatcatcattatcatataaattttacaatttgaaaaatgattataatgaaaaaaaattactcaacggttttcaaactttatggttaattaaagatgatcaacactagctagtatgattaatcttgctggagaccaaaaccagttgcatctgatctcttcacgatcctcagcctcttgcatgattctttaaacatcctgccgacaaaaaaaaatttacaatttaaaaaataaaattacaaatttttgacttgtaagaggttaattatattcattttggtaaatttgataattgagcattgtaatgcaagctaaacataaacttactgccaaggtacatctccgacgagcatccagtctctatccttgtcttcgtatataataatgtattcacacttcttaccctccttcgccactcctgcatagtttatatatacatgtgttatatttcataaagttccaactaatatatgtgttttactctcttcacacttccaatatatatagaaaccctaacaatacgtatatataaagtttatagctcaattataaacatggtcatgtaactattaactaacgttacgggaaattagtccatgccattactaacctatgccaagacagccgaagagattctcaagaaccgtgactagattaatataactgttgctcgaaccaaggtcaatcttcctcatgtatggcacaccatccatgctcactttcacgtagcctatagctttcgatgcttcctcattgttcttctttctcctgtaagaacacacaggtggccatcccaccgcttgactcttcacaaccggcagtgattcatcttcaactgatgaaacgacgctgttttcattctcagtatctaacgctgatgaggtcatcatatccgagagcaccctcttcttcttcttactcgatccgcatactgatatttcgctataattatctcctggaagacccaatcgaagctctggatctgagtgcaga

SEQ ID NO: 37676 - DNA, 4053 bp, Arabidopsis thaliana landsberg
  unsure (1)..(4053): unsure at all n locations
atgatagcattagttcattagcttcctatgaaaaaaatataaagaagttctgtcaaaatgtcaaagctaattgtacattgacgtattagatcgttgagcatataagaagaagaagaaaaaaagttaattacctgagaagagaactaccaaaagcatgaaataagaaaataatttcgtagacatggtgcaagacttattaattatcgtattatttcttatgttgtatgtaaaatttactttattgttgtcaaatagtttatcttatatactacaagaggaaaaaaccttaatgtggtaggtaaactatatgggtaaaaactattgattttttaacaaattttgatagtgttgactatcaaaaaatggagactatatttgttgaccaaataatttcataccaattctataaacactatatattatgtcataattcatacaatataaggggtgagaaaagtgttgactactttttatctaacatatttgatattgtgttatgttcgcatagataaatgagttttttttgtttatgatttttaaatacaagtggtttttggtatacgtccaagtacggacaataatactatgtcgaaattttcaaaacaaaatctaatttagatattatgttttcttcatggaataagtaacatagtagtatgacgtcaaaattctctatttgacgtctttcgactttttgttttcaaaacggcaatgtattgttaaaagattaaagtacatgcttttgaaatgttaacatatatccatctacaaaataaaatatattgtttgtgatgaaatattctaaaccggagcatgtaccatactcgcctctgtacgtcttagatgtctgtaacataagactattatgctcaatgtatgtaaaggatgcttaatataattgttagccacttgtacgtacgtctttcgcgagaccccgaaaacaaattgcgatggattgttgatgtgttcatcatgcaatttaaggcggggctatgtgtacacttcaggtcaaaagaaaaaagaatatcaaattttaaacttagattttaattctatctaacctactattcaaattgtttaagaaattactccgcttactcacttaagaaacaaattaaatttagttaagataatgtgaccaattaagaaaataaaaaaggagagattagcataaagagaacatttggtgaaacaaagtgtgtaatgaaagagaagcaagccatttgccaaacctatcttatcaatatcaacaacataacatgacaatgatactaaggtcctttcttttatttcctctcatatgctctcatgtggttcttgtctcctctcacgtggttccaccaccaccttcacatcccttcttattcccattgacaccataccccacacctctccatcattatgaaggatgttatcctcgaccaaacggggttagtcttggtcagcccatcttaatcatatcccggttagcggactctacgggttggtcaggtttaaccttgaatgacaaacttgtagttagcctacataataagacgacccgttatgcgggatttcagccaatggataaataacccaaccgagaaaaccgaaccggattgaatcaagattttcagttctatcggttgaacctctaggaagaactttaattttgcatcgctaaacggaaaattttggttcggttcggatcgaaccgtccttaggtatttttgttttaataaccagattataccaaactgagacccgttttcaccaaatttttagacttcttttaactgttactagagttttattgaaccaatttaaccggaaaataaaaccaacttcagccaaaaataaccgatttagccggaataagaaaatcggttaaatttggttttgaaactcttaaccaaagctaaccaagaacaaaaacaatcataggcgatataaccgaaccaaactgatccaaaaaccatagtcacatgccaagatgataaacttcaccaatattattgatactacattgcatttccgagagaactgctatttttttttttttttgacaaatttctatgtttcttttatccttgtgtaggaaaacattaagatgagagagtaaagggagagttccaactttgtttgcttttatagatacatcaataattggcggtgaaacaaatcattacaactttataatacagttgaggcaattttaaatcaagcctcgacattcaatagtgctattgccatgtataatgcaagaaaccaaaagaagataaactttagtaactattaacaccggcgaccacctctgcaattaagagcaccggcattgtaggtaatgacgccaacaagagatgatgatttggctgctaaacttgaagctctagcgtagctagctccaagacctgatccagaacgtgtgaagaaagctccgtttaaaaaaagatctccttctgatctccaattccaatgcctccattgccattgccctgcatagtctctctttgtcacctgaaacatcccataagtttttgctgtaagaattttgttgaaactgtaatctataagtataagggttatagtttgacactaagtcaaaagtcaagaaagatcggttctttatttgacctagtcgacctaactcttgaaagtacctctttagcaaaccggtttcttggggcgagatatctatttccttggctgttaatggtaggactcgcactgccaccgatcgcatacatttcccaatgtgtatagtcattgttaactacatgaaaatatccatgcctacacctgcaaagagaagttaatcgcattgtcataagcacaaaaacggagaatactcaagaaacagaacacaaaagcagagcacactctgttttgttatgtcttttatatatacctcggcattctttgaataagtccgacttcaaaaagattgtaagcaatggacacttgcatagctttgtccctcatgtacgaggcactatgtcctagcaacataacctgtaaaaaagtagatcaaaccatatcatcaaaaaccgaattcagccaaagaaaagaagcaattattaactaatgaaacaacaagtcttgaaaagaacctggttatggagagttaagtggttgttagagatggtaatcgcggttgagcccatgactgcgtccacaagcccatcagcgcaatgggacaacgagatatgatcaatccatacatgactcgatccaaagatcgaaatcgcgtcaccatctgccattgtcctccacccaaaatgcgtttctgagcttctaaccatagcgttacccgtaggcttacagtcatggacatgaatcccatggacaataatgttcgtaacgtattgaatcgtgagacaagctccattagcgatgtgaacattgacaccacgaccatcgatggttttgaagctgttcatgatcagctcttgcttcaaggttataaccatgtcgcgtttgaagatgatccagagtggttcgtcttgaatcacggcgtgacggagtgttcccggtatgggatnnnnnnnnnnnnnnnnnccagggtcggttacgacgtagaaacgaccgtcgcggcctccgattgcgttgcggccaaatccgattgagcaatcggctaaacgtttgcgacggagctgccatttgcggtcgcaacgccagcaatcgtcgattgggttgccggtggcgcaggagaagtaacctaatcttctccgctctgtgctgtttcgaatgctcctgaatgattcatcaaaaaatcgaacatcaaattaatttaggggttatggaaattatattatgtgacttgtaattttgtttaattattaaacagttagttgcttgatttattatttttggcaaaattttagtaaatgattcaatttactgtatgagttgagttttattttagctttttctttgtgcaaaatatatatatatatagcagtttctacttttttgttttttttgttaccaattttttataataaaaatttcatgttgagtttggtttgtaagtttttaccgaaaataaaacaagtaaataagatattgtagaag

SEQ ID NO: 37677 - DNA, 1414 bp, Arabidopsis thaliana landsberg
ttttttaatgtttgctcttctttttatgcatcattcaataatagagaggtcatagtaacagaaacaaatgtgtcagagactatgacacaatctcacttatgtcaggtttctttggattcttgtaattactacaatgacctgtgtgtgactctgtattacgtggataccattctcttctgctttgtggataccatcaaactaagcacctttttacacaatttgaaagctcattgttgtattctgctttgtgaaatttgcagaaaacttgtgcgatatgtttgacggcgatgaaagctgggcaaggccacgccatcttcacagcggaatgctctcattcgtttcatttccaatgcatcactacgaatgttaaacacgggaaccagatttgtcctgtttgtcgcgcgaaatggaacgagattcctattcagagccctaatgctaagcctaaatctggtgtcaaccgatagtcgaccaagggatgatgcctggatgtctatacgccaaggaggtcgcccctattcaatatacttcacggcctgactgtctaagggtctcctcgatctttaacaccgagcctgcggtttttaatgatgatgaggctctggaacatcaagaccgttctgctgaatctggtttggataaacctggtgttactgggacattggaagttaaaacataccctgagatttcggaagtagtgagagcggtttcattcaaggattttgctgtactgatcaatctaaaagctcctacttcttcaaagtcctcttcaaatccatcttcgtcttctcgggctcctgtcgatctagtcacagttcttgatgtgagtggaagcatggctggaacaaaactggcgttgctaaagcgagcaatgggttttgtgattcagaatcttggtccatttgaccgtctctcagttatatccttctcctccacagcacgtcgtaacttccctcttcgtctcatgaccgagactggtaaacaagaggcgcttcaggcggttaattcattggtctcaaacggagggactaacattgcagagggattgaagaagggcgcaagagttttgatcgatcgtagattcaagaacccggtatctagcatcgtactcttatccgatggccaagatacatataccatgactagccccaacggttccagagggacggattacaaagcccttcttcctaaagagatcaacggaaaccggattccagttcacgcatttgggtttggtgcggaccacgatgcttccttaatgcattccattgcagaaaactccggaggtacattttctttctgacagtctcatgcggttatgcgggaaacattagaacagtgctttagaggtcttcttagcgttgtggttctagagctgtgagtaaggattgagtgcaagaatcatctgttgagg

SEQ ID NO: 37678 - DNA, 6292 bp, Arabidopsis thaliana landsberg
ttaggggtgagaatcaagcctcatcaaatcaaattatggatgggatggggttcgaattaaacctgatgttaccccaacaaaactgaatttcttctaagtgaactataccagttttattttaactaaaacggtaataactcgtctgtttttattctttttcttttcgaccggtaataactcgtcttctagaatcaaatcacattaaagaaaatacatttatgtcatgtacactgaaccaaaaccaattccatatttggataatttgatttaaggcctgctttcacaaaaataatccaaaaaaaaacttgaatgctaggcctattatgaagaaaactactttagtttctaagctgaaaggccgttacttcattggtcatcaattgatacataatgggcttgaaagtgggcctgaattggtctatgacgtcaacccacgtgatctatgcgtgtatcttgattattaaaaaacccgaaaccgaaataaccaacccgacccatctgatcaccatccgttaaaatctttcttacgagaatcttcaccgttgattgcaatgactttttaaaagcttccgagtcaaagctttgataatcataatatgttgtgagaaacaagtagttgcatcataataaccccttttgattcggtaagccattagagacctcagaagaagagaagtttttgattcttcgtcgagactttactcgattttgcatcgaagaagagaggaagaaaaagtgaaaaatttcagggtttcgattttgggtgagagataacaaaccctaggtgttgtgtaaatcgtgatcacatatatgctttttgagtcgacgattagagaagacgaagaagagtagcaagcaaacactatgatgaacacttctaatggaatgatatcagcgccatcttcgtcgtcttcaccggcggcgaatcctcagtcgccgggaattaagacttatttcaagacgcctgaagggaagtataagcttcactacgagaaaacgcattcctctggtctccttcattacgcacatggcaaaactgttactcaggtaaagatcaaatttttatatttgggtttaatagtttgattcgtcattaggatttctaatcattcaaatcggcaatttcagagaattagtatcgatcgttaaatttttgttagtgaaattttgcattttgatgcactagttggttagctgatcaatcgatttgaatagcattgctttccaatgatggaatttggaaattttcgttttcaggtaactatagctcagcttaaggaaagagctgctccttcgactccaactggtacttcgtcgggttatagtgctagtagcgggtttcgttcagcaacagcgaggttgctaggaactggaaatgggagccgtgcgcttagttttgttggaggtaatggtggcggtaaaagtatgagtacaagttcaagaattagtggctccttcgctgcttctaattctaatacttcgatgacaaatacgaattttgatgggaaaggaacttacttggtcttcaatgtgagtgatgctatttttatctgtgacttgaactcacaagaaaaggtaatttcttcttttctttgttttccttttagtgatttggctgtaatgttctgctttttgttttgttttggaagtaatggtttaggaaacttctttgatgtaggatccagtaaagtctatccatttcagtaattcaaaccctatgtgtcatgcttttgatccggatgctaaggatgggcatgacttacttattgggctgaattctggggatggtaatgtagaaatttgagcttaccgttttcaccgctgatctagatgccttgtctcatggatttattttgttatgatgtgttattgtagtgtacacagtatcactgagacagcagttacaggacgtctctaagaagctagttggtgctctgcattataacaaggacggttctgtgaataacaggcaagagtttatctttttccgtgtatctttaattttccttccatctttttcctttactattatttgttagtgaaacttgaagaattgattccactggttcaagtgattccgctttcatgtcttggattgagctagtgaaacttgaagaattgattccactggttcacaatacttcacatttactttgtctaaggatctctatgtgttcttcgtttgtgcttgtgctagtatttatgtcagcgtaacaaatttatataagtttctgtcattgtaatagattgtgttctaggaaactctcagtgacagtagattagttaaattataacagaacagtatgtttccttagaggagttcgtttttaagtaggttaagttgaaacatgaatcaattttggcgtcatgactcttgccttctctaagtttaaaataaagtttgttgctttgtaacagtcgttgcactagtgtttcttgggtgcctggaggtgatggagcatttgtcgttgctcatgccgatggcaatttgtatgtgtatgagaaggcaagctcagatatcagaatttgttttcttgcatatgacttttaagttgcctgattttgtctaatccctgatcctgattaatttaacttaatagaacaaagatggtgccactgaatcaacatttcctgctataagagatcctacacaattttcagttgacaaggcaaaatatagcaaggtatgtgagtatgcaaccatttcaattgatccttatataggtgcgggaagcacatggtacatgcatatcctctactagtatcatcatttgctagtggttataagaaattattgtattacatactttcttttctatctttgagcatattttgatgtactattgtttattcatatgagtattcatgcagagtaatcctgttgcgagatggcatatatgtcaaggttcaattaacagcattgcattctcaaatgatggggcacaaaaggcaactgttggaagagatggtaagatgcgtctattatgtcgtgtgttctttttctttctctatgtatttctttactaagcagtaaacttttttaccattcacaggctatcttcgcatttttgacttcttaacccagaagctagtatgtggtggaaaaagttattatggtgctctgctgtgctgttcttggaggtgatgggatataattcctttggcaacttttcttataattgaatttacaaaagttatcttaaatagataccagtgttgtgagcatatcacccccgtatgatactgtttattgacattgtgattgtattgacactgacagtatggatggaaagtacattttgactggaggtgaagatgatttagttcaagtgtggagtatggaggatcggaaagttgtggcgtggggtgagggacataattcgtgggtaaggttcttgatgtcaataagatttcttttatttaacttacacagcacttgactcatgtcggaatggttgctctcaggtaagtggagtagcgtttgattccaattggtcgtcaccaaactcggatgggtcaggagagcatgtcatgtaccgttttggatcagttggtcaggtatttcttcataccttgacccattttgctggtagtcctttgcattaccaaagaactgaaatgtgtttaaactacgggagttgtgcgtagcgtatctatattgcttgattggctttatcattcaaccagtgatctcattttcttatcattttaatgatgaggaaaaggaaaaagacaatattttataggagataggttcttaggatgatcagaaaataaggggaaatcgtagtagtgtagtttcatatggtctgataaagattcgttagcatatcaaattgtagataacgatttgttggtctgctagttagaaactttgttagaaagtgaagtgtttcgtagtatgaagcagccttaattaggatgctaatgagatcatttccacaaacatgttttctgaaagtcttctttttaagaacttaatttgctattaaaaaccatagactcctacgatttcagtctcttgattctcctatatatgatctgcaagtgtcttgcctcatacacactgctgctttcttctgctgaatccccaggacacacagttacttctctgggaccttgagatggacgagatcgtagttccacttaggcgagctccaggaggatctccaacttacagcacaggaagctcagctcactgggacaatgtcataccaatgggaactcttcaaccggctccttgcaaacgcgatgttccaaagctgtcaccgatcatagcacaccgagttcacacagagcccctctctggcttgatgttcacacaagaatcagtcgttacggcttgtcgagaaggccatataaagatctggacacggcccagtgaatcagaaacccaaactaacagctcagaagcaaatcctacaactgccctcttgagcacaagcttcacgaaagacaataaagcttcactgagcagcaagatcatcagtggctctactttcaagcaatgacagagagatgctacttgtctgaaaatcaatcaggtgctattatttagtcatgtttctccttctaaagtgaaagaaaatctttaaagaaaagccctgtgaataaaattcgactgggttttgtttttgtttttaatattttaaaagaaggatcaaaatctgaattctgactgtaaattggaggctgacaaattaagtttgtgagaggggggaggggcatagaagagaaaatatgggagaattttcggatgtaattataagaaagaaaacaaaatctgtttacataataagagtctcatcatccaataatgcaacttttgtgcttcagaataagaatgacactctttattttcccaaataaacgattcctgctctatttattttatttggtttctcaaacttaatattcttttcatcaaggatatgttatgtatactacacaacaccaaaagaaacaaagagtttagtcgttgatcgatcttccaaaagatagtctttaacaaatgtcacagtaaaaatcagcgaacccatattccaaagtcacattgcaatatgattttgtctgagaggcatattttcttatttgtttagttacaaactagtaattttatgtttaccttgtactctgcgtagctttacacgagattgttttaacaattatagacattctagtcaatgatattcgagtccactgttaacccggtcagtgtatgtagaaagaagaaccgtgacacgaccgacaagagataaaatcaagggaattatttggcatattcataattcattgctttgtccattcctctctcttaaatcttaatcatacctttttttttttcttataacgtggcgacattaatgatactattacttttacttacttagatacttgacaattaccgtaaaaacatcatctagtatatactttgtcgctgtctcacgtgtatatgcgtcagaaaaaaccttattatgtgtggttaaaatgggaggatttgctcatcgagagaaaaaatgattctaaaaggaccattcgagaatctctagtttcttactacatccttaagtgaaatttgtatgagtttacttctctccaatttaaacattcgatgtggtgtaggcaccactcgagattcaagacagctggaacaaagccgataaatgttagaaatattctttccaataattttattttacacacacgaaaatggaatcggatggcgttgatatcttgaagcgtcggtggattggattcactctccgaaccctaaactatactctttaatgagcatgtacattctaataaatcgcttgatattattattaggacataaatgtgaatatacaattattggtccatttctcgactggttattaaatcctttacatgcaggttgaaaatctctacttttaagtttttttgtttgtatatacaaaattgtaaaacagacatcaattatttcttaggattagtcttaattagtaatttttacggtcttaaaatgatataattaggaaaactaattcgattataaaattattggtccattgggatttgtaaaaaaacactttaccgtatcttatcatatcaaacttgtcgattactcaacgcaggcttcggaactaaccacgtggcatgatgacgtcatcacttctctaactctcttcctcgtcccttcgcagttgtcactttattattacttcacttgagcttctctcaagatcacagatctctcgttccttctgctcccaactctctacccagattccacctttaccttacgaaacct

SEQ ID NO: 37679 - DNA, 3710 bp, Arabidopsis thaliana landsberg
ttcttcatctcttttctcatgcccttttctccatcctacttttaaagctctgtttcaccatatcttcgtcaatgaaaattgcttcggatctgtttaaattcgattttgcattaaaaactttcaataaaaatgacaaaactagttaattttagttgaagttatatcatcttagatataccaaaattaataacaatttcttatcagaatccactacatcatataactcacacaaaacatcaaattctatagaaacaatatctgcaatattacatatggcacctagatattgtgtccggcctaataaaaagctgcatgaaatttgtatattaatgtatcccatttttatgcgccagagatgaatcgtcaaaaagtcaacagaatcactagattcgagaacttgacttgacgataagcccaaaaatactcaaaagcttcgagccaccttctcgtacaagtcacgaggccagttccggtgcgtgttgcttgcaagaaacccagcaatctgcgcaaagcagtcagaggctcaagtttcatgacttttttaatagattcattcaaccaaactttatgtttttgttcattcatgtaccttggatctcatggcacggatcgacccatcagtgtcaggtacattgtccagacacgttagagcaactttgagcaggtccgggacacaagtctggaagtaaggagatgcgctctggaacacatcagcggatgcatcgggcattcttggatcaagatgaagaaatggaaggtttgcagttctctctcaaagcatacagatgattgcctaatctacccaacttgtggatcgataatattgcctcaagctctcttagtattgtttcttgttccataacaagatgtctttcctgggcactgtagtataaaagaatgacacttccagtgagaacctccctattcaacaactacaaaacttaagacaagtaaatgagttagtccattgaagtatgcaatttacctgacatcagggtgatatttgtaagaattgagaatgtcattgcccgagagaacaagcccctctgttcggctttcaccatctggccttccacggacaagggagcaaatggcttcagatagacatttgtttatcgtttccaaggcagacgaaaacgcaccaactctcttctgtagttctattgactgcattaaataacaaaccgtaaaaaaaactgaaacatggtaaaagaaataaatgattgatatgtgaaagcactccaattgaacaaagaaccaacgaacagtttactaaagcatgtttagagtaattagtgtatggtcaaaaagcacaaaagatacttacattgtcatataatccagcttcttgacattgatgcgcagcttcgatcaagaactgctgcctcaattttatatcaggcagaaatcttccaagctcgccttcttcaccggaacctctagcaccaagcagaaagtgaataccatcctcttgtaacaaaatctcagtcagtagttgcttcagcatcaagttcctttgcctttgttgatcaacattacttcttccagaccaagcctgttgacccccacctactgcaatagcagcttgtgcatagtattccagcgtcatttgcagatcaccatgatgcaaatacatcgacccatattgcctaatcatgctagatgcctcggcattagcatccatcacacttagtttgcgcccagtcccagatccttcagagagaatggaatggtccactagcgatatagctacatggacagcatcaatgttatacccttcatctccagcttcgttggacatgtgcatgatcgccggtagtaactgaatgctaagaagcaaaacatatgggtataccagagggtctttcccattcttagtgtagtaagatggctcaaacttattaagataggcctggagatcatccaaactgtatggcactagcccatcattcacgatcatagatgaagatccaccagctacgtcacgtacacatgacagtttgaaccagagaaaatcttctattgtgttaaagagggtcgaaaaatctctcatgatgcgatcaatttgtcttcgggaaccagatatgatagtgtagagtagaagcttcttcttgtcatatgttgtttggccaaaccgatcacccatccttaacaatttctcacattcctcagaagcagtagcagcggtttgtgcagccacagtaccacctgttgtaatccactctgtaagctgccaaaaaaagggacatcaaaaaggcaactccaaaacattaatgtgggttattaagaccaaacaatataccagaggagcaaactgttgttgagatgaccgagatgactgggcaatttctctagcttcctcataataaccagttctcaagcaaaaatatatctgtaatcaaagaggtatatttaatcaatctcttacgttaagaaacttgggggaacagcaataagaagattctactgttcaacttgattgttgaggacaaactgaaaatttaaagcgtgagtgaaaatatgtgaaacctgctgccaagtagtatcaactggaggctgcctacgagcatcaactgaatcaaagtccaaactcccataatctctcagacgaatctgcgcagtattgaaaaagaatcaagaaatgcaaacaaaccaatgtatatgattgccacaaaataatattcctgtgtatatatgcttcgtgttaagctttattagatctgtggcactcacccgaagaaaagcacgaattctttgcaaatttccaactgatccaccaagagcagcctagaaaaagattcaaaggagaggatagaaacatgttgtgattattgacgcacttgaactcagtgaaagatcaagggcatattttttcaagaaagcatccttgaagttaagaaagtaattaaaaagatgcatcaagacacatgtaacatgccttaatagcaattccaagcaaaactaatacaaggtagaaacgagtacttgtgtaggatgactttgaattgtatccattatatgtttcccatgcccacattccaagtggcgtcttgcacctatcacgagggccatcttcttggaaacaccatgttgtactgctgactcttcacccgtcattccctgttttataaattgttaaaagccttggaaatgtaagaacagtcttttaaggtgccactggtaggaaaaggaatcttccaatcaaaagatcacctgaataagctgccataatttttgcatgttgactgattttccacgagtcaaatcaatttctagactttcatatgcaccgttgaacaatgttgcaggctatacaaacacacaaataataaattagtaggaagcagagttaaacaaatgagtacaaggtcaactagttagattaatgctgaacaaaaggcacttatcataaaaaggtgaagggtttacatatatattataggtttagcttcacttctaagagcagtaacaaaagatgcagaatttttagctacaactaccaatattataggatttacaaggaggtcttcgaaggtcatcctttaaatggcaagcctcgttctcttgcagagtttagttttttcacaacctcggcatagacatatgcctttttctcatgaatgggtttgttagtcataaaaacgagttccgaaccaggttttgaagatacttggggactcaaaggcactagtgaaccagcatgagagcct

SEQ ID NO: 37680 - DNA, 6076 bp, Arabidopsis thaliana landsberg
  unsure (1)..(6076): unsure at all n locations
gggacatccgagagttcaggagcccaacagacggggaaactagaatgttttatgaaatcgtggttgctccaaagtatactgctaaaggtcttgaagtcctcaaagggaaatcaaaaactttgaggatcctcgaagctaaaaagaatgaccaagggaaactatcgctcagacaggttggtggcggctggttggctcaggactcggacgatttaactccagaagacatcagcttcaattctgtctcagacaaaactccgactgaaagcgaacttgcggatgcaaaatttgcctggctctgcgttaagcatgtcaagagcaatgccattgtgatagcaaaggttggattttcctctctgattccttttcttgtttctctttctgtacttgtttgctagtagtttattctgattcttgggttggctcatagaacaattgtatgctggggatgggaagcggacagccaaaccgagtagagagtctgagaatagctttcaagaaagctggggaggaagctaaaggagctgccttggccagtgacgcattcttcccattcggtatatatatttttctctccgaaaccattcttctgtctgaaatgactcatcaatcaacaaatgttagccgttctgaattggaaatttgttgttgtgtgaattgcagcttggaaagatgcggtggaagaggcgtgccagatgggaataggagtgatagcagaacctggaggcagtattagagaccaagacgctattgattgctgcaaaaagtatggagtctctctgctcttcaccaacgttagacatttccgccattaaggacacatccctccagttttgctcttataaacacatccaagagagtttctgaagaagaaaacccaccaaacaaaacacaaagagtgggaaataaaactgttgtaacattaatttggattgcgttcgagtttatgtatgattagaacctgagagctgttcctacttataaatttgacatttttcacccaaaatcatatctttctctacatccagaaactgatgagatttgcatataaaatattcaacatttctactcaaactggagtgagaaagtcgacgacagtgtggagagagatcagagatggcgacagggaaagtggtggtggagaaagtggnnnnnnnnnnnnnnnnnnnnngctgcttctcgaagtatcctctcaagttcttactttctagcttggtctcctctctctctctacgtagagttcacagtttcgaattttcaatctttagttattaaagttccggcgacactgaactttcaggcagctcctgctggaactgacgttgtctggatttacagtatcacttatggtggcggcattgtctctgtatttccctatttctctgtctctttattaatgaatttgccatcgatgcgcttgaatcaatctagttcttgttcaaattatgtagggcgattcgatttcatgtgaattcacaattggtgatggatgcactgcagttattacaacgcagtcttctactaaggttgaatcaatttagggcttttctctctctttgcaatggacactaatttcatcctacgtggttgactttctgttgatggatcttgtgatttcacacaggtgtacaaggcaataggatcaaagtgttctgaacagatattggaagtaatgtttctttcacatttctactaaaatcattttgagctttcttagtagaacagagtgctattgcaatagaataggaccattttctttgattcatgttcctgattgatctttcggtttgttgtgtgcagtaggcgagaatcgggagtgaagctcttttggttgtgataccagatccagtgacttgcttctccactgcccggtactatcagaaacagatctttagattgctttcagattccaatctggtccttgtggattggatcacaagcgggcgtcacgctaatggcgaaaaatgggatttcgagttttataagagcatcaacaacgtctacctggaagatgatcaccctttattccttgacacagttagttaaaatctcatacccactttcagatttgtagagaatggtttaccttaaaccaagtaaaatcccgcttgcaaatcgtgtatgaagtattgatagaacattcatgagcgtggttagaccttcctttggtaatggtttattcattgcaggtgctactagagaagaggagcatccaaagcatagccgaacggatgcaagactatcaagctatagcaatggtcatactcttcgggtatgcaattgcaaaacatttagaacacgttttagagttggtagtgctctctatgagaatttggatctttgctaaatatgtttgaaaatggatcaagggcaaagctgaaggaaatccaaaagcaagtccaagaaaatgtgaaaaacatgatgtcagaacaattacagctctcttatagttctcggagacacaagtctgagtcaagctctcgtaatcgcttcatgaaaccagagtttatagcttcctgtagcactttcggccctgaggttggtatcatcctttctttccacttcctacaatcaggaaaccgtgaaccatatatagctttacataaaactagacaatattaaaagactgtaaatggctaatcaaagttgtatatgttgcagggaaagggagttgtggttagaatagcttcggattctacagagtctgtctacaattttttgaggcaacaattggctgagcttgaaccagttcttggtcaagctccttatgcttgactcttttttcttcttcttttttgacttgactcaaaggtccatacaattgaaatgaataaggtaataggaaaccaaatatcaaaatatgatttgtcttgtgccaaacacgacatacaagccaaaatgagcttgttttgctgcaaaagtcccctattttcaaagttcacttataacagggggtcactttgtaataaagtataaatattatgggtcactttgtaaaatcagtgttcttccgagagtttgttcttcctagcatacaatgttttacaaacgccattgacgaccacgacaggagcaaagcctcagtttttgacaactcgagtatctctgagaaaaagctccttggtcgcttcaacacttgtctttccctattatcgacctacgcagtaaataagattacttattgctatcttttagctgatgcaatctcgcgcattgtcgcgcctgagaagttactacaaaagatcatcggtatttcccagctcagacaatgaccgatccgtgcaactatttaatctcgtacgttcgatttactcttccagctcaagaccacgtgtgccacaacccgaatggctgattggggagctgtgcaaagtaggtaaaattgcagaagcacgcaaactgttcgacggattgcctgagagagatgtggtcacatggacgcatgtgattactgggtatattaagttaggggatatgagagaagctagggaattgttcgatagggttgattctaggaaaaatgtggtgacttggacagccatggttagtgggtacttgagatctaagcagctttctatagctgagatgctttttcaggaaatgcctgagagaaatgtagtttcttggaatactatgattgatgggtatgctcaaagtgggagaattgataaagccctggaactgtttgatgaaatgcctgagagaaacattgtttcttggaactcaatggttaaagcgctggtgcagcgtgggaggatagatgaggcgatgaatctattcgaaagaatgcctagaagggatgtcgtttcatggactgctatggtcgatggattggcaaagaacggtaaggtagatgaagcgagacgactttttgattgtatgcctgagagaaatatcatttcttggaatgcaatgatcacaggttatgcacaaaacaataggatagacgaagctgaccaactctttcaagtgatgccggagagggactttgcttcatggaatacaatgatcacaggatttatacggaatagggaaatgaacaaagcatgtggtttatttgaccggatgcctgaaaagaatgtcatttcctggaccacgatgattacaggatatgtcgagaataaagagaacgaagaggcacttaatgttttctcaaagatgttaagggatggcagtgttaagcctaacgtaggaacttatgtgagcattttaagcgcctgtagtgacttggctgggcttgtagaagggcagcagattcaccagttgatatctaagtcggtccaccaaaagaacgaaattgtgacttcagcgcttcttaacatgtactcgaaatccggtgaactgattgctgctaggaagatgttcgataatggactggtatgccagcgggatttgatatcatggaacagtatgattgcggtttatgcacatcacgggcatgggaaggaagcaattgaaatgtataaccagatgcggaaacacgggttcaaacctagtgcggtgacctatctgaacttgctatttgcgtgcagccatgccggactggtagagaaaggaatggagttctttaaggatcttgtgagagacgagtcacttcctctgcgagaagagcactatacgtgtcttgtggatctctgcggtcgtgctggtagattgaaagatgttacaaattttatcaactgtgatgacgctaggctgtcaagatcgttctatggagcgatcttatccgcttgtaatgttcacaatgaagtgagtattgctaaggaggtggtgaagaaggtattagaaacagggtcggatgatgctgggacttatgtattgatgtctaatatatatgcggcgaacgggaaaagggaagaagctgcagagatgagaatgaagatgaaggagaaagggttgaagaagcagccgggttgcagttgggttaaggtggggaagcagaaccatctttttgttgttggagacaagtcacatcctcagtttgaagccttggattcgatattatccgatcttcgcaacaaaatgagaaagaacaagaacgtgacttcagatgcggaagaagctgagttcttggttatttgaattccctctgcatagcggagatgtattcagactcctcgatataagatcggtgaacggatttattcaaggcatttggtgttggactaagcaattcaactgcccgaagcatcttgacgataaggatatgatatgacgtagcttgcaggagattttctgtttgtagtttgttggcatataaaatgcaattgatacatcttagccttataggttaccattttttgtatgattcgaaatttcatgatatataccagttagttctgattactcattcattccttgttctttgttataaaaggatttgtggtgggtcaattaataattcatttcctgccaaattcgagcttactcaaaccaaattttgtagaccctttttaacttcaagatgtctcgttgataatgaagagtaacaccaaaatttcggagacttcactattgttgcaataatgaagagtaacacattgaaaagagactactgaccacctccgccagttacagttcatatatagagaccaaacaccaacacaaaagaagaaccaagccaaaagaaaaagcaaagacaatgacaaaattacaagaatagataagaaaaagaaagaagaagattagagggagatttcacatggtgcgtgaaaggttcttccccgacaaatcgcttctagattttctccagcgtacgagcacaatggtgacacttccacacctatttaagctatgagtgttagtgaagtaaaagaatcaactgaaaagaagagttggatggggctctttaccagtcgcatataaaggaacggaatgtgttagaaatccaccagctgctatgacccaacgtgtatgcagtcgtagaaccaacagtcttgcgcttctccggtgtgtcgtaattcgacccgtttgcgttcttcaccggcgcaaacttttccttcctcaacacctaacaagacatgaaaccccacagccggaaatgagatttgctaacagttaactgaatcctgccaatatc

SEQ ID NO: 37681 - DNA, 3475 bp, Arabidopsis thaliana landsberg
  unsure (1)..(3475): unsure at all n locations
cttaaaaattctacatcggtacgctttcgtttcacaccctggcatgcacacagtgtccggtagtcaaaaatacaaaaaaaaaaaaaaaaaaaactcgagacatgctaaatttggataatgattaataatttgggggtacacaatgttccaaataatttatatacaaagtcttgctttcatattatttctgtgtccacacttcaacactatagtattatactattatccctatcccctatgaagtatgaacacactttttatgatacgtatcatattcagaaaacatcaaaaattggtcataactctcacgtggtgtggtggattttcctcgcctttcgtttctgttttttgcaaatatttaagaatctttggtcatttaggctttaatttagttactttaaatttatttttgttatagaagtattatgttaaaaacagttcgtgttcatccttggactaaccagacgatttgacaaaatccgaatatccgatcataaaattaaaataatcagccgttattgttcctctactactacgttttaacttttaagaacttctcctggtactttgatgggctataagagcggcccaatatttcgactttaaaatgggccaatctttggtaaaggcccaattatagtggcgcttcttcttcttcttttcctaaacaagcaatggcatggtttagctggtgagccagtttataggtaaaaaggataatttaagccatttaaaaaaacaaatctttaatggcgtaattcaaaaaacgtgcacacctatctaagtaccaaactctttatgttatataactattgtgacacaatttcaaatttgctaactcccaaaaaaaatggcggcctttttgcaaacgaacatcagtctgaatgcgatcaagatcgtcccggggaaatacagttctctcaccgatcatcagtttcgtgcgccgtatcgaattaggtgcgcggccgcttcacctgngaaaaaacggtataacatcgctctgcttcccggagacggcatcggtccggaggttgtctccattgccaaaaatgtgcttcagcaagctggatctttgaaggttctctctctctctcttgttccctttcttatttaatttagttgctgtttcatttcaattggggactactgttttctgcttggaattgaaagatgtgagcattagaaattggcgagattttgaatgggatttacaatcgtgggttgggctcaaaggccacggagattgcctaatacattgcgtctttgctctgtatcaggagtggaatttaacttccatgagatgcccattggaggagctgctttggatttggtcggagtgcccttgccggaggagactatctcagctgcaaaagaatcagatgcagtgcttcttggagccattggagggtctgtcttctctcttttcccactaatcttgttggctcttaattattgttttgggaaatacagtttctcatttagtcattttctcatgttggtataataataacttaaggtacaaatgggataacaatgaaaaacatctgaggcctgagaaggggttacttcagattcgtgcagctctcaaagtctttgcaaatctgagacctgctacagtcctcccacaggtaaccatcctcagagatttcttggttgcctgaactttgtttcttgtgtgaaactctaattttgttgtttttatacagttagtggatgcttccaccttaaagagagaggtagcagaaggtgttgatctaatggttgtaagggagcttacaggaggtccgttttattacttattaaaaattgatcgtaattcttgtctttctcgtgtgacaatatcttataaaatgtcatgtctcatggtaacaggtatttactttggagagccaaggggcataaagaccaatgaaaatggcgaggaagttgggtttaatactgaggtttatgctgctcacgaggtactctattgaaaatctcagattcagatttccgtggactgattgttaagtactagggtcaaatctaataaagcattttgtatgttcgtcagattgatagaattgctcgtgttgccttcgagactgctcggaaacggcgtggcaagctgtgttctgttgacaaagctaatgttttggaagtgcggttgataattatgttttctttgacttgttttcctctctcttgtttcctgtggaacgaacataacactgaatttttttatatgcaggcctcaatcttatggaggaaacgagtaacagcattagcctctgaatatcctgatgttgagctgtcacatatgtatgttgacaatgccgcgatgcagcttgttcgtgacccaaaacaggtacgtgtactttgtatttgccaaactagtcagctttgatgtgcgacaggtgtaaatccttgcaattatttgattgtttgataaatgcagtttgacaccatcgtcacaaacaacatttttggtgatatattatccgatgaagcttcaatgatcacaggaagcataggaatgctgccatctgctagtctcagtgattcggtatgatataaaataatatgatctttgagtatgcaagcagtatgatctagtctgaacataaacccgccatgtgtaatacagggacctggactctttgaacctatacatggttctgcacctgatattgctggacaggttctaactctatccttcaaacaaacacggtttttgttccctgatatcaaaactagtttaatgccaaaatcaaagagcacaacttgttgattctttgaattttcaggataaggcaaacccattggcaaccattctaagcgctgcaatgcttctgaaatacggacttggagaagaaaaggcagccaagagaattgaagacgcagtgttggttgctctgaacaacggattcagaactggagacatatactccgcgggaacagtatgtttcttgaaccactcttataacatgtttccttttccttaaaaacgtcccgagttagtgtttgagaaacgtttaaacaagcaggcaacaacaaacagtagtaatatttttttgtctttttgtatggggtatgatcagaaactggtgggctgcaaggagatgggagaggaggttctgaagtcagtggactcccaagttccagcttctgtttaatatttgtagaaactttgaagagttcatttccaacaacaaatgttgtaccttgtactcaaagagtctcggtttcattagcgatttttataatgtgagattattagagggacttannnnnnnnnnnnnnnnnnntggtgtttttttctgagaaataaatatccttgtggagataatgacgtgtcagagtatcactcaaaaagccaaaaattagagagacaaaaaagattcaatctcccccgtagtccttatccggcgccgagtgtggtcaaacgtcgcaagagttttcgctctgtccggagagatctttttcctttgatttc

SEQ ID NO: 37682 - DNA, 3956 bp, Arabidopsis thaliana landsberg
cacatcttatcatcacaatggcatctatgtctttttgcacatttgtcatccccatttatctgcaatgtttttcttttttgggggaatatgagtagtttgttaacagtatcgagaaataattatcatcttttttgtccaatggaaattgcagaaaatggttatgtatgcgaccaaacattttatatgtagcgagagtagtttagcagaacaataagcaaatatgcgtacaaactgaataatgttccaacttactatactattaaactaggagggagcaatgttttttcatgcctttactagttttctcataaaacttgatctggatattgcacttcgatgatctacgaaccattagcagatctccggtgattcgatacttctccttgtcgtttattgcacaggcacgaactttgacaagcacaagacatgacagtttctctatgaaatgtctcatttcctctagctcttcaattgttccttcatattcagttatcttcaatactttcacaggacatgacaatccatatattcttgtaaagttaagtatatatacagggagatcagactcgttggaaccactcgtactttgacttggaactgctccaaaactaaaagaatttttggtagatgattatgtatgtatccttctcttcctcctcttcttgttctagctttgatggactaaaatactagtcaaaattttgcttaatatataccccttattgcttctcagagatatatctacaaaaccgaggatcttccattttgatggaatcaactgagtcttgttcccggatgcttgtcatcgcagctagagatattcgagtggaaaggatatagagatagagtagaaggggaaaagttcttgacatacattttagccaactctaagcgtttaaagaccgcaacaatctctctgcccttcgatcttgaagatcaagaggtgatcatcgaggagttgaaagatattcctagggtttcaacaacatctcaccttttgttcatatgaaaattctatggaagcttggcgaatgggcaagcttagactacttatctgctattatatgttttaatcaacttgcaaagattagtaacataaaaaaaaatattaagaattctagacaagttagactacttcctacaaacgtgtagtggaaggtgctaatatttgccaatacaacattaataagaatctttaagaaaccaatccatgcctaaaaatataaatttcaactcaagcgcctaagcaacttcgcatattattcattaaaaatttaaaacttttattgataggacatagataaataacaaactgaagttaaccaaaaaaaaacaaacaaactgaagttgaaaataataataaagatagaaaagagactctctagggtttgtttcttcaattccacaatgcagaacaattggtgggactgaaagaaaccagaagtgaagaagaatcataacccaccaagaaattgttctgtgctctgttcccaaagatagcttcttgtgttggactattacatataatagccagacaaaaaagtcctccgttattcgattccatatacatattgtacttatccaagacaagatcaacaccgccagaaaaatgcattgtgatcaccggaaagatatctatggtgtccgagttgtagcaaagcatgtcattgccggtcgggtcagctgctcgaaccgctgtcacaacgtgttccactgcctgtcttactagattgcagtagctcactggaaagtacgtgagagtggttccagagtctataactatgttcccttctaaggcatgaaacgttgtccccattgtctcaatgcggttgttcccaacgctgaccgcgtctaggtttaggtaatagaaacctggtttcgccgtcgtcataaacatagtggttgatacaaccccatcttctgccacaacagcattcgcttcaaaattgatcttactagttccttgaccagaaaagcagtaagacatcaaacctgggtactctccttttttctgagcgatgagcgatgaacgtgcccagtttagaccaaccatgcctgaaaaactaggttgaaaccatgagttgttgtggccacaaccaataatggtttgaggcattacaaagggttcctctgaagtgtagtggagtgtgattgactcaggagctaaggttcccatggggtaggtctggtcgaagtaaactacctcgtaaggacaagagtggccatcgcatcttttctccttgaaggttgaggatttcgaagggtcgaatataggagcgttttgttcgtagcagtgaacacaaggcaaacattgtgtccatgtgatctcgcttccagtgtctatgatagcttggatctcgaaaggaggagtaccgacttgtagtttcattagatacacggagttatcaaagacggtattagcgtaaggtgatgatccggactgagtattagagactcgagaagaagcattggagcgacggtggatcaagtccatggtgaagccgtgaggtggtgaggctgtggtcgtgaagagaaaacatgaactgatttgaagaaaaagaacgattattgtggttgcaagagacattgctatcgaataatatttttgggttttcagacacaatgcaatgttcttcattcatgcacatatttatacatgttagagcttttgtcataattgttaattttccaatttatcaacttcgtccaatttttgttatttccattacgtcttctaacttgggggaattttacattttgatactactaagttttatttttcttttcaggttttacattcttttagatttactttttgtattaatggaaattataactttttatgaccaatttcgtaagaaaattgtagaaaacaactgtttcttaccaatttcgtaggaaacggctgtttcttatcattttcctaccaaaattattcctagcaaatgttctgtacaaaatcgaaagtggtagaaaatttcctacgaaaataaattggtagaaaattcattgaaaatttggtaaaacaatggaaagaaaattttgaccgatttcctaccaagatattcgtagaaaaatatttcttactaattgtttcctatgattctctaattaattaaaaatgtatataattaaattactttcaataatatattaattacgaaaattaaattcaaaattataaatagtcattatctattaatctgaataatactccctctgttcatttttgtttgattttctagaaaaaatatatgtttcaaaagattgattttttaggttttcaatgtaatatttattagttattattaatgaattgtaaactttaacaaagatggttgaatattattggtttaaagttatagaaaattgtaaacacacaaaaaacaatacatttaaaattaactttaatatgttttcttaatatgtgtatttttcctaaaaaataaaaaaataaaaggggaaggggtatatactatacagctaatatatatatatatatatatatataatattaattaaatatttagcctagcatgcatttaatcttattaatagtcacacggccacacaaacatgattcattaatagtcacacgacgttacgaacattattcattgatagtcacacgaccacacaaacacctaaccatagctgctaacatgccatgtctagccagctacttctacaaacgttcatttagttaattaactgctatatttaacatttatatacaataagagctccaaaataaggtagtgatttataaacatcacatgtacatttgaaattgtgaagagtttagccatggaatcaaaacctcgaaaaaccttaattatttaccataccatgccaccaaatttccgtagcaattctcaatttttgttctctcaatcaaagttttctcataagttttggtagccgattaacacataaatttggaaacttcctttaaa

SEQ ID NO: 37683 - DNA, 3658 bp, Arabidopsis thaliana landsberg
tttattaaattttgcttaccttctcaatatcacattgaacataacgaaaggtgatcagcggacgatgaatcagaattcggacaactccaaacatcaagactccaatcaccagattctaactttaaaagaccattatcctccaccttctccactgatcaaaatttcaatcgaattcgattagatctgttgaaattgtgtgattaattgatgaaatggtaggatcagatttgttgacatccgaaaaacccagaaaagcttttgaaattagaatcgaattgaaggaagctcaatgtaaaaaaaatgaacttaagctccacaatatttttttccgaataagatttttttttacagctataggttatatcacactcttttttttattggttagtcaaagtgtccttaaacataggttttttttgctgttgttgtctttaattaagtatagatgatttagaaaatttaaacgaataaaaggtttttacatttgtaaatcacatattgttttattttattttgtgattttgttttgaacatatagagttcttaattgaaatttataatacacaagaaaaaataaattcagtttcatattataattattcacaataaaattatcttattttcattattaataaaataacaaaatgtaataaacaaattatctctaacacttgacaaacatagattataatatataaaactatactaaattcatatataaaattccttccaataaataaatgcatatcaaaacaaatatactcagaaatcctcgtactcattttggaaaaaagatctcgctctgttttctctcctaccaggtgaatctgtgggatctgttcgttgttgatatcattcaaagccgtcccaatccttgggttgtagtacttctctctcataatttctttgtctgggcagagtttagaccggagatatactcattttctgttcggataagttttccctactatgttaaattgttgaattatcttgcatcgctccttttcaatcacttgttcttgactttacaagatctacaactgggtgctatttctgtttctaatggttctcggtgtgctgtttcttagatttcctttgttggtggacttttgcgaatggattttcagttggaaaaatatcttcaggagatgaaaattgaggaggaggaggataagccaataatcctctctaatcaaccacaattctatgctacagaacggaattctcgaagtattataggtcgcttcttaaatcctgataatcaacgatgagcaaatggattctcgatatgccaaggatttggagactttatactcgggttcgaggtgttgctctttctaaacacaggttccagtttttcttcaagtctgaagaggatttacaaggaattctgaaagttggtgtttggacccaagatgattggtgtgtggttatggatcgatgggtagaaaaaccacaggatgattatcttcagttccttcctgtatggattcgtctgcgtaatttaccggcgaactattacacggtaaaatcaataaaggaaattgcgcagtgtgttgggaaagttttagaggtggtatttgatacggtgaaagcacaggttcaagattatgtgcgggtacgtgttcttcttcctgttgctaatcctttatgtaattcgaaagaggttcaacttccaactggtgaattggttttaatttctttcgattatgaacggataaggaagcgttgctttcactgtcaacgcttaacacatgataagaatcgatgttctttcaagtcttcaagctcaattaaagctttatcaaggaatttactggaccaaggtaagagggtagaggtcaatctgcaggatcttggtcaaggaaatttggatactgttatgttgaaagaacaaagggtgctattatcagatttaaaataccctaaaacatctgtgaaggatatgttgaaaccttctatacatccatgtctgcctttgatttcaaatacacaagttgataatttctatgctgagatgccagatttagatattatcacaggtttcaataggggttgtgatgaggctagttcttcgggtagcagtaaaaagaatctctcacgtaagaagactcctgcatcctagtctcttcaggggaaattaagacaggaattgcctttgaaagaaaagatcattcaagaggaggagattggtcgatttgataaagtgtttaaaagaaaggcaggggtagcttctactactgaaccaaaatgtatcaaaagagagaaaaccacggtggttccgggggaactatcgttggatcagtaaggcatcttaagctggaattgccaaggtttgaggaacccttggacaattcgccatctaaaggaaatgaaaaagaatcatttcccatatattttgttcctcatggagattatgaatacttctgattttgtctccaaagtgtttacttggttaggatatgatcatatgtttacaattgaacatgttggtagaaaaggtggcctggctatcttttggaaaaaggacttggacattgagtttccttttgcagacaaaaatcttctggatctcaaaatcatacaaagaaataaatactggtttatttcatgtgtgtatgggcatcttgtgacacagctgcgacctcaacttagggaaagattgagtgatattagtctaaatagaaaggaagcttggggtttaattggtgattttaatgatatcagatcaaatgatgaaaagcttggtggaccacggagggctcttgcttcgtttcaggcttttcaaaacatgctggatacttgtatgatgtttgagttgggaagttcagggaatggttttacgtggggaggtactcgtaatgatcaatggatacaatgtaaacttgatcgttgttttggaaacccttcatggttttctctatttccaaactcccatcaatggtttctggaaagatttggctctgatcatcggtctgttttggtcaattttatcaatgatcaggaactatttcgtggtcagttcaggttttttaaaaggttagctgatgatccttcttgcacttgtgcaattcacaaatcttggaagagtgagatttctcaaggtacttacttttctatatttagtctgaatgaatgtggaagagctataagtatgtggaaaagaagttctgatagtaatgctcaaaagaggattaaacgattgagaattgctttagatgatcttaaaagccagttgaatccatattggcctcatattaatcatcttaaagatcaattgggcaaggcttatgcagatgaggaatctttttggaggcagaaaagtagacagaaatggatgtttgagggagatagaaatacgtttttttttcatgcttcagtgaaagccaacagacaagctaataacttgagtttccttttagatgaaaatggaaagaagcatacccgttttagtgagaaagggaaggtggcatcacaagtttttgacagtctctttacttcgactagaccaagcagtttgctctctcatttggaaggatttcagtcaaaagtttccacagaaatgaatcaagatctaattaaagcagttactgaagaggaaatatagaatgcggttttctctattggaagtgaaaaggctccaggacctgatggatta

SEQ ID NO: 37684 - DNA, 8395 bp, Arabidopsis thaliana landsberg
gatccttcgtctgtaggatcgcgtgaatggattggtgccatagagttaatctttgtgttggataaacttcttggtgtaagtgttctggtcttaacttcttggtgtaagtctcctgctctgaacttgatgttgagaagctcgtaatgtcttttatttgcaggtaagttgcaaaattatgaacttcagatccggatcagagctcccagagaaatgccgggagttagctatgcactttgagaaccaaggaactccaataatgattggtaagtcaagccaaatcactctgatattatagcataagtgaaagcgtagaccctatatataaaggatcagtggaccagtctttaatgcggtttaaagaaacctataagaaggatccgtttaatcttttaaactttgtattgtgaattggttttacttgcaggaggtggggttcttgcatacacgctattgggagtggattacgatgaaggaagcggggattgcgcattcctgatcctggatccgcattatacaggaagtgaagatcacaagaagatcgtcaatggtggttggtgtgggtggaaaaaagctgttgatagcaaaggaaaaagctttttcttgcacaacaagttttacaatcttcttcttcctcaacgtcccaacatggtttaattatcattttcctacatgtaacaacaattactttttttcttatcacagttttagcctgctgtggtctcctgatagtgcaaaaaatggagttttcaagaaatttgaatttcagtggaataaataaaccatattgaaattaatgtccggcttttagattcggtgttacttcttgttagatgaatcgtttggcaaaatccaatggaaaccttttttctcattgcatggcattgaggggtagttttggtaaatttgtaaaaacttttggataagaatggaaaaaagcagcgataggaacgattacgtgcgggagtgtggagcacgtggaatagaatcaacagaaatagataattaccaaaacttacaaaactacacacaacccccacatttagcctaatatttgtatagaatgcctaaattctaattggattcttttaagagaaataatggctatgggtattgaaaaatatatgtatatatataaaattcgatttatttggattaatgtctgtaagaaaactctttggaaaaagaagatatttcaaaacacgtcaaccagtaaaactaattaggacctatctgaactaataaaaagtatagtgtttgatttagaattaaattatatttaatggcttctccacaatttaaaaagccttatatgatgacgtgtaccttccctttactttttatttgtttttcctttttccaattttgtaaatcgccgattctctctcatcgactagtatttatagtctcgtcgaacttaaaaatcggcgacattgaatcttctaagactctggtggaaatttttattacttacctgcggagttctgatcgcttcttcttcttcttcctgtcttggcttgagatccgaagccaagtacagaagagttcgttcgattagtttggattcgtttcgaattaatcactggtatgtataattctattactggatttaggttttatatgttgcttctttgatattatacaaaccagtgtgtttgtaacttagaggtagtgttgtttcgtgttatttttctgtttaattaatgttatgaagccaagctataatgttatttgttctagaatgtagattgttgtgttctgttttgctcttaacttgttgttttcggatttgttttctaaatcattcataaatcttgaacgtgtttagatggcaacgagggagtggtttgtgatgaatgcacaacagacgaaactggctctagagtctcctcctctgtttgctgtcaagaaaggttaatactttattcaattttcttagtaaatttatacttcccttcttcttgtcttgctttttaaacatgaagcttatatttgtacgtttcaacagatgatgataaagatcatacttgtgatactggagaggaaccttatgcacttgttggttcccctgtctttaaccctttggaagattacaaaagagaagtagtttccatcatcgatgaatactttagctctggggatgttgaagtggctgcttctgaccttatggatcttggtttgagcgaataccatccttattttgtcaagaggcttgtttccatggccatggacaggggcaataaggagaaggagaaggcttcggtgttactctcgcggttgtacgctcttgttgtttcacctgatcaaatcagggttgggtttattagactgcttgagtccgttggtgatcttgctttggacatacctgatgctgttaatgtacttgctttgtttattgcccgggccatcgtcgatgaaattcttccccccgtttttctggctagagcaaagaagactctaccgcattcctctcaagggtttcaggttatcttagtttcagaaaatagctatctctctgctcctcaccacgcagagctagtggagacaaaatggggtgggagtactcacattacggtagaagaaacaaagagaaagatatctgaatttttgaatgaatatgtagagaatggtgacactcgtgaagcttgtagatgcatcagggagttaggtgtctcgtttttccatcacgagatcgtgaagagtggtttggttctagtgatggagtcccgaacatccgagccgctgatactaaaattgttgaaagaagctacagaagaaggtctcattagttcgagtcaaatggcgaaagggttctcccgagtagcagatagtcttgatgatctttctcttgacatcccatctgctaaaactctgtttgagtcaatagttcccaaggctataataggaggttggctcgacgaagattcgtttaaagaacgctctgatcaaaatgggggcagcgaaaatctaaggcggttcaagaaggatgcagagaccataattcaagagtatttcctttctgatgatatccccgagctaatccgcagtcttgaagatttaggattacccgaatataacccggtattcttgaagaaactcatcactcttgctatggataggaagaacaaagagaaagaaatggcttctgtttttctcgcttctcttcacatggagatgttctcaacagaagacttcataaatggtttcatcatgctcctcgaatccgcagaagatacagcattagacatcttagcagcatcagacgagcttgctctgtttctagctagagctgtgatcgatgatgtcttggctccgcttaatctcgaagagatctcaaacagcttaccgccaaaatcaaccggaagcgaaaccatccgctcagctcggtctctgatatccgctcgacacgcaggagaaagactcctgagaagctggggtgggggaacgggctgggcagtggaagacgctaaagacaagatctggaaacttctagaagaatacgaagtaggaggagtaatatcagaggcttgtcgatgcatacgcgatctaggaatgccgttttttaaccacgaggtggttaagaaggctttggtaatggcaatggagaagaagaacgatcggatgcttaatctcttgcaggagtgttttgctgaagggatcattactactaaccaaatgacaaaagggtttggtcgagtcaaagatagtcttgatgacttatctttggatattccaaatgcagaagagaaatttaactcgtatgttgcgcacgctgaagagaacggttggctacaccgcgattttgggtgttctacagattcttgactgattctgagtctctacatatatagaaatatggagttggttggttttgggtgttcttcaaactgttctttgtacttgtttccgacgaaagatcattctatgtactttttacataggtttttataaacgtcacatgcatatgttctctgaaacttccccaccaattattcatacaattggttactaataatgtttgcaaatatttcaatcaaaagaaatttaatccatatattattcaaataattgaacattatagcctcatattcgatggtgttgtgatgtagcttatcatttgtttattcaacgcgcatatatattaaacatctcaaaaacaccacacaagacatgacaaaaaaaaacaagggttgactaaaaaagaaagaaagagatctgaatcacaaaagcacaatggagagatcagtagatttaccgattcacaagcatccattataccattcatcaaggtttataaatggtcgttgccgcggttgcaagcaaacctcacctatctatagtggctaccgttgcaatgactctgattgtaaccatgtttggtatcacaaagaatgtggcgaatcattaccggagatcaatcatccttcccatctcgagcatccgctctgcttaatcgactacaggggaagtggtacgtgtgctttttgtggagctttcttgtttggtcctacgtatcattgttggatatgcgcctttaatatcgatatagcttgtgcgagaaaacaactacctccacttgctgctattgaaaatcccaaatgtcataaccattcacttgttcttttggagaagcaagtgaagaaagatcattgtggggtttgcaagaaaacagtttttggtatgtatccttacgtttgtcttgagtgtgatgtgtatttccacgtcgaatgcataaatataccgcgggaggtccaccattcttctcatactaatcacactctcgagcttttcggatctgagtcgctacctgatagcgctcaaaagacttgtcttttgtgtgatgacgtatcagatcacttgatttatcattgttccgtttgcaacttcagcatctgtgtttattgtgcgataaatcctccaccgcttgctatagaacatcttaagactcacgagcatacgctaactctcttgcctagacaagttaagtttatttgcaatgcttgtggaatgaaaggtgatggatgtccttacttttgtcttggatgtggttacttaatccatcggaaatgcatcgatttacctcgcgtcattaacatcaatcgtcatgatcatcgcatctctctcacgcatcatcttggtcttcagtattcagaatgtggagtatgtcgtcaaagtgttaatggatactacggaggttattcttgctctctttgtcccaactatgttgttcatccacaatgtgcaatgaaagatgatgtatgggacggaatagaactcgaagggactcctgaagatagtgagcaagataccgcgccattcgaggtggttgatgacaacacgataaaacatttcagccatgaaaaacataatttgatgctcaacaagaatggtatcatcactcaacatgatgaaatcacacgttgccaagcatgtgtccttcctctatcgtcagatcctagctacagttgtggtcaatgtgattatgttcttcatgaaacatgtgcaaatctccctcgaaagaaaaggcatgtgttcaacaacaaaccatttacgttacacacaggaggtaaagattcttctaggaattggtttgagtgtgatgcttgtagaacaatctccaatggttttagatacgtttctggtgattggattctagatgtgcattgcggttcgatgtcagaaccattgctccatgatggtcattcacatccgttatattactacagaaggcaaggcaagtcatgtcgttcgtgtcacaacaaagtggtgaaacctagagtactatgttgtgatacttgtgactttgatttggatttctactgtgctaatttacctaaaacggtaaaacattgctacgacgagcatcctctttctctatgccacggcgaagatgatgtgattaaggataacaaatattggtgtgacatatgcgaaacagaaaccgatccaaagaaatggttctacacttgttatgactgcggggtaactttacatgtcaagtgtgtactgggagacttctcgcgtctcatgccagggcggaacattaatgtcgatggacgtgagtatgaagttgttcctaacagcaagagttctcgaccattctgcgaccaatgccattctcgatgtaaagatcgcttcattctaaaggcttggaataattgcaatgttgttaattgtaatctatgcgttgatgtctacatttgctcccgtaaatgccgccagccctttcatttgagacattagtacacttgtattaacgactaaagttgctttgatttgattgttgatcataactagtttagcattgcaagcaattaattattcttaaaaaccacattgacttaaacagaggcttctctactctcacttacatcttcttccccaaccaaaagtgacttgatgatcttatcagtcataccttccacaaatggtacaaaatgtcctgatccagatatttcatggtaacgaatccatggcagctttgacgcgacataccgctgaagctttactggcacaaacttatcctcatcgccattccatacgtgaactgagccattgttgttcgggaacggatcttgaaggtctaacgtatcaaactcccagcttgaaaatgcgacattcaaatctcggtgtaagcttacatattcaccttgttgtcttatgtatgcctggaacaaaaaaaagaaggaatatacacatcatatgattccaaatcatattctcattgtagaggtatgaaacttatgatatggaaactgaacgtctatagatgtgcttgtacccgatttggattgacgaatccgagcttagacaagatctccatgtcctcacgtgagaaaataatgggattaccggcaatcacattggagattgggaaccatttctgagtgttccaccaatatgtaagccaaggagcataatgagctactcgaagtgaccattgatctgcaggatgcatacgagagaatgcttctcttgttaaatctcccggtaagtttctccaccaatagttaatcgctggagctacaagggcagctcctgctaacctgtaaacaaagtccataaccaaaaaaacacatttcacaacacatcttagctattgtttcaagatcaaagctgaaatctttttcgatacatcgaaaacccaataagatagactcaaatgcagtacctgtgaggaatgtagttaaggcatgcccatgtaatttcaccacccatggagtaaccaaagagatagaactgaggtcctagtcctaacccgtcagcaagctcttctatatccaatgctatgcttcttggtgacccattcaggttaggatcactctctccataaccaggacgatcaaaagacacaatgtatatcctcaattcctccacaagagcctaagcacaaagacaccatttttccccattagcttcactaaaagacacaaattttgacattttttctacatgctatcgatgattcaacaaatgggtgatgttagatttggccggaaaacttaccggcgataagaaattggcgaaatgcgagtctcgcatacaagaatcgaagccgtggatgtttatgatcttgaacttggcttcgtctctagggattccgaattctgtgtaagccagatgtcttccgtctctcagtttgatcctcggtgatgtcacggtgggtccaccgggagagccgacgattttggcgggtggtggttggattgtttgataaacccatgctaaaactccgacgaacgttaccaggagaagcgttttcagataaccttcataattgaagaaacaagtcttctaagaccatttagtaaaccgttttcggcccattagaccagcccattaagcggttttattaatatatatatttgttacgagaattttgactctttaattaattcattggtttatgaaattaggattagagaattaatttcataacatgagattattcaaagacaaaaggggataactctgtgaaaactatacagaaattttttattaaaaaggtaaaaaaaaacacacacattattctagttttaaccaaaaagtattacttattttcttctgacatcccaaatatatttatttactttaaaagatgcatagcacacaacacatgctttaaagtctaagttggtgttaccaagaaaccgtatcaactttaatgaattgaactgaactaaaaaatatctgaatcgaaactgaaatgattctctgtttacatttgtaaaatcaattacagtttttgtcaaaatcaaatttggtccgatcaaaactaaccgattggtttggttcaatttggactaaaatgttaaatgaacaaacaattagcgaacaaacaagactagcgttctgatctaattccatcaatcatcccatccaagcaagaaagtgtgag

SEQ ID NO: 37685 - DNA, 2155 bp, Arabidopsis thaliana landsberg
tcaccgcctgcgactctttttattaacatggagtgtgaggagattaaaagaaaaaaggtttagacttttcttcgtttgtttttttatcaagctggttgtttcaatttggctttagctgatgccaatttggtgtggtccaatctctcttttaatttttgtttttctgatttcttccttcgttcctagttcatactactctccttgactttctcctttttaacatcaattctctcgtgttcgaggttcctttgtctcttttgtcttttcactgttgtgtgtcgtgaatcccaagctctatacctccgaaattggcttggcccaagtcttttctggtctttttctctactgggtaagtcttcttcttcgcattcctctcctcaaaatacgatcttgcttaggttttttggagaaagaagacttgcacagtgtttgacttaaaggcttttacttcgtgaacggctttggctttatgtgaatctgttaatttcccccaaggcgattacaatgtcttaaactatttcggacacgatcctatctctgtgttactaatttagtttggaagatttggtctccttgagtctcttgatctgactttttcctttgttctaggttattactcttccccacagtggcatgatcttttcgataacttagcttaaaggtctttggaaaagagttatggggagtttttgctccaagagccttggaatcaattttggcagcgagtattctggttctagtgtggctgatgatggtcgagaacctgattttggccactcacaaccaaatgggcaaaccagtttgattgttcctggtatgaggcagcttatggttaaagacgtcaaggaacaaaatcaattaaaagatgttttctctttccgcgaaagggaagctgaagataatttctatgatggaattccgacgtatactatggctccatcacagaaaattcggtctgcaaaatcaactcaaaccgctgtttcaaaggttagtatggaccaaatgaagctccttttttagcaactaagattaagagttaaagcattgtctcttagtaacggcaagtgtcttttaagtttagaagtcctgaaatgtcgtgagaccaatccgaatttgctatactgtggcaggttacagaggcaagtaagcttttaggcaaagcggggttaggtagagcaaaagatgttttggatacccttggaagtagcatgacagatcttagtagcggtggatttacttctggagttgcaactaaaggcaatgaacttgggatgttagcttttgaagtagcaaacacaattgtcaaaagctcaaatctcattgaatccctttctaagaggaacatcgagcatttaaaaggaactatcctttattctgagggtgttcaaaacctagtctcgaatgatttcgatgaacccctcccacttgttgcagctgataagaggataaaaataatagtctagacggcttcttttgttttttcctagcttttttaaaacatggcaagatagttaacttgatatatttgcaggcaggagctgcaagttttctcgggggaagtggttcggtttggaaaccgatccaaagattttcagtggcataatttacagcgctatttcgataggtagctttattcaaaatatttgtacatgggagaatgttaatatttgtttgtctagctttcttttaagctgccgaatcgtttcttttgtcctcaggatcagcaaagaattaacccctcaaaggcagttaaaggaagacgcggtgttggttgttgaccaactgatggttctagtgcagtatactgctgtgagtgactactttcaaaaattagaaactctaaaagcatattgacttgttcttgctacttagatgtggtgttctgtgcgttgagctatcagctatcttctttagtagctgtttactttcgaaagaatatgtgataaaaaaagggaggttatttgtcatgtcactcacacatctcaatatctcttttggttcaggaattataccaagaactccaagtattgtatcgattggagaaagactatgagcaaaagcgtcgagaagaagagaactcagctaatagcagtaagggtaagttaccgaagactacttggctgctttattagatttggaacatcgtttaaatgac

SEQ ID NO: 37686 - DNA, 2373 bp, Arabidopsis thaliana landsberg
aaagagctcagttcatgatagcgaccacatgtgtcctgtgcattagcccgataggtaggtagatgatcttcctcaaaaccagtagcgaggatctcttgatccggtggccaagtcaccgacagctgcagggtctctgtgaatgggtaagtaatgctcggtctctgttggagcaatcaaaagccacaaagagcaagaattaattgtcctgataggtccatcgaacgtgagacattgtttaagtatggcttagactgcttactaatttcgcctctctcgtcaataggttctccaagaacgttcatgatacgtccaagggtggcccttccaacaggaacctgagtagatagacaaattcaccacaacataacataaaatcaatcggaaagaaagagactttcagaggaaaggaaactttgaacaaagtcaacgataagaaactagagaaaccaaacgaattgagttgccataaacggatcctcagatctagaccaatatatcaaatggcgaaaatgtcccaacttgtgacatgatctcggatctacttacagtgattggagcaccagtgttgagaaccttccttccacggacgagaccctcagtaccatccatagcaatggtcctaacgacattttgacccaagtgatgagacacctcaaggaccaaccttgttggatgatcctgtacctcgagagatgtcatgactgaggcaatccctcctcgtcttcgaatctcacataacaatggcaccaataacctgacacacacgcccgatcgcgcctttgccaccgtaatcataggtcttctttccctcatctttagcaggagcagaagatggcgcagccgaattagccggagaagaagtcgaatactcggcgactcggccaaggagagtcccacatggagcggctcgatgcgcgggaccgggggataaaagcctcgggtttcggctcccgatcaaggaggatttagaagtagatctactcgaagaagaacggagaagcgatgataagattcgccgactcgccatgactgtggtgaaacagagaaagcgagatagagaaaaaaggagctactagggttatcaaatgaataagttctcttgtagctcctcttctctctatataactctcttcgattcagtagcgtagaccacttcttctgcgtaacgtgttttgttctgactgcgacacgtgtgattttccgattctattccatatcaaggccgttgattggatggaaggaaataatcaaaacgttgatctttctcattaacccaaccaaaccaatgtaattagtttggatatgtcaggacaacaacaaaaaacaaacaaaatgtacactggagcttacttgtcgacaaataacaaaaactagaccattttctcatcttcatcatatgtaaaccatacgtggtgaatgtaactattttgttaatcaaacgatgttcccaacatttgaacttttgttatacaaacgaaaattcagatagatttgtaaagtgaattgtttgtgtaatgtcgaattaacagtggtcttttcaaaaagtttgctactgatatgactttttatcaccaaaaatatatgtaataccactgttaattcgaaaactttgacctcccaagaggccaagacaataataacctttgttaattatatggatccccaagggtcatcttctttgattagtcagtcctttggtgcatattttttctatttttaaaaatggataaagataggcccaactaagcccattaactaagcccaccaaaaagagagtggagcttagtttcgggcctttcggcaatcagcatatgttgttgataccctagcatttcactttctctctctctctcaaacacacacccactcatggcgtctcggagagtcttatcatctcttctccgttcatcttccggtagatctgccgccaaattaggcaaccgtaaccccaggcttccttctccttcacccgcgcgtcacgccgctccatgtagctacctcctcggccgcgtcgccgagtacgcgacctcttcacctgcaagctcagctgcgccatcttctgctcctgctaaggatgaggggaagaagacctatgattacggtggcaaaggtgcgatcgggcgtgtttgccaggtcattggtgccattgtcgatgtgagatctgaggatcaggaaggattgccaccaatcaaaacatctctcgaggtgcaggatcaccccacaaggctagtgcttgaggtgtctcatcacatgggtcagaatgtcgtcaggaccatcgctatggatggttctgagggtataaatcgtaaaaggaaagtcctcaacactggcgctccaatcactgtaagtagcttctatgtccagatccttcta

SEQ ID NO: 37687 - DNA, 2194 bp, Arabidopsis thaliana landsberg
cgtcttgcatcgctgctttttcgagatagatagattgcttgaaacttgaaagcaagactaggaaatatctcactttcttgtgccaatgatgattttttttaactattaatgattctggaagcaactcttgccacgtctgttttacgtgttagctgtagagataccgacgtgtattaaagcaagaggctattttactttgggccttttgggcttttgggctgaagaaagaaactgtcatcggatcaacaaacactgcatagtttgcaacttgcacggtaaagcgacacaaaatccatgacgtttaatttaggttccacgtgaagaaccataccacatatcgtgcaataagaaactgatcacttttatatacctaaacgatttacaatttacactactatgcttgacacgatatgtaatttttttttttttgccaaagggtgttgttattgatattaaacattgtacaatacaacgtacatagactgtttatataaaacaaggacgtctagataaaaaaagcaaataacaaatattacaagactagttaaggaaacaacaaactgagtaaggttttatgtacaaaacagagacgactaccaaaggagagggccagacgtggtagcagtggtggaagacaaacatcctgacatctcagtaagaacatttatggctacttcaaatacatatatacacaatatgtaattctcttattacatttatggatacttcaaatacatatatacaaaaaaagaaggcctaccttcgacagaagttataccaatttattgatcggaagctacaaaatgttatctagggtcaatttgtagcctatctctatatcaaaaccgatacggatacaaaatagtttgataatcatagaatttaacattctaataaatatttgtttctagtattctttaaatgaataatcttgtgttcaattagtctattcatagtagaattaagtctcctaaaaaatagattgaaaccaaaaacagccgcacatggatttaatatcgactttagttaggaggttttgctaaaaatagtaaaatactcacaaactcacttctaaatactaatcttttacactcatgtcatgtgctttaaagatatgagagaacctttcctagtacacctacagtcaaaattttcaagattccgaaattttctaggttttttgagcaagagccaagaatcccaaatgtttgaatttgtatttttgatccaaaaatactacaacatcgtataaagaataaatcatacgtgtcagaacgagacatatgaagatgatgaaagcattgagccgcccctcaaaaaatccgttcaacgtttgagagtcaaggccacaaggtctgaccaatctatctcttattcttcttctcttaatgatattatcaacggtcaaactttttatcaccttctcagaaactactcttcttcatatgtgaccctaaaaataaagacgaacaattaaacaaaattttaaaatacgtataatattcaccaatcagacgtgcaatatgtgttatatattcggacatacccaacaaatattcagaaacatgaagaagaacaagaaccatcacttctctcattttcttcttctccaagcccccctcctttctatatatatctgaaattggtcttttataaaacaaacttccatttttcgtatggctgcttcttttcttacaatggacaatagcagaaccagacaaaacatgaatggttctgctaattggtcacaacaatccggaagaacatctacttcctctttggaagatcttgagataccaaagttcagatcttttgctccttcttcaatctctatctctccttctcttgtctctccttccacttgtttcagtccctctctttttctcgattcccctgcttttgtctcctcctctgctaacgtaagcctctctgttttttttctctgtttcttttgaaatgaatccaattagtgatgataatctgtctttgatgtatcattgatttaacatcttgacaatgaatcgtgatcggaagtgataaagttatgggtcaacggtttcaaagagagagaaagacttttagagtcaactctcgactctttcttaaccacgttaccgctatttgtctcttttcttgaagtaaaaacaaaaattgggattgttttgcaggttctagcttctccaaccacaggagc

SEQ ID NO: 37688 - DNA, 6107 bp, Arabidopsis thaliana landsberg
actgatgatgaagaagtagtagaagatctttgtcattgttttgatgagtaaacttgaagattgagattgagatccaaatcagagtcgaagtaagatgcaagacagaataatgttttcttcttgttttgtctctttctttctattcacttcaaaaaaccttgtttatctttttacagaaagaagaataattggtttggtattattagtcaatagactcaaaaaaccttttcatacacaacacaacatgattatatataaaaaggactattttctgtctcgccacatgtacaaaccatcaatgattcatttgtttaatttcttaaagatcatgttttgcaaaatgttggaggtgtttggatcagaaaaaaaaaagtaattaaaaaccaaaaaaagagtagaggaataagatcatgatgagcgaatatgcaagacggcgtgggcaagtgagtgatgagttcttcactctttgtttcttttttgcttttttatttttatacttcattttcgtataggattcattttctttctctacttaattagtgctttcttatcattagtttttactttttcaattatacttttggaatatatccatgacttttaccaaagaatcacagtgagtttttggccttccctatatgtactaacaaatttttgggcttaaaggaaaacatagaacatttccaaatcacttacaaactccgagagagtgtatagagctgcaaatagagtaggccaaaccaaggctttttaatttttttttagcaaaccaaggcatttttatttggacataacaactcgcaccaagttctatacattacacatggcttccactgaataaagaggaagaaaaggctattcaagaaacgttttgagctctttgtttcacaaggaacaatagaagtggaacacagtacacaatgtaacaaagcaaacaagcttgcattttacatttgcacgtaacagccaagaatcatggccaaaaaatataccgatcaaaataaaaaggaggttattactaatatattatatacctatagatgttgcaattgcggtttctgacttttagtttatttttaccaaaacctgacaaaactcagcagaagcataataatagccaacaatcaaaattaaaattgtgaggctaatattttggcttgacgaatactctttaaccaaaatcattatgaattatgagtttggatagccacatataagatcccattcttgattctagctagggacagaacttatcgagatcaataattgccaaatatgtgacttacttatcttgaccatggagacagttaaaaactctcaatgaaacagctctcctctccaaatcagaaaacctgcatatcaatttatgattaaagtgttaacgatgtagagttgtaagaaactttaacatacatcatctaacattcgacatgaacacctgaggagccctcatctacgtctttacaagatcgtggcatgcactctattgagatcattgcgagggctaccacagaggctcatgactaatttagatgatcagtctacgtttttctatgaccttaacacttattgaggccggttggttctctatgcccacttaacaacaaacaagtttcatcaccgtagtaaagtgtctgttgggacacaagagttcacatgatatttcaagttctgatggaactggaatagggattgtcgtctttgtttgccacccacacgtagcctctcgtgatgattgttttcataatctccacaaaagattacttgtggatcgcgaaccgagacgacagtcccttgctctccaaaatcaaacgaaaaggaaaagaaagaaaaaggaaggtgtaagaatggtggtaatgtggtagagttatcattttcttcttcttacctccttccattatatagtgtttcacatgcccatttcgtaatataacctaagccaaagaaaatcgcttcggttttaaattatataattttattttataaagttaaaactcataaatcagtaaataaaaaataaacttaggaaacgtttttgtttcaacagattatatggatttcatacttatacacaaactataaacattcccaaagttttagtaaaaattagcacccattatccaaaattttaaaaacttagcttagttttattatacaatacaatagaatcgaacaaaagggacaacagttttctatcatatctcgaatgtatcgaaatgtacttaagcgagtatggctttttgggggacaaggatcatgcatgaacgaaatatttctccaaccacatatgttatgttttggccccgtgaaaattttccacaagtaaatttattgctaaagttattgaccaacaacataaatcttgttgaaatgaattaactgaacagtgtgaaaaaatcaaccaatattcatggtgttccttacaatgcaatttcagttctgatgcaatccgtaacaattgaagttgtcacatgttcacaacaatccttaaatcgattttagcaaaagagcataagatacataaccaaggttgctgttagctcagtagttgcaattagaatcggctattgaacacaaccgggtgatatgagattgcgtagcaagatagtaaacaatgttttaaaaagagttattataggaacacaaactcttctgattttaatgataggaggacaagagagagcagtgaaataaagttcataagcagcaaaattctcaagtctgatattataagagtagcaaaagtgagagacaaaaacgaaataacaaggtttatgttttgcaaatattcagaaatgaacatcaactactaaaagtagctactagcagaaaagacgcagagtgagaaaagatggctttaagctcttcagcgtttgccaccaccacctcccaccttaggacccttggatgcagcagcagctttggggaaattagccttgaccttctgttgcttagaagcaaattccaccttcttagccttcttttcatctttggtctttttgattctttccttgatctcactgtttgttgaatcatcatcacaatacatttattaagtcaaatataactattttaatcctagttggatgatttgacagagggagaaaactaaccgcagagcagcttccctggctgcatcacgaacttcaggcttctcagctctcttcttctgaattacttccaaggtagcaccaacaatggaccttgagtatggcttcttggtggcacgtctccttctcttcacagcctcttgtgctgcatcctataaaagaaacagagttttagaatgttaacaaatcaggatcaatgaaaaaaaacaaagtacaaacaacaaaacagatccaaattactgagttttttttttaccttcttgtgttgctttctgtacatggcagtccatgcaagcttggatggcttcaacttgttatggaagtacctcttacattttgagttaagaaacaagaaaacctgaaaacaatacaaaccattaagagactaaaaccaaaacatttgcaaagtataaacaaatcaatttgattagctgaagattcataaaagaaccaacctgagaatcagatcggataaacctaattcctcttcctgggtaaatcttctgtccactgaaacgacaaagctctgtcctgtatttcatagataataaacaaatgagacattgcaactagaaatgacaaccaaatgatctttgacactgaaaaatctcagtctacatgatagaaatgaatcatccatataccaaatacagactaatcacagatattaacgaagtatcatacttttattacttaagaaccagatccagctacacagagaccatgaaattacccagcttagctaacggtaaagcaaaacatatcataaattccgattgaaacaagagtcaatttcagtgaatcgatccttccgatagtgtgaaatcatgaatcattatcactaggcgatgttaatagattcaacacaggaacagatacagagagagagagagaggtgagatttgattacttgagaaccatggtagtagctgctcctcttcttcttcgtcttcttcctcctgctcaggctgctcccggaaacactagactagaaaaccctaattctctcgatacttatatataagagacttcacatttcacccaatgccattttcgtctatatatattattctggcccacactttaagcccactaaataggcccatcacaaataggcccataattttattagcccatatatttttgtagtgatgacgtcagctctcctccaataattttttgattttttcccatagccgacgacggtagaggaaacttgtcaatggacctaaaaaacggtgacgtttcgtaaaaggtagatgaaagtttgaacaagtagctaagctctctctctgcacaagcttccagaaaaaatcaaatcaaaagagagagagatccacaaaattggattgaatcgtcgccggattttccaagagtagagagcttagtttgtctcgcgttgcgtctagatttactgaatatggaggcggagaagtggaacagcgacggtggtgaatacacgtcggaggacgaaggtacagaagattaccgacgcggcggttaccacgccgttcggatcggtgactcattcaaaaccggccggtacgttgtccagagcaaactcggttggggccatttctctactgtttggctctcctgggatactcaatcctctgtacgcatctatctctctctctcgccacacgaattgcttgaaatgctttagagattaatttttcgttgctttgtttgtgtgattttcttactcgtatatcgaatgtacagagatatgtggctttgaaggtgcaaaagagtgctcagcattatactgaagcagccatggatgagataacaatattgcaacagattgcagagggagacactgatgataccaaatgtgttgtgaagcttttggatcatttcaaacactcaggtccgaatggtcagcatgtatgtatggtttttgagtatttgggagataatctgttaacgttgattaagtattctgattaccgtggcttacctattcctatggttaaggagatttgttatcatatgttggttggtttagactacttgcataaacagctttcgattatacatactgatttgaagcctgagaatgttttgttaccgtcaactattgatccgtctaaagatccgaggaagtctggagctccccttgttctccccactgataaggataatacagttgttgactccaatggtgattttgtcaagaatcaaaagacaggaagtcatagaaaggcaaagctttcggctcagggacatgcagagaataagggcaatacggaatctgataaagttcgtggagtgggatcaccggttaatggaaaacaatgtgctgcagaaaaatcggttgaagaagattgtccttctacttctgacgcaattgaattagatggtagcgagaaaggaaagcagggtggtaagaaagggagtcgatcaagtcgaaggcaccttgtggcatctgctgacctcaagtgtaaacttgttgactttggtaatgcgtgttggacatacaaacagttcacaagcgacattcaaacgagacagtataggtgtccagaagtaatccttggatctaaatactctacatctgcagatctctggtcattcgcgtgcatatgttttgaacttgtcactggagatgtgctatttgatccccatagtggcgacaattatgatagagatgaggtatgcttaagttccctgctgtcttttggctgtgtgcatttgtggtttttacatattttggctttctcttctcttgttttgtgggatcttagcgtggatttgcttcaattttctattgtgggagtttggaaatctaattggcttttctgttaacaggatcacttggctctgatgatggagcttcttgggatgatgccacgcaaggtaatagaatcatcagcagataggtttatcattttactaagaaatttatttcgatgattcataattcccaacactttctctgttgtgttttgcagatagcattgggtggccgctactccagagatttctttaaca

SEQ ID NO: 37689 - DNA, 1553 bp, Arabidopsis thaliana landsberg
gttgtaaacaaaaggaattaacaagggacacgtaaagtagcaattccgctggaaaagcgagggtaaaattgtcatttcagtggatccccaccaccaccaccaccgccgcaccagtttcttcttcatctcctacgtctgaaattgagaaatcggaagaagaaagataagtctaatcttgtgcctttagatttcttttcggggagatctagtagttgttggattcgttaaacggagaagtggatttggtacgagtctttaggtttccttcttcaccaaaagctctatatagagagaatctgcgagctctttttggtaggaaattagggttcgtgttgcttggtaaatatagaatcaatgacggaggttgttctgcatatatacgatgtgacgaacagtggatcggagaagactaacaacaccattgttcagatcaataggttcttcaaagacgggatcggtcttggcggtatattccacagcgctattcaggtactactcttcgtctatattctatgaatctacatttatgtacaattatcgatgatgtctaagcttggttttggtctactttatgtagatttggtttttgtttctgtgtatgtatgtggaaattaagaagttgacggcatgatacttttcttttgatatgtgaggctttagtttaatggtttatggtcctaaaggtctggagctgaagtctctcttttgctcaggatcttgtgtttcctagtacttttggtaactttccatatgataatgattgcgatatattgaccaagtgctctctggagacttgttaaatccaatgatggcttacgtttacttctgtgatctttgacctgggcaaatataattgcatataccactttcccatttgagtcgtgacaatttggtgtattccaacaaaactaccagaatttaggttttcaagttagtgctaatcattctatgttcttaggtctgtatatctatgcaatatcatttgattattcttgttcatggttttgttatttttttgtgtcttgtagatgactattgattcgcagggaagagtgattgaatagaatattttatgacctttgtgcaggtatatggaaacgatgaatggtcttacgggtattgtgaactaggaactggtgtattcagctgcccgagtggaaagaatccaatgtacacataccgtgagaaaatcgtccttggcaaaacagattgcacaatcttcatggtgaatcagatgttgcgtgaactcagcagggaatggcctggacacacttatgatttgttgtcaaaaaattgcaatcacttctgcgatgtactctgtgaccggcttggtgtgccaaagatcccaggtaaagccattttttgggaatctggtgtgtgtgtgtgtgtgtgttttgtcttcaaggcttatgtgacggcttgggttctgtctcttaacaggttgggttaatcgctttgctaatgctggggacacagccttggaagtggcaggaaacacagcaatgcgggtgggttcccttttgtttagcatctctacaacgtaaatgcaacgt

SEQ ID NO: 37690 - DNA, 3363 bp, Arabidopsis thaliana landsberg
cagatgcattcctgattctgaacttgactgtgttatcattaaccgcaaaaacatcgatcagaattgatttatcacctaagttccatattttgttacaataacatggatcttggcaatatggggggcagagcttggaaaacgaccgactaggaaatcatcccatagcggaactgaatcctcaagcaccacatctggaaccacaaccatagatttcccatctactactgaaacatcaacattgaacttggtaagacttgggcgactgctaacaacgtttgcgtaagatttcggaccctgaacttctggagaatgagttggtaccaacccaggggtcgctcccacctccttcgacatggtggcagtggcggctagccgccttggcagaaaagacttgcggcggacgaaaaaaccctaatcactctcgaaatcgccctactttgctgacgtgacatccagatgttctagaaaccgttagaagattgataggggtgggacggttatgcagctcgctgctgcttggaatcaaggtacaacaaattcacatgtttcggatatatcgatgatgaagatttatgtggcgaatgtgccgtttgatatgccggcggataagttagtgaatcagtttttggcttatggagatgttgaggaaggtcctttgggttttgataaggttactggtaaatctagaggctttgcattgtttgtctacaagacagcggaaggtgcgcaggctgctcttgctgatccggtgaaggtgattgatggaaaacatttgaattgtaagttggctgttgatggtaagaaaggagggaagcctggaatgccacaagctcaagatggtggttctggtcatggacacgttcatggtgagggaatgggaatggtgcgtcctgcaggaccttatggtgcagctggtggtatcagtgcttatggtgggtactctggaggaccaccagcgcatcacatgaattccacacactcctcaatgggtgttggttctgctgggtatggtggacactatggtggatatggaggtccaggtggtactggcgtctacggtggacttggcggtgggtatggtgggcctggtactggaagtgggcagtatagaatgccaccaagttcgatgcctggtggtggtggttatcccgagagtgggcattacggtctttcatcatctgctgggtatcctggacagcatcatcaggctgttggaacgtcccctgtgccaagagttcctcatggcggaatgtaccccaacggtccaccaaactactgaaaaggtgcggttgttctcccttgtatattttggggtttaagagtgtgttgcattatcatgattcattgcatagttatatattcttccctactttgtggcatattgtttttgcaggttgtgcgtaattttcttgctagaaattctctgctattcttttccctgtgtctcttttagtctatttgcttgttagtactgtgttagctacttgatgcaatgcctttagtcgatgtttttttgcttgtcttcattcccctattttaacgcatgaaagatagccagaaaagtgtgacgttgaacccttttatggggaatgtttgtggcattctttcatgcagtttttctgtttgtctttaagctgctagtctgtgcaccatgctttgtctctctatcatttactttttgtagtaatgagagtacgcatgtgatcgttccatcttgagtccttgttttccttctcagtatttaatcttcttctgaggatagcatgaggttgatttctttgataatgctaatgaccaaattgagttgtgaatgggtgttgattcaggtttgtgacagcatattgggtgaagatgctttttgtgcttagtggtgattacctgattgcagctctttaatctctggaatgatgaatgtatagctgctttgacctatctgcacttgacctgaatgtgctttggtttctataatgaatgattagactaggatatatttatgtacttttaaatatagacatactcggcaaatgagttttgttggtcagattagtgagtcttcaataatatgttgtattttctcctacattgttttctggtttatgtccagccactctattgggcttcctgattggtggttatatttcttgaactttgatacttaaatgtttgtgacttttggatatctaaaccttgctgattggtggttatatttgtgacttttgaggacatccagactggccctagaggctatgatttgtgattattgactaatgatgcctaggtaaagtggtgcatattttgtgaccagtcattggcactgtacgtgtttatccatgtcaaaaccataacttgagtagtgctgagtttgcataaaaatgtgaaacatgaaggtggtgttgaagtcttgctgttatttcatgctaaattgcgacccagttggtattgtatgacagaaactatgttctttcaaagctttagtgtggttattccaagggtatggaggatatatcgagttgttgacttgtttaaattatgacattattgtatcgtgaaaatctcatggcttgtgatgtcgaggtgttgcttctctgatcccaagatgctgagtttgtttttgttttttgggatttgagaaaatgataatgtgttcttagtctatggtggggtcatttatttgtcacttcgaagacagattttgatgcccgaatagctcttcttgcttctttcttggtcacaaacaaaagacaatttgtcaatttgtgtgttttaggtgtagaaaaaggctagaaagctgtcattgttaagcttgtatagactcttttcttgccaatgaccattcgtttttttttccccttacattttgtcctttttgtcgagcgaatcttcaatgctcctaactgaaaacggagtgggctgaagaaaatctcaacaacggctggaggcgatgtaacttgagctatcgaaaaggaatggaactgcgacgaaaccatgtaaataataataatagtgtattgttgttctttggtatattttcacacacactctcttctgtaacttacaaaagaatattcataatcacgtttgaatagctcttagacacaaatgagttgggttataaattagtaattaacaatggcatgttacaaattagactaacaacattgtagcaaatcaagccgattatattttatttaattagtaaaagattaacacaacaaaagaaacctgaaaatagataagtggagggccccatgaccactaacaaaaacatataagctcttttcgttttgttactctctccattgaattctggcttgatcactttcgattctctcaaaaatcccataactttcccacgaaaaatgt

SEQ ID NO: 37691 - DNA, 7549 bp, Arabidopsis thaliana landsberg
tttagggacctttttaatttgttattgaacggttcccaccctaaggatttaaaaacacccattttatatttccagcggtgacatgagttcaagcgggtctcaaggaaaagaaactccccccaaccaaaaggttacgaaaaagtcgggtaaaaagttattttaaaatatgggtttcttgaagaaccagcttctacaaaaccactgatttattacacttctttttggggggttggatcttatttagataaaagtttccgacccaatctaccagatgtcactagagaactcaacgcgtgagaaccttcagacatgttctacacttcatggagatgcctttaattctgccattagtaggatgcacccatcggcgcttgcacaagtgaagcaagccttaaagctgccgtgattaaatgtttttgcctcgtgattgtttgtttccttatcagttaaagagcagcagtattcaagtgagtttctgattcgttgttattctctcttttcagcgtcattcattaaaaaacctccattgtgtttttctatattcatcagtattcaagtgattgaatgtttttgcctcttcaccatttgatctgactcgccacttcataactgttcaggtgagtgagcttttcttccctttacggttatggatttgatgggtgtgttacataggcgcgcatgttgcattgacctctgcgaccttggcggtttgatgaactatgtacatatctttgatgaggtgattcccttttagctgcccatgattccctacagaacaaaaggaggcatctttcagagacttatatttgttttcctttggtcgagtttagtatgtcaattcattcttcaatacaacgtttttgtcccaatgttacaaacaacactaaagaaaaggtgaggaatcaaaatagggagatccttacgatgtatttccggtctgttttttgtcccaagaactctaactttacatatgatgggaacaggtcggagtttttgtctctatctgtcgtactgttgtacttgctgatttttactcattctcccttatgaataaatcttggcttcgtgattttatagtcgaccgtttcatacaagtgttgtgatcgtacgcactgttagatcccaattgcagattttcacaaattactccttggtcgtgtaaactctctttactatgatgattttgtaaaaacacttactatggtatttagcaataacgggtaattaagcactgcctcttagttcgacatttaagcactgccgataatttaggccttaaaattctatacgaagaagtgtgatcaatttatgggacacgggtaatcggaataatctcaattgatcccttaatgcccttatagtatggatactaccgttgtgtgcatgctcggccacaacaaaaactgatgttttttcaaggaaacacaagcagctccgtgttctgagaaatccttattaatgatgagcttccaaaaatgggaataatgtatattaatcacctaagtgtacttcgaaggttctttacttccggtactgacggatctcttttacaacgccgtctgtcaacgagtcaacatcgtgattcttcccgtagaatttcacaaaattcatctccggactcatcaagtaccttcacccacaacatgtttacatatcaaaactccaaccaccaaaaaagagatcaaacactactgaacacatacaagatgaatcattacactgtaactatgtaaaatgtaactatgtaaattctgaaatttgagaatatgaacatgaacaattctaagtctgcatgtcgggttttgtgccgataactataatcttcctaacaaaatatgttaaagggataataagtacacgtacatgactatagagtgatcaacgagatagtctgaatcttcctcttcggtcttcatgtagtaaacccggtaagatcgggccaccgatttgatttcttcagggctcccagttaacccgatcaatttcgggtgaaattctacaagaagtatcagactatgaattttcatttcaaaaccaaatgaatctttcgaaatgaaaaatatctacctttgacatactcatgtacttgctgaactgtgtctctttcagggtccacagagataaacactggcaccacgtctacccccgaattttcctctgtgtaaatgtgatataaccttagaggaaaaatctccaaatgtagaatcacacaaatgaaaaaatgttggtatctcacttattttgtcaatggcagcagctaacttaataagttcgtcaggacagatatcgggacaatgagtgaaaccaaagtataaaatggtccattttcccatcaagtttttctccgtcacacgtttcccatcgtctcttataaggctgaatggtcctccaatggctgcttttacaccagatggcccctccttgccggctatagagttcttatttatatctaaatcaataagaacccaagtctatatacaaagaagaatcgagataagctcgaagagggattcagcagaaatcaatgtgaaatccctaagcattccctcagtgatagaagtgataagttcatttatcttgccaaggttatcactagccaaatcagatatcgtttgctaaggtctaaggcctgtgatcattaagctacaaacaatgtattcaattagacatttcagaactccattagcaaaatgtccgacatgatgcaagatattaagagctcggtcgaaatcctagcacctcagttttactgttattacacaatccaaactagaaaatgggagctatgtagccaaatcatgtaatagtagtctatactctacatgatcaagtttgtgttactttgtagatatgttcaaaaaatgaaactcaccatagatgagtaccttcgatatgacgtttcttttgtgtgtcataatagtagaccaatccagctccagtagcaaacagcaagaaaaagctcatccatgaaaccggctgcaatcaaaccaaaaactctccaatcaaatattagaccaaaacaaccatttaattctgcaattcaatcagagagactttgttcatggaaacagttacccctccacgaacgtcttttccagaagcacgctcgtttttatgatctgaaccaccatcagaactctccgatcctccagatttctcatttttctccgaagattttgtttccggtttacctgagtcatgtttcgaggtagtatcagaagcagaagtactcagcaaacatctctgatccattttcagcatttcgattccacagttaagtgaaaaaaactgcaaaaggaagatagcaattagagagctcaaaacaaagagaattagaaaatgaattcagatgaggagaagaaatgacgaaccgatcgaggaagagagaaatctccatgacgaagcgcgtcggagatgcacgccggagaaggagacgatgccgatagtagatcgctggagacgcgaatccgacgaaaaagttgaacggaacgaagacggcttgcagttctacatagagcagacgccattgacgaccaatttttctctgaagttcacaaattcgctgatttctttcctgcgagctgaggtttttaatctgagaggtgcaaagaggttttacactttataaaaccttctagtgaaacgacacagtttatattaaaacggcaaggtttgcgaacgccctttatacaaacaccttgccgttcagtttaaagcccgtttgggtcgacaagctcattagttttagatatttaaagcccattaagccggtttcaatcaattgttttagatatttatgctttccacccccagttttaacatgactatcacttagttccaactcttttcatgaagacccagttgactcaagagcgaccaacgatactttgattgataatggagtaaccaaagaacaataaaagagttttgcattaactaccccaagagaacaaaataagacccaacctcaaacagatatggcctgaggggaattaaactacttttacccaaaaaaaaactaaccactattcacatgatacgatagagagaagcggaaagacgacatgcaaaaaaaatagagggttaaatttatgatgggtgcatgagccttgcaatcattccttgagtccagcgtgcagtgaccttgagatcttcatcctctgattcgagacactcattaaggaactcaccgaagaaggtgaagttttggaacaactgctttgtgttctctcctacaacatccgcaagatcacccatcgctgcaaccgcggcttttgtcacgctctcatccctgctctcataacaaaacaccagttacaagtttaatatgtgcaacgaaaccagaaggaacaaattgattatattttcaaaccacatggtacggacctcaggggatctttggatactagttcaacaaactgcaggagatgttgagcgtagggcatcatgagctcggcttttgtgtccttgaacccttgtagtatcccggagtatgcctcaaagatgcttctccgcagttggtttgcataatccataagctcctcgtcaagggtatccatctgagcacacacctgagcagccccttgcatgatctgaacggctggtgctacatacctttcaaaatgagcaccaattgccagagcaatgtctccaaagcatgagaatattggaggcttcactgatctgtggagtgccccactttgaaggttttggataaggagacccattatctgatcgcaaaaaggtaggattttttcatccagggcacggcaaatgtcaccaagcactcctactgtgattgagcagacttggtattcttcgaaattctgcagccccatctggagatatttgaaaagctcgggcatgtatttcacaaactcagctccagtagcatatgcaagagcaccgattgcaagcatggcttcttcgtggacacttgaactatggcatccaaacactcttaggaacagcctcataatgtcatctgcgctctgcattatgatgggtttcgtatcctccctgccgctcagcttctggattataacttggagaacaccacacagagaagcctggacttccgcttgcttctcacggtcatcagttgatattatagggaggtccattgtctcagctaattttttcatgatggcagggaggagatgcgctatgatgcttgaggcctctgaaaggtttgaacaccggacaacctcgttcaaggtttcatacgcagcacctcttagcttagactctgccccatctgtacgctcagcagctgcaagcagatgtgtgatgatctctgtaagataaggagagagaagagatgaacttgctccagagtcttcatatccctgtgcaagattgtatattgctccacagaccttctctgcaacatttggcacatctttaattgattccagtaatacactcacaattctagggaggttttcgggtgatataacagagaagccactgtctggggagtgcaaaaattcaaagatacggctcagagtccaagcagttgtatccctgacatggttattctgatccttggttgcattaaggagaaattccaagccagcagcaaccatcggggcaagcttatcaattgttgggccctccaaaattgatccaaaagcataagtggctgcctcccggcttcgccaatctggcgaacttatgtttttttcaacaaaaggcatcacaagagggactacaccatctccaaccgttctagcaaccaggccaaggcatgtcccgccagccatagatatgttccagacatcgtcgtcatggtcctgatcctcttcctgcttcagcagagtttctagcaacatttgaactaaatggggaagagccttctctatgaaacaggagtggggaggggatgagtcaccactatcaggactgtcatactcttgacggtcgatctcttcatcacagatggaactccagaactcaattgcttggagggcaacgctctcttcatctccctttacagcattcgatgtgagctcaaagagtgtttgtatgtagtgctccagcacctcatagtatgtggatgcaatggacacaaggcactcgaaagcagcttgcctgatctctgcctccttggaacatgctgtctcgcataccatcttcatgatgtaattcctctccatttcattctcaaaatttgtctgagagaaatccaaggcattcaacagtgcctttgttgctgcgagacgaacttcagcagtattttcagactggttcatgccctgcacaactgctgtgaggacagaattcacttcatcttgcacaagatcatggtgtgatatctcttcacagacatagcctagagtttccaaggttgattgcttcaagtgtgcgggactgccttgctgagtcatattgttaagcagcgatccaacaagttcaggccactgcttctgaggaatttcaatggaggctaccttagcaataacctgagctgaagtatgccttgcctctagggcagatgaaccaagagttcttagtaagcgatccttgatctgaaatttaagagcaacatcaattgcaaaccattgtttcaccagatgatcttttgtggcagaatctttggcgtccagagaattctttagcagaataccggctagtcgacgggattcagcaggtttatcattgttggcaagctcaaaagacaaggatactaagaacagcggcaagttctgttcttggaattgcctgagattaccctctgcttcagtccggactcttgcatcggctgactgggcagccaacagaaactgtgtgatctccatcgccattctggtctctgcgcaacaaggacattcaccataatcagcaaaaaaaaagaggggttaatagaacaaaatcagcacaattctaaaaaaaaagggaaagctactgaacaaagtaatggtacaagtataaaaggcaataatactatacaaacggtcaacaagttcaatcagatggtacaaacaagagcatttgaacattatgagcaaatatatccatactccgagaaaattatatgagaatctctgcttggtgtaattgacaacaaaaaacattgaaaacaaacccaatatgaaatccgaaccaaagatgacccagcgttttctatgaaattcggaaaaagctttttctcctagtcgtgaagaacacgagttcaatttctaagaaggaagagacaaataagtggcagaatcacagcgagcgagtaaaaaactaaagttaaaaaccctgcagtactagtgacccaaaacctaatccgaaagcatagatctataaacagatatacaaatccagaaatcaatacacagttcaagcaagagatttacctggaaattaaggtttgcgtaaacgctagggtttttcgcttcaatttaaacaccacgtccctctcactgcagattctatccacaaaaagcttctcgaagaagggcaaaaaccaaaccctagagtttgcagagagagagagagagtctgtacttgaaactgtcgaaggagagagagatatagaaaagaaatttcaatttggaat

SEQ ID NO: 37692 - DNA, 8292 bp, Arabidopsis thaliana landsberg
gtctaggtgcggcggttggggttaaattggacagtttgccgaaactcagtgaaacacgggcacgtaataaccgaatgactctgatgcattatctatgcaaggtaagcttttatagtctgcgcttctgtagctttgtggatgtactagaggaagaaagatatagtctgatggattctttacagattcttgctgaaaaaatcccagaagttttggattttacaaaagaattatcctcgttggagccggcaacaaaggtactccactttcacattttacatggatttctcctgaaattgataagaaaacttggaactgcgttaattgtcttgtctgaactttgatacagattcaactgaagtttctggccgaggagatgcaagctataaacaagggacttgagaaagtcgtacaggaactttccttgtccgaaaatgatggcccgatttcccataactttaacaaggtatcactgtcattgatcactagttgtctctgtaaggctttctaaagtggaacaaaatagaaggctcatagattgtaggggctttgatccctgatttttcagtgaaatgttctatacaacaactaataaggcatctagacagttgctaactaacaaattgtgttgacagtgcgactgcatagacaattaaagagttgataattgattcatttgattcttgtttgaccatttttatcaactgctgtttcccctcagatattgaaggagttccttcattatgcggaagcagaagtaaggtcattggcttcactttattcgggagtggtatgtcccagaagtctaatgtacagtagatattattgcatgctctattctatcgttggttgagaacttgctcagaataaataaattatgtattgcagggaagaaacgtggatggtttaattctctattttggtgaagaccctgccaagtgcccttttgaacaaggtatgtgtatccttctctgtagcttaatgtgaaaccatgtgttccaaaagttatctcaacctagcaagtggttgtaaattgcagtagtgtcgactcttctaaactttgtaagactgttcaatcgtgcacatgaagaaaacggaaaacaactcgaggcagaagctaagaagaatgctgctgaaaaggagaaaccaaaaacaggtggattagatacagaaatcaagaagcccttaaatgaagaagttaaggaggagaaaacaaaaacaagtggattaggtaaagaaatgagtgaccgactaaaggaaagaaccgctccttgaatgaccggctgtaccgttttctatatggaaatggtctaagaccgaacgggctttgagaagaaaaagcacccggtgaagccgtgcgtaaaactggctttagaccatggaacaacagggagtgggatgctaaagacaacaatattttatctctttaacggcaaagctaacttgtaaaatagggaggggtataaaataaaattgtaattagaaagcaataaacataaatacattagtataccacatgtttggtcaatctcaataagcaaatgtcactttatttacctcattcacttgtttaaaactgtgaaagaggcaagaagcgatttttgcatatatgtaaatctttttttctcctacagcagctactttatcactagggaaattatgatttcatgctttttaaattcccaagtgagtgagtgtatttttctattgtgatccaattactcagcacaactgtattttaaacctacggtgatttgagttttgatatcttattcttcttttttcttttgcagcttcactatcttgagagagcattagatgcagaaaaacgttgtggagaaggtttgtcacgataatagaaaaagatataaaataagaattggtagattatcaagattccaatttctgagctaatcaacaccccgacacaacaaggaaggcttctttagagctttgatcgtagtgtgcatgtgtgtgtatgtatattgtcgtaacgtatgataaaagcatatagcatatgtgtctcaacgagaggatttcatattacaaacttttgcatcaatctttattttagactcctaaggccaacattgccagcaaggaaagaccgagatttgcagcgttggcaacggttcctgaagcaggaggaggatgtgactgagctcctccagttgcattggaggcagccaagtttgcaactggaggcagaggcggatcaatcacgtctttggcctcaagaggcgggtttggggcactagctggtggttgtgcttccttgtctgccacgacgactagaccaccggcttctgctggtaagattgcatagggctgttctttgttcaaatctgagcatggactctctgcatttgcatcaaatataaatgatcagctttatctttgttttgtatatctattgttctttcatgaccttgtcgaggtttaaacttacttaagtatctggtagcggtggcagggaactccgtgatgactccatcaacgccactccctgaaatgaatgtggcaagctctattgtagggtcagagaagtagtcgaacgctacggagatgtactcgtttcttagcactgaaacataaacagagatattccctttgtgcatttcctccacaacgttagtcttccctgtggtaaaactttgggagacagtgactagggaagttctcaagagattgacagcttctgcgtacttcttgatttcatcgactgatggcttgggagcacctccgatttccttgtcaatgctcaagactctcgtgtacggagggacagcctcaaaactggccaggaccgaactgtcatctgactgaatcaaaactttctgagttgattgcttgtcgagtgtggacttggccagagccgacttaactgcgtctacgactcctaggcccttctttgaggctaggtaagcagcattctgtcaacaaacaatgcgttagaagctgccttgagtaaatttagaagcattttggagttacaaagtcttgcctcgatgttgatcataactccggtgacagcctttgctttgctgaagtcaaggaaatccgcaagagtaatgaactttccagcgtttttgtttgctggatttctctggaagcccgtggcagtgaaggggttctctatttgtgctgaatacaaagatatcccaatgctcagtgacttagttgagaatgagatagtttcagaagtctatagtaaaacaaatcagtttcttacgcttcacagactggatctcagcccatgtaagatcaaaagaaaaaatgccattggtaggctggatctcaggaacgcttgtggctcgggacatgaaaatagtcatggcggtggtacttgctgtaaggtctgcagcatcatggcagaaagcgattccgtctttagacatctgaacagagcagtcgatcacgtctgctccatcatcgactgctttctggtaagccagatcagtgcagcctggatagtctccgcttgctccattgtgagttataaccaacgcatgccctgctttggggagattgccattttggtgagaaaagcaagctgcaagaaaacagacgctttagcttcttcttaataatcagctatctgaggaaacgtatatagcaagtcatctcactgatggattgtgatgctgttggcgggaaatcagtaatgacgccatcaacagaaaactggccattgtccacaaactggagatactcagcggagggatcatagctgtagttaaagctggtgcgcaagtcattggcaaaccctgaagcatagacctctagaccggctttgtgggcatcagccacaaaagtggtggcgggcttaaggtacttagctgagtcaatgggccaaatgtagtctttgggcacaagaacgcctgaagcaaaggccttgatggctgcgaggttctgctgaatctcactgtacttcttgttggtggtgggctcaactgcctctgggtctttgaactcgaatatgagctttgtcttggccctgcccgcgtccatcccgatgctcttcaagaaaccaatctctggagatgagatgacattaatgccgcggaattgcaagcttctcaggtactcggctgggctcagcttgtgttccatgtagaaggcatcgtactgcacatttgcattgtttgttgttttgatgaatcaacaaaaaagctccatatgttggttaatcatgttctcaaagagaagaaaacatacctgaacgctcaaccaaaacttgggaggcttggttccaaggacgtcctccactgcggaaaccgacatttggccgtcgaagatgctaggccgagagaagatgttctggaccactgctcaataatacaaaacatgaaaatgtgtggtggtggtggtgagcattgaagggaggaaatgaaagagaagaagacatacgagtgactttgttgaatatggtgtcggcatcgtaatcaatgacaaaccagcccttgaggtcctgaccgttgaccttgtaggtcttctgggctttggggaagaccgaggagatggtggttgcattgtcaagtctgatatctgacaagcaaaggcccacaccgtccttagtcatctgaaggttgcacaacattgtgaagccaggcgagctggtgccaatagccaagtcgtttgcagagatgcttgactcagggaaaagacccgagaagccccctctggccacaacggcaggctcttgtcctggaagacaaaagacaggtacggattcttagaaacaaacaaacaacatggtatcttaagtcttaacattaaacaacaaaaaacaacaacaacatggtagtatgcaatatgggcatactctgtaaaaggatgcttaccgttaagggtaagccatttcttggcaggaacagctgcggcagcagcaggagtcttgggtgccgcaacacaagagtctaagaaaagggagaaaagaatgaaaaacctcagcatctctatctgattgatcctgcatttgtgtgtaacgtacgtaccccaatggaaaagcaaagtcaggatacatgtaacaaaaacagaattgtcacatttaagaaaattgtgaaagagagatcttacagcgagaaaagaacatgaatcccctctcctgcttgttttcctcgtttagttagaggaaaggaaaaagaagagaaagaggagatgggtcaaacaaggttaattaatggtaaaaaaaagtaacttgctctcatatcctccatttatggccatttactcctttctatttttatctcttcttctccaccattcccttcttaaccgctttttctttttttgatgctttcttacatcttctttgcacaaatgggtgtaacacccctcagttttggactttgtactatattcatttgtcatacatgtatgtagttaaaatgacaatattagagtttggcattcggaccaaaccaagttgtccgatctaaaccaaaccaatattccgttaataagaaaactcgattggcaaaaattaaaatattctttggtttcagtttttgcctagacttaaaattcttaaaaatccaattctatgtgatggaaaaatctttgattccggtccaattctgcatcaatatatgctaaaccgaaccgagactgcccacataaaattgaattgaaccaaaggtttttaatttttacttcaacatagcgaataagaaaaagagggtatatattcattattcaattattcaatgttaatgagaaggcgtctgcgtttggttcgacacctcaaaacttgttttgcctttagcatctccgagtaaggaatccaggtccaaagcctcttctcttcctcctcctcgcttccttctcacgcaaccttggatccaccgcagctatgaagatcaccgccttgctcgttctcaagtgcgctcccgaagcttctgatcccgtcatcctctccaacgcttcggacgtctctcacttcggttatttccagcgatctagcgtcaaggagttcgtcgtctttgtcggtcgcactgtcgctagccgaacccctccttcccaacgccagtctgttcaacacgaaggttcttctccttcttcttctacctctctagatcgattgttttcaaatcttctttctcccggatctaatgcaatctcctttcctctttgatttttattcgatttctaaattcggatcggcttttcgattttgaaacttttatgatttaggatgtgcaccgtttctgattctagatcttcctggactatgccccggctttaatttcttgcgattctatcttattgttctagtcctcgaatttgggataattagggttcgtgtttttattttgtttttggtttagagtacaaggttcacgcttacaatagaaatggcctttgcgcggtgggtttcatggacgatcattaccctgttcgaagtgctttctctcttctcaatcaggtaatatcattatgttgaaagtggttctcaatgcatcattcgtaagttttcctgtaatttgggttgcttgacatttaattttgtctcaggtcctagatgagtaccagaagagttttggtgagtcatggaggtctgcaaaagaagactccaatcagccttggccatacttaaccgaagctttaaacaaatttcaggttcttcacttgtgcaactgtattcgctcttttactgtgaattttgttaaaactgtagttatattaagctcagttaggtggacattagaatccaatcgaatgattcattcttcatgaattaattttagtagcccccattgttttatgaccatgttggattttgagtgatttgatcttaaattgattttgggattgtcccgtatttgtaatcttcaggacccagcagaggctgataagctgttgaaaatccagagggagttggatgagacaaagattatccttgtaagtgctgtctccggtcctttcttgtagacccttatacataagctgtacttccttttctaagtttcagtatacttgccaattatacataaatgctgttctgtcggtgagtttactttcttctgaaaaacaccaaaacaagaagaaagtcttggtagttatgatggatgtccctgtctccgtaagactgattttttgttctgtattgtagcataaaaccattgatagtgttctagcccgtggtgagaagctggacagcctagtggagaagagctcagatttgagcatggcatcacaggtaacattctaaagtcacattctagaaattcttatagatttagtttccttttttccctgtctcgatctctgagcatagttggtgaacacgttagaaagggttgttgatttagcaggcttataagtgttgttgattgatagaggaactattgcatgttattgttggggtagataaatagaggaagaatgtggatttagaataccttctttgaaaaagctttctgcttcagcctgcagacatttgagtgcagtttgaactatacagttggattttggaattattaggtttgctacgaagaatcatagtgttttttgctatatcatctgaccatggggaggaacatatgtattagtcatatcctctggaatctcaagatattcttcgttatttagattaggtaaaccatgtttacttccaacatgaaaatctgatttggttgtattggttggaacagatgttttacaagcaagcgaagaaaacaaattcatgctgtactattctgtgagctggaagtcctgctgggtatatagtcaaccaaacttttgctggggggagactgttttttctatcgtcttatctatacatataattccgtctgtagtttgcatgcattattttgattccataagtctcgagtcgtgtggtgtgtttatccaaatacataatgtcaacttctgcaagatttgaattgtctttcccagatttgatctgattgaatttgtgtgcgcttccttatggtaaaagagacgactttgcataactagatgaagatgtcgtaaatagacaaaagcagatgatggaagataactagagtagacaaagggggtatattacacagacaaaaggatcaaagaggtgaaacaaagtctttgtgtgccgtgtaatctatttgccgaagagagatttgaaccaccaaacgcccttggagtcttcaggggcagtgttggactcaggtggtgtgtcactctgaggagtcttgtgaagcttgctgatgtcataaccttcctccactgccttctccaccaactgcttatacgtctcttcctccatttgcgccgtcctgctcaatatggacaccgcccacataacagaaa

SEQ ID NO: 37693 - DNA, 1449 bp, Arabidopsis thaliana landsberg
ggtggatccattcccgcggctcttttcttgaaacaggtgagtatatcataagagtggaaacaaaagaacacatttcaatactgacgctattggtctctaacgaagaaccgggtttggttaatggttgcagtttgtgagcgaggatgttgagtggatgcacatagatatggctggaccagtgtggaacgagaagaagaaagctgcaactgggtttggagttgcgacactagttgagtgggtacagaaccattcttcttcttaagatgaagtctggtgatctctgactgatgtgaactagttgtgtttttgctttgtgtggtgggacaagttttttttttttgtgcaactaagtatgacaagttaaatcaatcagaagattagttttgttgttgaatgcttacctagtctaaacttaaattcaacaaccaccgtgagagacacagttgagccaccgttgttgctgtgtcccgtcatgttgttgtatttgaatgggtccgtgagttgttgagaaggagagatagtcgccgttcattaccactacagccaccgtgtgtcaccggagagtgacaccacgagtcacaggatgtcaaccgctgtcaccggagtagtcgtagtccatcgccaacgccgttgaaggttaggaaaccctagatctattatgtgacttgctcaggaaggtcctggctttctcttatgatctgggctttgttttggttttgattgttgagctatgagaccttactgccgcgagcttaaaccgcctcatcgagccccgagctgatccaccgagagtaatcgccgagaaaggtaacggcgaaccttatctcccgtgtttgttgttgattattgaaccggatcttaaccagtctaaaccaatgactcttaatttagttaagaccagaaccgaaaccaatgacaatttgcgttgttggtgtattattacgtctgtgtggtgtaactagattataagaatttggtttggtttaattattaaaccaagtctaattaatttaattggaagaataccaaatcaattaatcgagatttctaaatttggtttggttattagattaaatcatgtatttttaattggatttcacctattgatccacaaatgagttacaaaagtgataatactgacgtgtttttcaatttcttttatcacttcgtgtaagaatgccttgaaatatttgaatttctataaatagtatcaaaactatgttttgtataaacaactttaaatttgaaggcaacaaataacagtagtaagtatttcagatatggttatcaagataagtttagtaatagtgaaacatgatcacattaaaatttgaaaagaagtctacagctaatcaagattgttaagatcgggtcggataatagcaatagtgagtgagtcaagtaaaagaataatcatcgtcaacaagacacgacggtcggacgcgggcg

SEQ ID NO: 37694 - DNA, 7359 bp, Arabidopsis thaliana landsberg
ctatttggtactaattaagtaaaagacaaagaagcgacaatgtggaagaactgcaaattcaccaagacatcattggcatggctagtggctcggctttcaactcgtgagaacagtttattgcttagctcttcgcctatgtgtgcttccacgagcactccggccacactccgacaactactagcaaaggcacgaccaacctctgatgcatcgtctggctcactcaccacaagtggactccctcctttgtatacaaccagcttatcaattgcaaatgagccgttggcgtcaactacttccttgaaatcttgcaagcttggtgcgtacaccgggatattgaatccatctcgtttctctgctgctaccaaaccctaaaacaaaaggttaaaattttgtgtcaattacgtccaatccattggatgtaagaaaataaaatgtttgaatacttttatgatgagcctcagtgaccatgttctcgtaattcaatatgtggatttatatgtattgattttttttaaataagttaaattgtatatatactttaattcacactaacttttatataattatatctgactatattttataaatttaaaatgactttcaacacatgtaaactttactttctggtatgactatatgatctaacggattaaaatgattatgttagaaagcaacgtaacaattcttgttgtaactttttgtatgtcttctttttctaccgtacttcaataatatggcctgccgattttgtctctacaaggtcatcatgtccattttttcctgacgtataaaatgataccgtagcgatggatggttcattttcatttatgatcgataaggacaatcccacgggtaggatattgattgttacatctaatacgaggagtgatgagaatgtacactaacgtggtcttaaagccaccacaatcattttctgtttcgttctatatggatttacagataataatttgtttaagaaaaaaatatattttgtcgttaaacttcatttcaagaaacttgtggataacatttaaacatatgcacaaaactactatactacatttgataaacaaaattaatttatcatggtggtcctatatatacttaataacataactatatattgttactcaggccggtccaataaattaatggactcggttttaagttccaaattttttacttaaaattttaaatatttaaaatttagaccttattttgtaattatttaaatattttggaccctaaaatataaagaaaaaactgaataaagaattgggacccggtgcactagcacactcagcacctcccaagaatcggacctgaacaaggtaatagggatgtatggtatacaacataaaccgaattcaatatcattaaatatgcaagaggccatgcgagcttgattttgattgttgaataggtccatatccatctttctaagacaacttatcaatcaatagactgaggctaagtaatttgactcattaaaaaaattacatcttatccctataattttaagaacgaaacttgggttcacccctaggggtgaacccttttattcacctccttttgcattaaccaataaaaacatgtcatatcaaattctacttaaattacgtaataaattagagctataattataatccaaaccgatatataattacgtttaattacaaaatctaaaacctaattctcctttataaacccaaaccgtcatttaaactcattttatcataaaaaaactaaaccctaatcatattttttaaacccaaaccgatatttaacatcgtttaattgtaaaatctaaatctgtttataaacttaaaccaatatttaacccgtttaatcataaaatctaaacccaaaccgatatttaatcacagttggtctcaaggcaagacgaataggtttgatcttcctaggtaattatattccattcttcttcttcaatttgtaaactattccttgatttcttccagtcacttccagaaacattgaaaaccctaaacctaacaagccctcccatgtgttttgtgtagagtttgtcgcaatttatatgtctccgtatcttgtagtttgtttctgtaaacactactagtcgatatctgttcatatgagaaatttgactagggtttctcgcaattcatctgcacccttcgatttttaattgacttgttcttaaatttgattagggtttagattagttaaaattaggtgacgtaggaggcaagaaatgtaagtgtaaatgatgacaggcgcttgagttttgctggttctttactgaatttttatggccagctctaagcatgttaaaataaacattgtcgactttaagcattgatactattgaaagggcaaaagtaattatgaatgtatatcttagcttcggggatacaccaaaaaatgaaaaacaagataggagattgtttagcctcactctaatacgcttttactttgaaaagcttgacttgtaaaatcagagctttctttgctgcttcaccataaaatcagagctctgcctaactctgttgtcattcttctttaacccttgagtctgagccataggagtcatagccacatagatggagtttggggatgacgaagctgcagctgctgctgccactttggctgctgctgctgatgctgctaccattttctgtgcaccgtctctaacttgaatgtagtcatcctctatcgaaaataactgcaagccaaaaccagtttagcatttcaatattttgagaaacacatgaaatagtttggaaattgggatgagacagacctcaagatggctagcaacaaaatcatccagcttcccgtactttttcctgtaatcatgccagtgtagaggggctagcattttgcccaaacggtttggaagctgtattgcacaatatgaaacagacattatacgaaagccctttttccaaattcaatggttaagtctcattgtggttttctattagtttgctcaccgttgaactgattctgattctcccaccagctggtatagtacggaggatgcatgtcaaaagcgacctttcattgagcagagcgcactctgagttcctctcaggttttccggatgagactagagtttcagggacaatggatttagcaccactgtgttcatcaggtgaaacctgaccattgagttcctgggtatagaaattgaaaacacacacattcagaacagtttctctatatccaacttaactaaggctctacaagccaagaaaaattgctaggtaatatgtgcactgcatacctcaggtttctgattctgggaatgagaatcaagccttagggcatcacggaactgtgaagaaatgtcttgaaagttattctctgactgattagatccattataatctccattgccagattccactgcctgttaagaagtattttctaagaaggtatcgtatagaccacggtatatccccattaagtaataagaacacctcctacctgttcattcacagaggatggtgttgtcgtagttccgtattgtgctacttggctagtttgaatatctccgtacccttgaccaaaggattgtaccaagccatgaacaccttgagatggatgcacatgattctgcataggcatctgtgaactatctggtacagcctgagcctacaaaaagagaatgaaagacaatggtcattaactataaaaaatgaaacacaagctgcattcttaagctcacaccttttgctgtagcaacactgattgttcaatatgttgtgaagggacctgaggctgaacaagctgagaaatctcttgttgatgcatgacaaatgaatgcagaggggtcatctgaccagcttgaaggaacccatgtgtcgcaagattggaagctgatatcccatcaacacggttgttctacaaatagttacgggaaaaaggtagttacagttaggatatgaagtggagcatgacaaatctagaatttcgaacaatcagcactagattgaatagacaagtgatgaaacaactacttccaaatacaaaatcaaagaacttttatactggccttcttaattttcaacacagtactttttggagtgctgggaatatccaattatttcacttttgcttgacagtttcaatatctaatgtttaacaattaaatcggctgataagccaactgcattagcaaatgtacagattcatctcaccacaagctaacattgtattgtgataagctatcatcttgtaaatccaacacaaaacgccaattagagggaaatcattcaagagaatccacagaaacaaacatgtacctgggtagccttatcatcagttgaagtaaaagatgagatgttatctgcgctttttccatttgaatggacactaatgtttgcactttctgcgctgtttccatgagcatcaaattggttcccgctgttctgaatagtctgggaggctccaccggagtttgttttggaaccaccagcttcccttacattagcaagctcttgctgaagctgttgcactgtgtgcacatgcaatctctccatctctgcaaactgaactcaataacaaggaacaacataagactagagtagaagcgtctcatggaaaatcaattaggaatcggaagatactcagggcaactgacctgcctctgacaaccatgccagagctggttatactgctcagtacgttctcgcaattcagcctgcaacgaatgatttgtagatgattgtaaagcatcaatctcttgggcacgagcaatccaaccttgtgcttctcttagttgctcatccttgtacaggatagtttcttgagcaatcctattctacaagccattaaaattaacgactcttgttttagtgtattagaatttcaaaaatgacaatgatatataactgaaagatccataagcatgagatgtttaaaaaaatttgatcgtgtcacaaaaacaagggaaaactaacttgttcctgcaattcactgagctgactctctttctcttgaatatgctcctgaagttcagatattttatgtatattctgggacctctcagcttcagagtgatcacgctctcttctgcatattaaagaaagagaaaatgtatcctgttatattttctaaaacctcatgcctgaaacgtcttatacaagtagaaatcaaaggcctgatataatatttgtcaaaaacgaaagtagcagaacccaatataagatagaagaataatagattaatgcagtataataggtaaactcgtacagactaaacaaagagaaaagagataaggaattaacagcacctgaatgtggcaagttctttattttgttctcttaggataccctctttggcccaagcctagtagcagaacaaggagagtaacaaatcattcaaatttatatcacaaaaaaatctagtagtaatgaataaacaaacagaccgcttcattatctagtttaatcgcatgtagctctctgtctttctcttctaacttcctctctgcctcccgaatagatctctcattctcatgaagttgctcctaaaaagtcagcaacagtcctttaacttccacgcaacacaatgctcgatgaaataaataaataaaaaacctgctaatataccaggaggatgaaacctaacctgcattctagcagcagcattagcatactctgtgaattgagattcatagttgctctggatctccatgatctcatgtctcgcaatcatctgagctcgaagctcaatctccaactgctgtaattctcctttctttctagaaacattaagaatctgctgctgcaacatctcactatgtgaataaccatcctggtctcttccattctgcacaacaacaaaccccattaagaagtcgggctcactctccaatgagtacagaaactaagtaacaacattgcaagaaagaagaaattaacctcataaatcgttctctcatctgtcctgttcagctttaactgttccaaatcctgcaacaaatttgactaagccagtcaacacatgaactaggaaacaaccaaaagcaaatcactttactctctacaccaaacaattacagtgaaatctacaaaaacaaaagagctataacgagaacactacgaaatgcaaactaaaagatgcaacagtagcaagaaaaatcaaaactttcagattcagtctacacattcctctgaacataaacataacccagaagaataaacgttaccacataatctgtggtgtcttgtgaatccgaaacggcgcgccactcttttcttgacggagccgtcggcgacggattctgaagggaaccgccacgagttgtagctacgctcgaagcggcggtctccattagtaaagaaactcaccgaagagacttcaattccactatcgcactgaaaaaaaaaactagggtttatcggaaatgtgagtcaagaaaaaaccctaaagtattgtaacccagaaaatttacagagatgatgaaagaacccacgattgacgaagagaagagctgaagaaaggtttaagaaacgaaaatggtggaaatgtttgacgcagaagagacgaacaaaagtgagagctagacgagacgactcgctgaaattacagaatcaatcattttagcaaatttctttactcgtgagagtgaagatgacgtttcaggttctgttgggcctattgggctgagttttctttgacccatttaatccggtttgggtttagtttcggtttgggtttagtttcggtttgatttgttaaagatttgtttaagtctaaattaaaccaaattagatcaatttatggtttaagaaatattgattttatcattggacccaaaccgaattagtgtacgggcctattgggctgagttttagcaaacgtaggagatcgagtttaaccttttaatctcgctttggtaaaaactattttagcaaaccattaataagttttttacttccaatttttttccaactcttagatcatttaaacttatttttgggcaaagttaattgaactggaatattttaaacttttatttggtcaaaagtttatgttgataaggccaaaggttttataagtatatatctcccaaactaataaaaaatttaatgaaaattttgatttacaatattcaagtattcgtaatttactaaaaacataacaataataataccattttaaaaaattaaaaatattaataactaaatgatgtggctaatatttctgaagttttcatttggtaaatgatatgacaaaaaataatatcttaagatttcctcaacaattcctcaagtttttttgttttttttgtgggagcaattcctcaagttaagtatcccaatttacccccgccccctaatagaatttatgaataataacgaaaaa

SEQ ID NO: 37695 - DNA, 2762 bp, Arabidopsis thaliana landsberg
tctatggtccagatgatgttcttcgaattggtcggagtttgttttagacatcttataattcgtttttcaagcgggtgggctttacagattttgctcgagctaagaccgtttgttcgtcgtggtactttgcttccaaatcatcctcacctagaaaaaatcatactccgtggttgattctctaccaagacacgcactggctcatgtttaattccgatgaagaaaagttttacagaacagtatacctaggtcgctttgccgagtgtcgtggcgtggcgtcttgtgggagttgggtcttggtctttgacaaggaaatcaatttctacatcattaatcccttcacgccacagctcattcgtctcccacctcttgaatattcaaacaccggcacaaagttcgagcgacccggtaactatgtattccacctactcttcgacgatcgccacagaacaaaccgtgcaatagtggggaattcggttttgtgggtagacgaaaaaaccaaagactacttagttgtgtggtcgtacaaggaggcatttgttccgagtccctacatatattattgcagtaaaagagggcaagagtggtttgagattccggcaagcacttgtgggaagctattccggtgtttggatatggcctacaaagacgacaagctttacatacttacttccaatggtagcataagaatcttggacttttctcttggagacttgcctagacaaatcgacaatcatccatactcccatcgaccgtttgttaccgagtttcctaatcataagatgggaatgagactaaccacgtctggggatgtcgtgatgatccaatgcgtgacaacaggcactcacaaaagaagcccgttccgaatcttcaagttgagtagcactacagagacgaaggagtcttctcacgaggtggtagggtgggagagagtgcattctttcgaggacgaggagtcgttggtttgggatttgagcgtcactttaccaaccaaaggcgtatccggaatcaagaaagattccatatattacagtcacacttctctatcatcatatattcgggaaacatgtgcttatgagattcctacgcacaagatcactgcatatgacattcctaagcaggatatcaaacctattcgacaccgcggcatcttgattggagaggctcgttggttcgttccttgtttcggtgctggtgaataatcctctgctctagattattctctctctccctctctctcttaggttcgtgtttacaattttgtgcatctttaattagagtagagtatttataataagaagaaggcttcacctattaaccatgtttttcctttttatttattattgttctatgtctcgacaggagtttgaagatcgggtcactactgtcttcatacgttaaagaccagtaacgggccaccgatatgaagattcaaatcttgatatgagcgatacagggttgtatttatccacattttactttattttcttagtttgggactcctctatgccttttactttatgtagactttgacaaaacaatgtttttatgatttctatatttaataaatgcattctttgttgagaaagaaagaaaacgcaaaacaacaaattagaaaccaaatccttctgcttttggaaaataatcatatagaagaccacatatgatacttagaaccgaaaccatcttctatactagctccctgtgaattccagagtgcttcagatatgactttgctaatgatagttttgcttcaatagttgcggtaagtttctttgtcgagaaactgtttctcgtcttgataggctgttgcagaaggaagggctatataggggaagaggtctgtataactttttcttttctttttaagcctggaagtatctttttcttttcttttcgacttaggtcttcaattctatcgcatcagttttgtgatagtattatctgcagagtttacttttataaagcttgtcagaaatttatctgttatggtgaacaagtgtaggttcaccttctgtgggtcaatttggtaaccgatggattgcgtgccattgccattggttttaatcgataagattccgatgttatgaaggcaaaaccctcaaaagtagtagctgtaactgtagtaactccgtgtggattttagttcatggagagctgtaacttgatataagtttgctgtcgcacgatatagcattagtttgaattcacgcgcagagctcgtaatactatactgatttagttacaaacgttatggttctaatgatgatggtacctgtcagtaaatttgaagaagggattttgtacttctcaataactatctccctgtaatgtgccaatttattttcaaactccttagacattttatcttcattaatgctttgattgttgttgaattccaggttggggaagcagtgatcactgggtggtaattcttccactatctggttatcggaggtagacgaaaaatggtggctttgtaacttattttaatcattttatgagaaactaatatattggaatctttgtgttcaagtagtgaaagttgaatttgcgcctacaagcatttatccttgaagaggacttatctgcttgatttgttttatatttctttgcagtttatgtaggcgcctggcaactgtgactggctttatatggttgagtatttactcttatggtggtcctagacttatagtgaactggttaggttttgatccccagatgcattttcagaaattttcatcattcatgtgtgtcaacctcgg

SEQ ID NO: 37696 - DNA, 2602 bp, Arabidopsis thaliana landsberg
aacggttctttttgtaacggtcttaagtaaatgtgtggtcatagaaggtcttgcaagtttttatctgctggaataaatggctaaagagttaatattggccatttatctgcatgttaaaaatcaattgctgggttgctatttactgcatagttagcctttaatctgtgctcatgtgatggaattattgcatacagttgaatgcctcccaatgctcagtcatatgtaatctttggcttgcctgtgcgtgtcttataacagcatgatgatcgtcgtagtgatggaaaagttgatagaagaccaacttctggtaattctcgccaaatttactctttccttctcttcattacataagcaaaaatatatgtctttaataatattggtaggtcttatgaacatattacttgcttttaaatgtttgaagtgagaggatcgtggagaagttcaagagatcagagtaaccgaagagctggagatgatgagaagtcacagcatcgtaaagacgaagacaaaagctcatggcgacatgataggttccgtgagagtgatgacacccaaggagcactctctaggaaacgaccagccttcagggagaagaagattgcagaggaaactgggaacaacacagacagaacaagaactgaggatggaaaagacactaatctaaacaatcgcagacagaacgaccggaactggaggagccaatacgcattcagaaagacatgagagaccagcaatgggaagagacagagtgtggaacagagatgatgaaagaggcgcgggaagcagacagagttatcaagctgatagagacagattcaacggcaatgggcgaagtgggtttagcggaagctggacaaggaatgagaagaaatgggaccatgacttgttcgatgaggcgaacaagagtccagctaaagccaccgaggaagaacagatagctaaagttgaagctttgttggcttcttgaagctgcttatgtcatggtttttggtatgtattcacctctactattagaatgcctgagtttgcaagtgtagaagatgatttctgagtttatacatataatgaaactctcctctttttttccaagaaagctgcatcggtttaaacttcatagatattacactctaaaccggacttttcttggggttacacgatttcacttaaaactccattaaagtaagactgacttgccgacaaaaaaaagtaatatggactcaagaatcaagatcctatcagtaaaagtcaattatactggattttaatataaaaaaaagaaggatccttgtttcatcgatcaatcatatatgtttgatgtttctataatgtttttcttttatttatttccagaaactatacatattatcacaaacatgatctcctgaatcaaaaacaccaaatcactgaacgaagaacaacaaaaaatgatggcaaaatatgagagaaaaaaaagaagaagaagaagtattattagaaaagagttcgtttgccaggacgatcagcgacctttaaggtcttatcgatgagatctctagtcttcttacgacggatggcgactctgacgctggagcttttgtccattttgatgtaagttttcttcttcttccttagcaaactcacctttgactttatcgtctccatcaaactctccaactgtaatcccatcttctccttctccttcttgcttctctaaagaaccctaaataactaagaaagacgattcaatttttgtagttgcagctcctctgacatatttatgcgttagtttttatctttttactctaaaacgtaacgctttcgagttctttggttttatggaatagtttgtgagttataggctttgaaattgagatattttcgatattgccactagttgtccttctttgactttaacagtatttaatttagtagtcaactgctgtagatgtcatcagtaatcacatttgcttttgtcaacaatcacatttacacacataaaaaaaatagtagtatctttttgttctccgttgcattcacacataataatagcatgatgataatatatcgtaacgtagtcgtagtgtatgaaattttatctcgttggtctttccaaacgtatatcatttaataccattgatttcaaaatcaggagaacgtcggaagatatatctttgatttatgataatacatagatgcatggataaggttcaatgatgcttctttcaatcttttatccccacactaacatgtgtttcatatcttgagtactaccttaattacacttaacggattcggaccatcgtcctattctaatccatgttggtgttaatatatgctctggaaaatgatggagaggccggagatattgcattgttcggaccgcttggtaccaatctttttgttccgatatcttttctggaaaatgatggagaggccggagatgttgcattgttcggaccgcttggtaccaatctttttgttccgatatctgctctggaaaatgatggagaggccggagatgttgcattgttcggaccacttggtaccaatcttttaattccgatatctgctctggaaaataatggagaagccggagatgttgcattgttcggaccgcttggta

SEQ ID NO: 37697 - DNA, 5514 bp, Arabidopsis thaliana landsberg
  unsure (1)..(5514): unsure at all n locations
tatcattttattagccaagaactctatgacagaaggatcaacctcaacgctattggggagtcctctctcggaatcatctacagctcgtctaagaagggtctcaacatgattgggtttcaagggattaagagttagaactctacaacgtgagagcaaaggagtgatcaaatggaaagaagggttctcagtggtggctccaatgaagaggatactaccatcttcaataacaggcaagaatgtatcttgctgtgacttgttaaacctatgaacctcatccataaacaacacagtcctctttttaccttcaagattaagccttttggcactctcaacggcgtctctaacatctttaactccgctcgtaacagcagacaaggaaacgaagcgatacagagacgggtccttagaggaattgatgagagactttgcgattgaggtctttccagtgccaggaggaccccagaagacaatggaagggaggcgattggattcgacggcggaacggaggagagagctgggagagaggagatggtcttgacctacaacgtcatctagagtgcgaggacgcatacgctccgacaatggctggtgttggcggtggctggatgatgagagcttgtgacgcttgttggaatcatcagccgcgacgtggatttgggttttgggattggggcgcttgctggaatcgtcacccatggcgggggctagggctttgggatggagacggaggaagcggtcgagtttgggctgtaacgtggccgtggattgaggggaagaacggtgggagagaatccagtcggtggctttctggatggaatctccgccggtggccgttaaagcctcggcggccaaatcgctggagaaacccatgctcactagctgctccatcttctacttctactgtgaaaaacaccaaagctgtcttagttagcaatagcatgctccattgactaaactttgttttgtcatcttaaagataaaaccttcaagtaataagaaaaaatgtaacattacgaactagaccatttctgagctaaaaaaccaatttcattttatttctgtgttccgatgtgatggaagatatgtataatcttctgtctgtaaaaaacctatacgcctaagcttgagaagctaatctttacatgtaaagattttgtacaaaacgaaaaaaagagttaaaaatcatcagcacggtggatctcgcccataatgcgattgctagtgactttgaaaccaagaagagctggatcgatctgcctccctttcttccctttcttcttcccgccaccacctttgcttccttctgttacatcatttgactctgccgccaccttcttcatgctattactcttcttcaacatctcactgaacgatgtcgcctctgacgttgaccctttgtttcccgctgctcctgattcccgtctcacaccgcctgataatatatttgcttacagacttgagtcccattttccatcgataatgcccaaaaatacaaaacgatccttgagatagatatataccttcaattccactatacgaacttgctgctgtcctgctagctgtgtcagagatacgctctatcaatccttcatgcgatgatgaagaatgggatgagggaggcctttttaacaatactgaattctgtccatgtgatggaactaccaacctacaaacaaccacgcaaaatttaatcggcaggaatatagaggtatgcgagttcaaggtgttttgtatatctaatctactggtgcttaacgtagcagaatacaaacttacctatccttccttctatcttctccaaccaagttgtcactgtattggtctgcagcaagacaatatcaggataagccttcatagtaacaaagcaaaaatcaaccttccaaaccatgaattcccggaaaaagcaaaatcttaaaagatgcaattactctgaaagatacataccagagatatttaaagcagactgttggccaggcgtaacaacaggaagctccccatgaaccagtgagtctaatactgcttgcttgcccattctatcttgggcttcaaatgacatcatccttcccattccctcatttttaggcggcacattgttccaagttttgatgtcattcgcgtctttgttcatagcatacatattactgaaggcttgagtttcattctgagttgaccgcccaccatcaataattccagaaagcaaggaattattacggtgcaatgatcccatattgttcctatctccggatgatctgttgatctgttcatcagaaaatgctcgagcaccaaaagttgaaggagcgttatgactaccaccatgatctgaatagccgccaagtgtttgaatccctggggtaaggccagaaggagccatcctgtcaaaggattgcccacggttcatgcttggtgattcagcagattgatggccgggtctctggtggagcaactccataaatagctgttttgacctgtcttctgtagtcccacctaacatccatgagttggaatcttcacccattctcctactttctgacctcattttatgatgttcagcatcaatatttgatctatgaagttgagattcggcccagtcaccaacaacctgtgtgtcagctccagaccaacgtccttccattgattccaactgtgaaaaatgaggttcacctattggtatacggggattctgatgattaaaacccagagtagaattcccaatctgcatgtgggtagtagcatcccgcaactccagaccttgagagagtccaagaccatttactggatccagattcatccccgatacacttacaggtaaggatgctgatcgctcaaatggcagaccctgctcgaataattcttgtcgaagctggtgctgatataaaaggttccgctcaagttgaccaaactgatcctcgaagggtggcctctgctgctgttgatgaaagtctagttgtctaaatcctgtagaggatcgcgaacgttggatcccaggatgacttcttagaagctgatcattatggtcagatggccacagagggtcaatatgtctctgttcctccaatagtgtattgtgcctcactccgtttgccaattgcatcagctgctcttgctgcagcagttggtactccaaagaccgagttggttcagattgcagttgtccgtatggagattgcattggtccatattgagattgcatttttgttgaaagtagctgttcaagtagttccctctgatggccttcatgtggcaattgaccaaaatttccagcggcaagttgctcaatgtatggtgcaaaattttgtgacggatggccagaacttttctgcagttcattcattagctggtgttctaacaacatctgatcaacattgttggatcgagggaagtcatgtgactgcccaaaccttgaatcaggagtctgtccttgtagaatctgttgataatgtaattgccgagcatgggactgttgttgctcttgtaagagcttctgatgtaactgatgctcttgttctagttgatgctgttgcagctgcatcttctgctgctgttgcaactgaatcttctgctgctgctgcaattgaatcttctgctgctgttgcaactgaatcttttgttgctgctgcaactggagagttattaaataatccagatcctgagcttgatcacctatatgtgaatgcgacagcacatcccggttttggaattgctgttggtgatgttgatttgatgaaagttgatccccaaggttaaagcggttggaaacatgttcaaactgcgacatccggttagaagccagaccatcaagggacatgttgggatcaactnnnnnnnnnnnnnnnnnnnnnatgggccgattgtctattgcaccagtaggctcccccattgcatcataggacctgtttggtaacaggttaactggtacgttactgctctctagctcagaccacaacacaccaaacggatgcagcttattctcatgctgcttttgagtagcagccttagtggattcaacaggaatagcagactggccagaaaattccattaaagcatcatgcatacttgtagaggattttacagacgatgcataaccagaaactctagctcttcctgggaatacaatttctgatttggagaaaaaaaaaaattgattagttatgatgaacacaaaataaattaatatgataatgaaagcagatgaaaccccaagaaagacatatgttctcccacacaaatgcacacagatgcacacagatgacaaaaggttaacagcataacaaaccttcatcctgagcagagaagtccaagaaactttggtcctcggcatgtggtggtcttccataaacttcggactcagactttctctgaaaattatcctgacctgaagggttgttatacacagaaaatgaacgagatatgccagtcaaagaggatgaatcattagattctgctacatgtgcaactgatccaccagcctctgaatttgcttttaaactagtctcttctagctcactcttttggtcactgatatgggcatgtacgctttctgcctttatatatgacatgaccctgcctagatcttgaaaaggagtcccttctggagcacttgccaagcgaacctgtaggtctgtcccaaaaaacccttgttcaaaccatgaaataatgtcagaaccaatgaacggtccctgaattactccttgaggatcaatatacaagaataagaactcctcaggtggcatagccccttctgagtgatccacttcagtatctggttgctgcagcttgcccgtataagcttgctcgaaagacccaacaacggattcgctcccatccaacacagaggacttagtaaaaactgatctaaccgcttcaggacttccatgagaaagctgataaccagctccaacagatccataactttcagaagccactgaattcaatcttgggacgctagaagcagcccccagacctccattatgactaccaagtaatcctacaacaacagttgttcgacttttagacagaatacataggacatgaaaaatgcaagcaaactgataagaatggacgttttatctaaaaaatacatgatacttaagaccaagacccggttacggtttacacccatcatgcacgtaccggaatcattatttttcatggaaccattgtcaccattcataaaccctagcaaagcactatccacttttgtctcacctgactcaggaatgcggcatttcactgcagtacatacaaaagactaaagtcagagaagcattcgtcatctcatgctaggtggaaagataagaggccaagtaactagagacaagataacatacacagactgtttccacctaaggactcttccccagatgaagtgtaaacttcgctactaatgatccttcccttccatatcccgttaaggtttgcctaatagataaaatttagatactcagcaaaactcaaaacaattaaggaacagaaaaattaatgtacaccaaaagaaaagggaaatgaaaacaagtt

SEQ ID NO: 37698 - DNA, 3396 bp, Arabidopsis thaliana landsberg
taatttgctccactttatttgtgttagattctggatatcagggtggcagaggcgggtatggtggtgggagagatggtggatatggtggtgggagagatggtggatatggtggtgggagagatgacgggtatggggaaaggagaaatgacgggtatggggaaaggagaaatgacaggtatggtggaggaagagacgacgggtatggtggagggagagatgacggatatgggggaggcagaaacgatggatatgggggaagaagaggcagatttcgaggcggtcgtggtggaggcagagatgaaggatacggtggcggccgaggtggatatggaggtagaagtggcggccaaggtgatgggtatggcggaggcagaggtgacgggtatggtggaggcagaggtgacgggtatggtggaggcagaggtgatggctatggtggtggccgagttgatagctatgatggaggaagacgtgatggctatggtggaggccgaggtgatggctatggtgggggtaaaagtgatggttatggaggtggccgaggcggataccgtggaggtagaggcggatatggtcgtggacgtggaaggatgggtaatggtggtcgttcaagggatggtgctagtaaccaaaacgaagcctaagctgtttcatatcccattttctaagctgtatgggttagctgctgcatatttttccgttgccttaaagacccttcaaattcttagcacaatcccaaggggtttgatatgttttaaaaaaggttatggttaagttatgtgatcttcggaggacggttctgtaaaactccctttgggtaatatccatatcaaagcctaagggagttttaggaaggggggttcctttttggtttgttctctttacctttcttctgcacaaatttagctaagtgcaaaaataatcttttgttgcatcttgtaattagctatgggttatggtttgcttttgtgtttagtatttgtccaaatttctccgtataacgtgtcaaaataaatggttttctaagggagaaaagatttagtgcagatattggaaggagtaaaagaacaaaaagagacaaccaaacttagctgcactccctttagattgcatcttcaatcactcttaattctattttaatactttctttgaaaataattgaataagtttaggtgcactagaattttggaagacgttttatcttacgagttggcagaatagaagaaaatttgattaattcttagtcacaaacacaaaattaattgttttgaaatgtggtgatacgaagaacatatcaacaacatgagtttttctttaatatctctgagagtaaaaaatggtgctgcccaggatcgaactggagaccttttgcgtgtaaggcaaacgtgataaccactacaccacagcacctgatacttatattctgatatttgaatatattgaatctcatattacaaaaaagtcgacatgtgaaaatacgaagaaaaaatcataaaaaatggtgaaacaataattactcttcttcttcttgggtcaaaaactttgaagtatcttaattgtaaagtttctttaataagataataacaaattcagggaagggcaaaggcgaaaagtacgtaaaaaaaaaaaaaaatggacagacagaagagaagattcgctgtcaaagcacacgacagcgctttcttaattttttgttcagcatacgacagcgttttacgaatattttttctcggacagtttgatattttttgattataaattgaccaaataatccatcactccgacagttaattaccaagtcccccgcctgaaccggagcaaacccatcacgtagccaccagacgcgtcttcgacccacttcgtccgaacgtgcccatacaatagaaccttttcttcttaatttctttaaaaaaagatttcaataatcgaagaattacaagaaaagaatcgtataattaatcctctccttcactttctgggattcgaaacacgcatacgcaaattcgagatacacgaagaaaggatccagatcgttttctgctggtggagatagagagagaatcacgatgccggaaatatcgccggctgagctcgccaaggtttcttcctcgtcttcttcttcttcttcctcaagttccggcagagcgtcggtgaaaatcgaagagattgaaggcggtgctgctgctagtggcgtcgtcattgtttctgaagaacttgagaccaatcccaaaactgttgttgcctccattgctgatgaaactgtcgctgaatcttcaggtttcattttatcctcttcttgcaattgaaaagacagttttggttaattgttgattcctttgtctggtttggattcattctcgtttggatgattttcaggtactggcaataaaagcttttctcgagtatggacaatgccattggagggttcatcgagcagtgatagggctgaatcatcatcaacaaaccaacctaggttagataaatcaaagactgagaggcagcaaaaagttactcacattcttgctgaggatgctgctaagattttcgatgacaaaatctctgcagggaagaaggtactgtacttctatttttggtttgttttttttctatcttgtccttcttctatttttagttatctgttatatatgaaatctctttgactttgaatcatgtgtgcacttccttttatgattcctacttttatggtcaacgttactctccgtgacactagtcgtttttggaaatgttatatatctgcagcttaaattgctgaaccgtatagctactgtgaaacatgatgggactgttgagtttgaagttccagcagatgctatccctcaacctattgttgttgatcgtggagaatcgaaaaacggtgtttgcgctgatgagtctattgatggggttgaccttcagtatatccctcctatgcaaattgtgatgttaattgttggaacacgtggagatgttcaaccttttgttgcaatagccaaacggcttcaggttggctcctatcttcatttgcacaatattatgaacctaaattggttgggagagagtaattgactgttttggttatgtaggactatggccatcgagttagacttgcaactcatgcaaattttaaagagtttgttatgactgctggattacagatttatcctatcggtgcaaatccaaaagggttcatcgagtgtatgtatgtaccaaacaatcccattttttcttcatccttgctagtatgatcagatatatctatgaaagttaaaatcaatatactggtgaccatgatcttttatggacacaccttgcacagaacatgggctttttgacttctggtcctggagagattccaattcaacaagaccaaatgacggacataatatatcctctact

SEQ ID NO: 37699 - DNA, 2428 bp, Arabidopsis thaliana landsberg
aactctgcttatttccaaggtgaccctctttctcctttgttatgatactttgatctcaaaacaagaaccactagattacatgtctctcggtctctctttaactatatcataagccttattaatatttatctacttattttatagaatttctttaggggaaaagtctaatgtttttcttttgttttttgctctagggagtttacttaggtataatcatcacacttgtggggatacattgtctttacactttatgggaattcatgaaccttggtttttccatacaatcgtggtatgtcactcaatcatttgggaggataaaaacaacttgtagttggttatttagcgtccttgatgtcatactcaagcttcttggaatatcgaaaaccgtcttcatagtcactaaaaagactatgcctgagaccaagtcagggtctggatccaaaaaatctcaacgagaagttgattgtccaaaccaagattccggtaaatttgaatttgatggctcgctttatttcttgccgggcacattcattgtgttagtgaatctagccgctctagccggttgtttggtgggtctacaaggtcgcggaggaggtggttcgggtttggcataagcctgtggctgtattttggtggggattttgttccttccatttctaaagggtatgtttgagaagggaaaatatggtatcccattttctactctttctaaagctgcctttttagcagcgttatttgttgttttatctgtggaaaactagtatagtgtggtaaggttttgttatgcacctatcgttaagtgtatcatgacattttctctattgataatgctatttatgcaatttgttttattgatcgtacgtaaaactaactaatgtgaaaccattcaaagcgttgaattacaaatgaacgttattctgacatacagcgatctagaattggcaagctagttttgtatgtggtatatatcaacacaagtatcacaacgaaagaagatgaaactaataaatgttttcttggttatttttttgttgttgttgattagagtcattttaatcaattgaacaaaatgaaatacatcaaaacttttgttaaccatatataattagatcattcagccattccagtgattcgataaatctttctctcgtaaagtctgtttgtaaatatggattatctactatggaaggtccttaaaagagaagaatatgaattttctgaattatctactcatctgaattttcttttggctagttttgtgtatttctaacaatatgtatacaccattctgtcaacaaatttatggattttactagttagtactttaaaatatattttttcgcatttgttcaatagtacaacaattaaaaaaaattgccgattgaaatattaaaaatactaaaaatagtaaatattgcttactcacaattacatagaaaaccacaatatatattaccaggtctaaaagtgtcataattatagattaagaaattatagctcactgtaatataattctcaattaacatcttacatttgtctgtggataagataacttcatacaaattaagctttttctctggtcagaatacagatttagatttctaacacaaaaataatatttaattaaaatccaacaaataaataaataaattaatttttctttctttggaagtattattactttttcacattgacaattaatactatcttttctttatatttaacttaacaaataaggtctacatagggtactttggtctaatcacaattttaaagccatgcgtgcattgccttagtctatataacttattctcccactcatcgactgccacaacactcgtaaagaatctgcgacagagattttctccgaccaatccatgtcggaaaacatggtgaatctaccggattctttgtacgaggactacagtaaactcaagttgacttcaccctccaacgcttcttcatcctcctcagctcctccgcccaggctcagcgtcgtagctcatccaacggtagagatgattatccagtgggtctgtgatattcataaaccgaagtcatacatgtctgattttgcgctgcataatctcgcctatgtaagtgcaacaaatactcttcgatgctctctatgtttgatatggtttttgtttgatctgtcgtctctatgtttgattcaacatgcttttgatctttgaatcctatgaatacattagtttttgagaaaagtttttttttttttttttctgattatgggaaattcttgagatctccgtttgtttcttgctgcataggttaacgtctttatccctacaatataatatcatctactctcgttttcgccgtcaaatgatagattttattcgtatctatcttagatttggtagcttgacatggaatgttcttgtttgcgagtcaatttggctttcct

SEQ ID NO: 37700 - DNA, 1358 bp, Arabidopsis thaliana landsberg
taagctttacctgtatgcttgttggttggcctcaacctttgcactaataatagacagcttggttgtaaactaccaagcagtggcttgctgtttgcaccaagcagatattatgtcttgggaacgctaaatgtgtgaggtattaccttagtgtgagcttcccttgcacccagcaattcagctccattgtgcagtgcttggggatgcttaatcgagagtttgattgttgttgcttccatggctttctgggtgctgcaccatagctgaattgcgaactatgatttccagccttgaactttggatcgaagtctagggtcagtctgggctttaggcgatgacgttttctggcttcagatgcccaagggtcattgagccatgtctccaatcgtccaatggttatcaaaaaagaataggtacacatatatattgtgtgttttcatggtattataatgttttcaacttaaattcttttttttgcatgcgtgacatttattcttcgaaatattttttccatgtatctgacttgtgagtcatttttataaaccaacgccaaacatgaattcatgtttcttacttgaaaaccccgaacaaacaccattagcaggagacactcgcgttggggtcgctcatcgacgacaagaagaaacttggcgtctgccagttctacctatagaaacagtcctacgtggccgcatgtgccgctatgtacgacaagctccggcgcagccgccttttggacgcggcgcagagcggctgctccgcgctatccatcgtcaagcagggggacctcatggtcgtcgccaatgtcggcgactctcgggttgttatgggcaccgcatttgacgacgacgccgtcataccgtccagctcatcatccacctgaagctcaacctgccacgtaagtcgctactgaccggccatgaattcttgtgcgctgggacgacgaccgttgctgacgttgtgtgagtgtcctcgaatacgatgtatgtagaggagtagcgcatccggtggggcaacggccaggggtactaccttgctgatgagcctggggtgcacttcgttttacagttcagccaagagtcgtcagtactcggtatgtcgcgcgcgttcgacgtctactatatcgaggattgtggcgtcatcttggcgccagaggtgacgcagaggaggaccgacaacaatgaccagtttgtcatcctcgccaccgttagggtagcttttgtgctggcttgccttcaatgctcttcgcaagcacacacttgcctttttgtttaagcaaaagcgtatgttggtacgtgtctgatgactaacgatgtacgagggaatttcttccggtatgtgtggaacgtgctcttcaatga

SEQ ID NO: 37701 - DNA, 4847 bp, Arabidopsis thaliana landsberg
aataatcattaattacgtaccaaaaatgaagagttttgttggtatcgagaaactcctatgattacatatctacattctgtgtatttgtatgtgcaatgattggactaaagagcagaaactgtattccaaagaagtacgctcagatgctctgtctacaataaaacatgttctatatttatgtgacttcatacaagaacatgaccagattctgaattttagttcgtaacctatagattactcttacatacagatatacaacttaaacattttttcatcaaaattctttagcagtaggtttatctcacttacagagctaacgtcctgttatttttgtgaggctcacattgttgatcgatgctcttgggtcgctttgtcccgaggattcaacttctgaagtgccccttctaggtataaatgcaggttgctttggctctggaaggtttgagttctcgctacttagcatccaaatcaccgttgcaacgctcggcctatcatttgcgtgatcttgtacacacaatagtcctacgtgcacacatctgcgtatttcattttcaaaacactcttcaaagatgaccggatccacaagagcaatatcttccccggtgttccagagtttccatgcctggtcaaaataaggagataaagtttcaagaatggttcaaaagctttaccaaaagaaaggtcgtggttttaaaatgagacttacataagctgaaagatttggattctgcccatcattgtaaaagcttgagtttcttcttccactcacaatctctaagagtatgactcctaagctgaaaacgtcagatttctctgagaacaaccctcccattgcatattcgggtgccatataaccgctggggtgttatgcttttgtcagttacataattgacaatcatcgaaaaaagatcagaaaaagctgtgtaagagttagttagggtggctactcactatgttccaaccactcttacggtgcttacttcatcctcattcccctggaaaatcctagccagcccaaaatcggatatcttcgggtttagattctcatctaacaaaatattgcttgcttttagatctctgtgtatgatcttcagccttgaatctctgtgaaggtacataagacctctgcaaatcccatcgattatgttaaaccgcgtcttccagtcaagaagtctttgcttcaccgggtctggattacacagcaacaaggtgcacaaacaagactagcattaggttctgttcatgtgcctactaagactgtaacagagttaaaccaaacgataagttcactaccaaatagatatgcgtctaaacaattctctggcatgaactcatagaccaacatcctctcttctccttcaatgcagaaaccaagcaatctcacgagattccggtgttgcagctttgagatcacgaccacttcattcacaaactcctcgactccttgtcccgatgttcgcgaaagcctcttcacagcgatatcgagcccttcttgtaacctcccctgtaaatgaaagtagagcaacttaacactccattgtcactttgaaattcctcctaccaatgaaacaaagaattgtttaagaaccttgtaaacagcaccaaatcctccttgtccgagcttgtttgtgatagaaaaattgttggtcgccactgctaacacttggaactcgaacagtggtagctctttaagcttgtattgattcacaaggattgcaccaacgtcattactacttaaagcttccattctctcattaagtagccttgtgtttctgttcttctctgttaaacaaagcaatgcaaaaagttagttatctaataatataaaatcatagagagatatctcttatatagttggaatgtaacgctaacctctatgcttagcgatcttccacagtgctaagacaacagtccctgcaaacaaaaaagcgcctactagcaaagttactgtgatcacaattgaccgattggtccgcttttctacaaaagatttggtgcaaatctgttatgatctagtaaactaagttggatggaaaaatgaggttgatactacacttactaaactctgaatctgcaagacgaatgtaaaaaaccacgccagtgccagaaaactcctgcatatccatcaagtttccgctccaaagaagacaaccaatccctctgtcgaatgagtaagccgtacaagaacagttcttcagacagctctcaggacagtcttgttcattggctccagatcgttgtggattgtggggcactttcatcttttgcactctcacaaatccatcactttttctacttccatcgttgttgtctcgactttcgcactgcaatggtgcctttcttacgcatccctgagtccagtttccgttgatccactccgcgtaactctgtggcttaaaccctctaatgcacatgcaaggcggagtcgacccgggattgaatctgcaactagcgaattggccacatgtggcgtatgtatcacactttgtcgatgggacctttaaccaggtcttccattcttggatagccacgttccaatctctctgaaacacgcattcttcggagtcctagagataatcgatacaacaaagtatttccagcataggacatggagacagatcctcgattgtcactactaagggttaactcgaaaagattgatacggtaatccatatttggtaacccaatgaagtattgaccattccatggaccgctacgccacatcagaagatcatctttccagacaacaagttctggaaatggcagaggaatcaaacctgcagagtatcgtccaggcgatggatcaaacgggcttttccaagatcttagcttaaggctcctgcctgttttcgtgtcagtagcaagtctcattgttggcaaatatatgttttgaggatgctcaaagctctcccaaagaatctcatccccagtattagtagttcctagcagcacgaggttccctgtattcagcaaccgggcatagaaggtgttagcagccaccggcaccaagacattggtggaccagtgaacctgtccgcgaccatccataacaacaagattcccttccttggatatggaaaccattccggaagagtcattgatcgggctgttactgtttgctacccaaaccacggtttgaacaggaatattattgaaccatatccctgcataacgtcctgtggagttaaccgggctgaagaaaccaaacctgaaggtgctgtggttgaagacgacagtctcagagtccctgaactcgctagaaaacgtgattacatcagtagccaaacaaagcctcaaggaaaagcaaatcaatgtaagaagaagaattagcaaacaacccatcttctcagcaactttgagagaaacgtagagctttaagggttgatttgatcctaagacttgaaataactttatgtcatctaatgtttggtggttacatttaattgccactggcagaggcaccacacttgacttttccgctcagaaataattggaaagtgtgatggggccttacgagcatgtgtgagataggggcatgcaaggagtcactatcagagacaacttcacattttgcaaacttgaaatcgaacttggaagccgttttgaaaccaggtcgcgcaacaacaggcaacaggagctcatgaaatcgacaaatgcaaacaaggatttaccgattccttaggtaaatgtctcttaactcttcaaagttgggaatagatagtggacgttgatcataggaagagagttcgctgcttgagaatagggacaatgtggtgaaaatgttaatgatgcctacatttgaaaccatcagagatgctttctatggggaaaactaaactgcagagagacaaaatagaacttatttgagactgtacaaacagtgaaacttcggaaccattatcagtctttttcccaaagatacaaacaaagacacatcggtaccattgatcttatgaacttccacacagtcaagagaaaagtcagaaacaggacaagacaaatgtaatggttctgaaagatgcaagcatagccatttcatggtaaagtttatttaatggtcattactgacaagatatattatttggaaccgtcaaagatgttattttgtaccaactattcaactgcagagatatacaagaccactgaaattcttttcactgctttttcaaagacaaacaaaagacatcgaatccactcatcccaaattccatagagtttaaaacaaaaccaagaaacaagagaatacttacaaaagagatctagaataccccaaaccccaaaaacaacacaattaagcacactcaagaacacaaaccaagggcaaaggaacgctttcttttctttctaagtctccttagggaggtctccttctgcaacatgaaagcctgcacaagatcagtgatcacagataagacatcattgattgatccaacttttgaagaaataacttgacatatccagacatcactgagacaaaaaaaagtactcacaaacagcaaatctctagcatatcaatagatgcatatgtaagttattggtcattaacatcaagagattactgaatacaactaaagcaatgatatgcgcaaatgttcaaacatacacacctcaagcatcaggaataaaatagcatcttagtggctcttcctaatatccaatcattctaaaggtcaaagcttgatccgagcagagtattactgattgtatataatattcgtaagtaaattgaaactgacatgcattcaaagtcaaccttgctgctactgcttatcaccagccccatggtagtcatccttatctccctaattttacgccacatcaggctttgtatacagtttatcactgtc

SEQ ID NO: 37702 - DNA, 1716 bp, Arabidopsis thaliana landsberg
tatagtctgtgataagactttgtcccagttgattcttctctacagactttgaaccatatttttttctgtagaaaggagaccttgcagtcttcattgctcctgttatggcaaagctaaaaaacaaaaacaaaagtgcgaatcaacaacacagtaattatctacaaattctctgtttttgaagcaacgacttactcctatttctttttcccaggccattacatcgtctgtgataacagtttcttccattggtttcttcttgtgagaaaattaaaccagcaaataggactttatatagttaccggggtgagagatgatataacttttatgtcaaaaaaatgaaccttcttggtgttatcttatctacgtatgtatgatgagactcttatgtctgatttgttgtgtaggaaatcacatggcaacaacttgattatcttcggacaacaagtgatgcagatatatgtctcaaatcgtacatggtttgcaccttttgtgttgtgagtaatattttttatatatcatccacatataaattgggcaatttccattatttgtgcataacaatataatttatcaaatagaaatttatcttatttcattgtttctcgaatcttgatactatttatctatagtacggtaagactctaatgttattactacagcactcggacccagattttgattttgaccttgagctgctgccacttcaccaagatcatgatcttgaactgctgctcccggattctgagtttgactttgaactgctgccacttcaccaaagttatgaccttgagctgctgcttccggattctgagtttgaccttgatctgctgtgcttggtgatctttttggtaataaatttttaatgcaaagtattattatataactttttttttattttttttaacaaaaatgttcttttatttttatttttagtttagttgaaattataaaaaataatctataatgaaaaagtactactatataattatttttatttttagtaatgtaaaagtactaatgtatcactttttcatttacatcattttttatattttggtaaaaaaaattatatgtttgatgatagttattaaatattatcatatgaaattttaattttgtggtttctaaaacttttaaattacaacgaaagtaattttttttatttcaaatatacaatttgaaaaattagaacgtcaatatttaattgaaagtgtttgttagagagagagcttaacaatttagcttaagaaaataagttaattttgtttagaaaatctatctgaagttcattttggctctctcatatatgccttagtctttcaccaatgaaaacaggtttgagagttgtttttctcttacttctcgttatttgaatactttgcatcaaacttggttcatagtttcaaccacaataatctgacttttcttaagttttgtatataaataagttttttttgtctcttttggaatctgtgaaagatcatcaccaatgttttctcatattcaattagccgccaacacctacattttcatatttctcttcacattcatagtttttttactcttgtcatcttcattgtcaatttttcactaccgttgtcactgttgctttcgacatccgcttctttattatactctttttattcctcttcttcactttctttcttctcccttttcctcattttcttttttctattgggtaaatttaaacatact

SEQ ID NO: 37703 - DNA, 6164 bp, Arabidopsis thaliana landsberg
aggaacaactgcagtattccgtcaaaacgtaacaaaaatgtcaaaaactctttcgatcagtgtgttggaagttagtttaatatggtctggtagttgagatccgatcaaatgaaaggaacaaatgagacaagagacaacggcatggagaatattgttaggaaaatatagctttagaaatcacttatgttttgcatgatattggagagtatttttgcaaaacaatttcctgactaaacatagaaaagtgatactttagtttacatttatcacaaaattacaaactttattgtaagtgttttctcataactaaactaataaaataataccgtgcaataccgacctacaatgcaatacacatgttctaatgatgttttagttgtatgtaaaacgtgatcatctagctaggacttttgcagaaattgtttttttagacctttaacgtagaaatctgcatttataaatattttgaaacaaaaagtcaaaatttagttatactataagataataaattctatcattagtctttcaaagacttgatgattaataattttcctattttctaatgataccatacaaatattaaactcttaaatataataataattataattataaaactgaccttagggttatctaataataatctaaaccagtaaagatactagacttactccacaacagtaaccgaccccaaaaaaagttactcaccaacttgggccttaaaaaaaagtagcgtatgtcgaaaagaccataacacccactggcatttactttcccttaaaaaaacaaaaaaccaaacaggattcggaagaaaagtccatcgaatctaaaagaccatcatccgcttacataaatctcagagcagaacacaagtaagaaagaaaaaagaagacaactcgaaacgacgtaggtttaattcgttagatagaaaagaaaaaggaaattccgaggaggagaatatgccgttctcctcgtatatcggcaacagccgccgtagctccaccggcggaggaaccggcggttggggccaatctcttcttccaacagcgttatcaaagtcaaaactagcgatcaatcgaaaaccacgaaaacgaactctcgtagtcaatttcatcttcgccaacttcttcgtcatcgcactcaccgtctcactcctcttcttcctcctcactctcttccacttcggcgtaccaggaccgatctcctcacgattccttacctccagatccaatcggatcgtcaagccacggaagaatattaatcgccgacccttaaacgattccaattcaggcgccgtcgtagatatcacaactaaagatctatacgataggattgagtttcttgatacagatggtggtccatggaaacaaggttggagagttacgtataaagacgatgagtgggagaaagagaagctcaaaatcttcgttgttcctcattctcataacgatcctggttggaagttgaccgtggaagagtattatcagagacaatccagacatattcttgacaccattgttgagactttatctaaggtatgacgaaagttttttgcttttggttttaaaattttaattctctcccatgattatcccgtgaacaatcttaagtgtctcatgacgtcattaaactctataaccaacttctttgctgggttctgtttttttttagttttgtgttgaaacagagtttttaaagctcgttctttcggaaaactttcagtctttggagtttaaagtttggatttttattactgggttttgagattgagggatagctagaatcttatttgtgtgggggtttgttttgaatatgtttgataggattcaagaagaaagtttatatgggaggagatgtcatatctggagagatggtggagagacgcttcacctaataaacaagaagctttgactaaattggttaaggatgggcagctagagattgttggaggtggctgggttatgaatgatgaggtatgtttcttacttgtcgcttggctataaagtaaaataaattgttgttatagtcccatgccattcttctgctgattgttttgatggagattgtatgtgctaaagttttcttcttaatgttctctgcaggctaattcacattattttgccataattgagcaggtatgtacatcaacacttgactttccagtttttataggcacttaatttgtctactcctgtttgcgtttaggcattttaattcttactgaaacaaagatgatgacgatgatactgcattttcattaatgtttctgttaggtttttatttattatgtcacttatggttggttatagttcgacatcccctgagacctcttttgagctgaaacctctcttttttttggttatgcatagtacatgtgatgttagaatgtcatttggctagtgataatgctagttaactagccccttgttgcattgtgtttctttcctttttatactgattttgtactggatcacttcttctgcagatagcagagggtaatatgtggctgaatgacacaattggggttattcctaagaattcttgggctatagatccctttggctattcatcaaccatggcttatcttctccggcgtatgggttttgaaaacatgcttattcaaaggactcattacgagctcaagaaagaccttgcccagcataagaatcttgaatatatttggcgtcagagctgggatgctatggaaacaacagatatctttgttcatatgatgcctttttattcatacgatatcccacacacttgtggaccagagcctgcagtttgctgtcagtttgatttcgctcgaatgcggggatttaagtatgaactttgtccatggggaaagcacccagtggagaccacactagaaaatgtgcaggagagggcattaaagcttctggatcaatacaggaaaaaatccactctatatcgaactaatacgcttcttatacctcttggagatgattttaggtacattagtatcgatgaagccgaggctcagttccgtaactaccagatgttgtttgatcacatcaactctaatcctagtctaaacgcagaagcaaagtttggtactttggaggattatttcagaacagtccgagaagaagcagacagagtgaattattctcgtcctggtgaggttggctctggtcaggttgttggtttcccttctctgtcaggtgacttctttacatatgcagataggcaacaagactattggagtggttattatgtttcaagacctttcttcaaagctgttgatcgtgtgctcgagcatacccttcgtggagctgagatcatgatgtcatttctgctaggttattgccatcgaattcaatgtgagaaatttccaacaagttttacgtataagttgactgctgcaagaagaaatctggctcttttccagcaccatgatggggtaactggaactgctaaggattatgtggtacaagattacggcacccggatgcatacttcattgcaagaccttcagatctttatgtctaaagcaatcgaagttcttcttgggatccgccacgagaaagaaaaatctgatcaatccccatcatttttcgaggcagagcaaatgagatcaaagtatgatgctcgtccagttcacaagccaattgctgcccgggaaggaaattcgcacacagttatactcttcaatccatcagaacagacgagagaggaggtggtgacggttgttgttaaccgcgctgaaatctcggttttggactcaaactggacttgtgtccctagccaaatttctcctgaagtgcagcatgacaataccaaactattcaccggcagacatcgcctttactggaaagcttccatcccagctcttggtctgagaacatatttcattgctaatgggaatgtcgagtgtgagaaagctactccgtctaaactcaaatacgcttctgagtttgacccatttccttgtcctcctccatattcctgctccaaactggacaacgacgttactgagatccgaaatgaacatcagactcttgtgtttgatgtgaagaacggatcactgcggaagatagtccatagaaacggatcagagactgttgtgggagaagagataggtatgtactctagtccagagagtggagcttacctgttcaaaccagatggtgaagctcagccaattgttcaacctggtggacatgtagtcacctctgagggtctgctggttcaagaagtcttctcttaccctaaaaccaaatgggagaaatcacccctctctcagaaaactcgtctttacactggaggtaatacgcttcaggatcaagtggtcgagatagaatatcatgttgagcttcttggtaatgattttgatgaccgggaattgattgtccggtacaagactgatgttgacaacaagaaggtcttctattcagatctcaatggtttccaaatgagcaggagagaaacttatgataagatccctcttcaaggaaactactacccaatgccatctctcgcatttatccaaggatccaatggtcagagattctccgtgcactctcgtcaatctctcggtgttgcaagcctcaaagagggttggttggagattatgctggacagacggttggttcgtgatgacggacggggtctagggcaaggtgtgatggataaccgcgcaatgaccgtggtatttcaccttcttgcggaatctaacatttctcaagcagaccctgcttccaacactaacccgaggaacccttcgcttctctctcacctcataggtgctcacttaaactaccccataaacacattcattgccaagaaaccgcaagacatatctgtgcgtgttccacaatacggttcctttgctcctttagccaaaccgttaccatgtgacctccacattgtaaatttcaaggttcctcgtccatccaaatactctcagcaattggaagaagacaagccaaggttcgctcttatcctcaatagacgagcttgggattcagcctattgccataaaggaagacaagtaaactgcacaagcatggctaatgaaccagtaaacttttccgacatgttcaaagatcttgcagcttcaaaggtaaaaccaacttcactgaatctcttgcaagaagatatggagattcttgggtacgatgaccaagagctacctcgagatagttcactgccacgggaaggacgtgtctcgatctctcccatggaaatacgagcttataagcttgaactgcgacctcacaagtgaaatacacacacttaagactgaacgttgactatttattggctggtatggcctcaaacgatcgttgactataagaggttgggctcagaatcggcttcttcttgttcacaaaagctgtgccgggaacatgaactgttaaaaagagagagtagaagctggagcatctctgtgtccatgtaaaactactgtaaggcattagttttttttggccggttctttttgagacaagttatattaattagttttaccattttgcctgggattattatgttgtgtgtatataaactatatgttatacacattcgattgaattggagtgcaaaagatatggtcctaactccttattctctaacttcaaatttatctatgaagcttgtggaaatttttcatcttttaagtacgtttttgcaatgcaaaagaagaaagaaaaagcctaagaggttacttgtgaccagaatttgttatatgattggatcgtgcacgaaacgaactgtggtggatactggatagtggataccacctcgaatgttaattgatgtaggtaagctacgaggggattagtctctagtgacaccaaaaatattgtatctttctttttatgaaagaaaccaaaaaggagaaaaggtataactaatagtcatggtggtatggcaaattataacctttactctcatgtaatgttgttctaccactcattttttaataacctttataactcgaaaatctagacacatactttgtcatttctcataacatagggtcatatgtaactgttgccaaaagaaaattgatcttttgtaattacgttagtgcttatatttttgttgcagaaacacaaaaatacggaccaaagctagtagtctactatctttggaactagtgttgtgttgtcggcgtaccaaagttaattttgattaaa

SEQ ID NO: 37704 - DNA, 5174 bp, Arabidopsis thaliana landsberg
gcgtcgaaaatccgtcactgatttgattctcatctttatattcttctaccattgataattctcatctttatattcttctaccatcattcacaaatttgattcacaagtcatgtgaccaatcaaaatttgccacatagattttttctaatttaaataattaacataaaatctgtaaaagaaatttgagatcgttatacaaaaatgtgcaatcaaattttgacatatggcaagtttatcagaaaagtaaggaaattaacgaagatgaaaaaaattcaaaggtaaaataacaaatcatattttgccacatcatttgacaccagaatatttgttcttctccacgatctcctatcttcaccgtttctactccacgattttcatctaactgcttcatctgcatctttaaaagactcgaaattgctttttctctcccttgacgaactcactatcttcttctcacttgtgctgactctctttctcaaatccaaaaactcattcaatcactattggagttcgctatgtatacaacatctaagaagagacattggcatttagcatatgccatttagcataagtgcctaaataattctttattttttcttcttcgaggtaacaacttcttcaatctgtagctttactttaaaagtgtaattcatatacttctttaacaactaggcttggtacatttgggtttttttttttggtcaaaggcttggtacatttggttaacaattgagatttcttatttggtggcagaatagagatgaacgatgttgggcagaaaagctgctggttggaacttggttcaacgaaatcttcaatttagaatgaggaacaaacgttctatacggttatcactaaatgtgaattatatgttgcattagatattgcaagaaaagtaacttgaagtttattatttttaaaattgtaacaagttgtgtgacttttttttagaagaataaaaaacatgtatttcttcaacatgattaattttttgttatattactcatattttaatcaaaagttcaatcaacagtttcagtttactagctatttttaccttttacaacttctgggttttaaatcaccttctatcgtcacactcattgaaaatcggaaaaattgatctctattataactgtttcacgtctgaaatacttcgtcgggaatccatcgggaataacattgtcgggaaaccgtcgaagaagataccgaccgatttttaacaacgttctgatgcaatgcctgacaacaatattcgttagaaaatagtcggaaattatttccgacgaggatccgacgatcatttccgactatgttccaaccagtttcgcaaccaatgttatcgtcagaaaagcatagagaaattatcgggaaatatctcgtcggaaacccgtcggtaatttgtaacacgtttgcgacgacattcagatttccgacgagatagtctcgaccatctatatcgtcaaaaagtcgtcgaatacggctgtttccgacgttattccgacgatttcgtccgtcggaaagagcctataaataactagagactaaacttgcacctttgtgtccaaaaaactttttattaactagagataaaataggtgattagtttaccttgccagaaaaataaatacaatcaatatgaaacttaagataaaaggcatacgagattttgtaggttctgtgaaaacaaatcccttgctatttcgttttgacatgcatagaagttaacacatactacggaaatgctaaaaaaacgagatagtgtcgccatgataactgcaatgctgctgaaaccctaaactttattaatgaactaatgaagccaaatcatttttattttatgattaaaaagttgccaagattcgtgctcactctgtcaaagacaacaactttatcatttttcaaacaatagttgattaaactaaactaaaaatgggtatacaaaatgagttacaacgataaaaacaacaaaaactttccctttgcttgattatttaaaacaagtccgtgataagaagaagatcccactaatggaaaataaaatgttataaaaactggcggcaatacacaattgtggcgacattatgaacttgctcagtaagggaaaactttaaagaaaagagggagagattaaacaattacaacaaatctaccagaattttgactataaatagatcactacacatatggatttgtctcatcgaagtaaagtttattaaattgaaagagcaaaaaacgaagtcttactaaacgcaaagccttagagaaatggcaaggaacctcaactccgttagcttcaccgttctcttgctggttcgtttggtggcttccacggtacgaatatattctctaatctctattagactttgtgtgtatatgtatatgcaaaaaagttacacttacataataatcttttgctgctgaatttattgaaatgtaaaaatgtacaaatcctgaagagcgatgctgcatgcttcacgctcttaggcgagtgcgggccggagccgtttacaggctcaaatgctgattgcttagcgtgttgtgtagctctctataagagtccaccagtttgtgctggacgtgttgagggagtcccggctcactgccattgctacaaatcgtaaagaggttcaagtgtaacttttcttttcattcggtgtgataaggacattacatgtgtgtgtgtgtgtgtgtggtaaactggtaatgttcaagtttcttttgcttccaaataaaacatcaagggcaaagcttcactgcttcccctaataaatgtaagctcatgttgtgttcacttttgtttcgttctgaataataaactcgttttgtgttcctcatttcattcccaactatattcaaatttctgtcactacaaattatctacaaatattgaccatttattggatagtaaaatctgatttaaacatgtatgttgcatcctcaaaagagtatagatgattatcatgtcataagaaaacatgagctaatctatatatttaaaataggttttgagttggaaatttattaaaatttcaacattttcacacatgaaccacgacgtacggtttctatgtatactattctttcatatgtattgatcacacctgcaaattttaatccgaaatcaacatgtttcaaacaactataaatgattagcatgaattatgtttggattggtgtccttagaaagataaaacatatcttacccggaaagataactacaattccttacgtcaacatgcgtttccgaagaccataattattcttagccatggtctcgtgtttttgtttttgtcaaatactagttattactcgtgagttttggagtttgccaacaaagtcgttatagtatagtggtaagtattcccgcctgtcatgcgggtgacccgggttcgatccccggcaacggcgccaaattgatagtagggttttgtgtgtcaattccctaaatgcatcttctgtcattgcaacatttaaggtgtcaatccaaatgggtgtaattgctatcaatcaggatatgatcagagaatactaagtcaagccaagtgtggataggtttggtgtgtttctactatacttaggcatcggagtttacatgcatcttgaattcagaaacataaactatactaagcagaagataaagaactcaaatatcaagagcagaaatgaaactaaagaccaggaactatcaaatgcaacaaccagaaagtaaaccaagcacaaagtgaggcactcggccgagcatactactaaaacaggtcgagtagaatactaaaaacaccaattttgcacgagaactaaacaaaacgagtagagtactaaagacacgagttttgcacaataaaacgaaacaaagcttcttaagaatggggtaattggttctagtggactcctcaatccattagctaactaacaaactcaatcaagctatccctacacaatagattaacccagatcaatccactctcgtgacaatgatcctcataactttaccacttcctaatcacaattctcattgatgaaacataacaaagcaaacattaagcaacaatctattaaagtcaataagcattctaaacatccaatctcttggggtagagtatgcaaatctctggaataagttggttcatacatttcatcaaacaccttttgggcgtgaaaagtctaaaatcaatctccagttgatcagaaaggaaataacactaagaactcctaatcgtgaagggaatcatgcaattataaccttagctaactaaataaacagaggagtccacctaaacctaacccatattcaagaactctagagatcactactcaagaacactcaagaacatcatcatacaaaatttaaaaaaaggacaaaacccagaaatcattgtaaactgagtatgatgtagatctaagcaagataaacaactctacagaaaaaatcaaactcaaattcgtaacaaaatagcaagaaaatggattacaaactcagaaaccttgatggtgaggtagaggacaagatggaagatgagttccttgcaaagctagatgatgtttgataataggtttttaacatcaattaatcctaaaacactattatgttgttgtactactgaaggttgtcaatccaaatgggtgtgatgctaacaatcaagatgccatcagaggtcacagagtcaagccaagcaataacaggtttttgagtttctagtactcctaagtgaacatgcaggaaacagaaaatctagtaggataaagaaaacactcgaccaacactgcttgttgccaagcactaggtgtggttgagtgacaggtcgagtaacaagcagaaactgtaacaaagatactcgactccacaatctcttactagacaactgggtgtgatcgggtatatgagtgataacaagtatgaaatgcaaaaactaagcaacgagtaataagaacaagagaacaatagcagtgtaagcaaagaaatcaattggataagaaattcccgaggatggggtaatcgagtagttagtttcctcaatctagaagtgattgagatgatcaataaactatccctagacaataagttcgataaccaaatctaagtgccgccgcaacagactccatcaagcccccctagtccgagactcaatcaccattgaaaaaagctaacctaagaggcattaggaatcatcaag

SEQ ID NO: 37705 - DNA, 2631 bp, Arabidopsis thaliana landsberg
ctattaatttaatacaaacatataccaaaatttaacttcatacacaataatcaataaaaatgcctgagtatatagttaaacacgcatagaaacaattaaactggaaattagaaaacgtactaaggccttggattcctcatttgaagcagcaaaaacaacctgctcggtgattaatcaaaatacatagttagttacaatacgcgaaaacgtaatgcacataattgtatactattatgtagtctttaacataataacaccttttgttatgaaaaagtaagaataacttacattggtaaagacatggaaaaagataaagactgaaagaagtgagagagccatttttgtgggagatgagaaagtggtgaagtcacacgaagaagaccagtgaccttttgtgatataaatagaagttccttatttattaaccatattatccataaatattaatttaaatgcgtagtaagtattaggtccagagcagttattatatgcatcatgcatgccagctttgaaccttcactgcaccaaaatatatctctcagagctcgaggataaacaaaatatcagattcccaaaaatggattatattgataatacatgaaattgccactttattcgtacatcaacttggaatactttatcagtaaataagaacaaataactctatggactttttggtgatatgttttgagtaccccaagagactagtggatgacaaattgaaattattaatcttcttatcaaataaataaatagcattcgatttgcccataaggctgtgtcgcttatatatttcatataaagaggctcttcacttcgattattgcaccagtgagcaagggtttgtcgtttatgttagctaacttagcaagcatggcctacgagattactactatactttgttttgaaatatctaagctatatggtatatatctttcatattttctaataaaaaattaagtgttctcaaatcatagatggacaatagcacatgagttctttaaatggttgcggtgattattattattatttatttataattctgatattttcgaaaaagaggtcaacagtgtaattaaagtgaaatcgacaacgagtacatacatatttttatcattacatatgtcgcgagtacacacactttcctcttttctgttaacatgataaaattttgttacgaatgaatgtttcttatcttcttttacgtaatgaataaactaaaacagactccacgatgacatagtttcataaattaagatgttaaaacagaggattgtttcacatgttttggtaagaacaggtttttggtctataatatcacattttttaaaaaagtaaagatttgggttataagtacaacaatgcatgagctgtgattcaccatatcatcaaccacagtactccacaatgtcaacatcgtacatgcatacatatacatagtgacaaatgacaatcatatccacacacaaaactaaatgcattgtacaaagcaatgaacctaaaagtctataaaaataccaacctccatgctttgtgggaacccatatgtatatgacccactaatcaatatagatattttccatttctcttttatttcaacaaagaaaacattaattcccactttctaaaaaaagttaccacatttgttttctttagaggaacaaatgaaagaaattatccctagaattgaacattatgagtttctttaatcacaaaatggaggaaaaggatgatttcactagacaagagcctcatcgtcatcttcaaaactcagattcaaagtctgtaacttaaatccagctccttgtatagtctccaccaagtttgacgccactcctgttgcttgaaccgttgtttgcttcaaaagcttcacatacattgatcacaacataagccagattcaattgtacaatcaaacatagagatgttgctacgagcagtaacagaaccgttcatataaaggccttaactattcaaggtcaggctcgaggcttttgttatacggccccaaagactaatcccctggttaaccaccaaaatgtacaacaaaatgacatatttgaccagtccagtccttctaagggtgtgccagccattatatctctaataacatattcaacatctgtccttatctatttatatcctctaaacatatatgtgtactgtgtaggggtgtgaagagacatgtaaaggcaatgttggatgtaaaacatacctcaacgacggcaacaccttcagaaacctgaacctttaaattggaaactccatcaatatcctgaaagaacaaaacaagtatcaattggaacctttatattcactgtttttgtaagctataggtactaaggaagatttagagcgtggaaagagtaaagtgaacacccaaattccaagtttaacacaactacaaagattaaattgaattgaaacaagtaaccaaaagggttatataatccaagaaccagatgcattcacaaagattctcgtcaagctccacacagatttgctagttcaaggagagattacaaagcaaagtattacctgtaaggcccttgtcacattaggaatagctgcttcgttcaaagttccatcagccttcataatcaagcaaaaaatccaacaatgttgagactc

SEQ ID NO: 37706 - DNA, 6302 bp, Arabidopsis thaliana landsberg
tcttattttccactctgttaatcttcttttccatgtgtgcagagtcattactctgcagtttattgttctttacacgttgtctggattgcaggtacacctggtgactggagtcatattatcaaacagattgggatgtttacatttactggattgaacaaggagcaagttgaattcatgaccaaagagttccacatttacatgacctctgatgggtgagtcaacttatattttcttttcgataattttaggaatatgagtgagtttggtttctgctatgcctaaaaccataagtatatatgacatgaagtatttctaagaggtcctaaaatactttcgccaaactctcttagttgtaagagtgttagcagtaataaccagatatatatagaactagatccacaggtttcattatgttcttcttaggcatgtgaaccaagatagttgctttgatattttgagaaagtgagatatgacatcatattcttgctagtgaaattatagttgcatgaagcaaaggatattagaaaataccagatttgtaagttttctgagcttcaaattgaaaaagggttactttgttgtattgcaggagaataagcatggcaggtctaagttcgaagacagtgcctcaccttgccgatgctatgcatgctgcagtgacccgcctcggctaaactagcgaccatacatttttttgctgtttctacaaataaaatgggacaaaaaaaagaacaccgtttttgttggcttatatactatggtttttttctgatggtaccatatgtttcctcatgtcttttgactaaagatggttgaaccaaaaccaaagtgaggattgtgacattgagatctaccgtttctaaggaaaatattggttactttaatttgccaccaacaattgttttttgcagaattttcaaatatcctgttattttatttgttgagagatccttagcaaacaagttatagtttggttctcgctggaaaaaaataagttttgggaagtttggcacacctaagaagaagtatgatttgtattagaaaccaaatacttgtcggaatactctctaattggtccatctcttaaaatatcacataaacataattttcaaatgaagcaatcgatcgtttggaattgtaagggacatatagtgaacatgaaagataagaaaatgtaaaacggaatgaggttatatggttttttgtatttaattagttttcttttgtttctttaatgaaaacttgtttcaatgtgtccatttataggtagactcatttgtttaagccgcttgataaaaaaaaatgtcaatgcaatatttatacatcagtgagtggatgagaaaatggtcataaacaccacttttcaaagtgataaattacacgacgtgattaaacgattaaagcagtattataagatattgaaatcaaatcttttaaattagtaggataaacagaaatgtttagacttggtaaagagtcgccgtgttacatgcctccatgctactgttgcactaacgaattagtcaaaatctgattttaaaattcgattgtctctctttttaagttattaagtttgtaaattccagctatatttgatccatagtcttacttaattcgagatcaggcttaaacaataacgatccacaaaacataaattatccctctccaagtttatagcacataggattctaactcggtccggcgggtaactctaaaacatcatttttctaatcggttgagccagtcacatttttgtagacatattttatttagaaaatgttcttacaagctcatttaacgaaatgtggattagttcaaataacgaacaattttcttacacgaaattgttccagtgaatcaaaacctgagcagcgtgaggtaaaattctaaacaaatgaaagataaaataaattaaggaaaagtcggagtatctttaaccgcccttccactatttatcttttgtttgttttttgaaaacatggaccgcacgttgtctctccagccctagaaaactacttcaacatttctctgtttcattcattttgcaccaactaaaaaacaaaaacataaaacaactggaaagaaaaaagtacagaacataaagtagttttgtttcattcggtggtgaaagaacagagacaagggagagctaaaggactagttgcttgatctgtacgtctcttttgctttcttctcttccattttgtggatttcatttgctttgttttcttttatataatacgatctgagacaagaaaaaagaagagagaaatataaaaaagtgtgtggagagatataaattgagaggagtaaattgggaatggtgcggacattaggacgtaaactaagctggccaagatcttttagttttagaaagatgttcgatggtcggaactctggacattcatctttctcttctcgtggggatggcatgcatacacccgagcacgaactcgccggacatgctgcaccatccactcgtagaggcaagcaaaataggagatcaggtaacatattagtgcaagtttatttggtaaatggtaatggcaaaattttaatttaatggaaatgaaaattttatttcgagataatataatggtagaaagaaaactttaggtgaaagaatttctaaaaaatatccatttcatattttcgtaaatatatccattgcaccaataattaattaatgctccaattaatgataatgtagaatctctaaatcatttattacccgcttatatatattgaccgaaataagaagtcctcattttataaattatatatagacaggaaaatgatattattgcacggaaaaaaattatgtgatccgcaataattaattattgctaaatttgataaccacataaacgaataaaatgttatcccaaaaccacaatgaattagatgtattaatatcttcattagatgtattgtatatagcataatgaattgcatttagattgcatttgtgtaagatgcatgggttggatctgaaaatcaattggtaagagtagaattaccaatatcgttgtataaagatgagttctttaactaatatttatatatttttgataactatttaattaatattattctatgttggattccttacataatctttgtattgatatctgtttcagacatggaagtgatgaaggaaagattcgcaaaactgcttcttggagaggacatgtcaggcggtgggacaggggagacctctgcgttagctttgtcaaacgccatcaccaaactcgctggtaaacctttaacactactaatatgattaaaacattaaatgtctaataacgatttgaatggttaaaataagtcacaaactaattaatgtggctttggtattggcatgcagattcgatgtttggagagcagatgaaattgcagcctatgtatccggagacaaaagagaattggaggaaagaaatgggttggttattatctgtgattgatcacattgtccagtttgttccttctagacaaatgggtaaaaatggccaattcactgaggtgaatgcatgcaactgttagtcattaattacgtacatatataacaactactaatctactagtgacgatttttcttattaaccctaattttctcctttgtagatcatggttacaaaacaaagagatgatttgctgacgaacattccagctttacgcaaacttgactcggttcttctcgtgagtttaattactacttgattgtttcaaccgcggtttcaacgtttgggaaaaattaaaccattatattatatcaaacaccacatcgttttcaaaaatattttgtttgcaacaatatccatgacactaggacaaactactatatatacgacaagtcatagtcatctttgcaaattatatagataaatatagctgaaagcgtcataacaccaagagtaccatctcattaattaatttcatataggagtgcatgtattataaaatgatcatgatatatatatatatataacaaacaaaaatagatgagttgtgaccatttatcatactaatgcaattactcatttggcaggaaactttggacaacttcaaggatcagaaagacttttggtatgtgcatagagatatggaggatgcagatcacaatggagattggaggagggatgagaactggtggttaccagttgttaaggttccaacagatggcttgtctgaggaatcacgtagatggttgcagaatcagaaagattctgtggctcaagtccttaaagccgccacggccatcaatgctcatgtattgtctgaaatgcacgttcctgaaaactacattgattcccttccaaaggttacttacttcttcttcaaaagtgttctgtttctttacgatttccactaagctaggaagctgatgaggctgttggttatgtagaatgggaagacaagcttgggagattttttttacaagagcataacagaggagagctttgatcctgactactttgtttctttcttggatttgtcaacggaacacagagtacttgatctaaagaacaggattgaagcttccatggtgatctggaagaggaagatgtgccagaaagagaaagacgggaaatctcagtggggatccactgttagcttagagaagagggagcttttcgaagtccgagctgagaccattttggttatgctcaaacaacaatttcctgggatcccacaatcctcccttgaagtctccaagattaaaaacaacaaggtaacataacataacaaagactaaacaaacatcaacaaaaatgtagtgagactgagtaagagtttgttgtgatttggtcttacaggatgttggacaggcgattttggagagctattcaagggtactagagagtcttgcttcaaagataatgtcaagaatagaggatgttcttgaagccgatcggctagttcaaagacagttgatgggagaggcagagacaagatcagaaagcgaggcagaatcagaatacgaggaaactgaaaaggtggttgcagcggaaacaccaaactcgaggaaactatcagacttcatagggtggagattgtcatctgatactaagaagcatagttcaatgagtgatatagaattcttccacaaagttgagcaggagaaggagaagcccatgatgaagtctccaagagctctaccgaagaaattttcatatctagcaaagttagagaacatgagaagccctagtgacagacactgatagtgaaaagagaaggtaatagaacagggcatagaagaagaaaaacacaaagagagtgagagagagagaatagaagaaggttaaagtctgtgagaatgtacatatataacaatgcaggcattggttttaggatttggacatgagacttggtgtttgatcatgattgttgcttgttttgactattgcttcctgttgttttttctaagaagcaagtgtgattcagtgtgtaacaatattttggtatttttgttctttggtgttttgtattgtaacgtctaatctacaacattgtttcctaatggattttgaagctcattgataatgactagtagtgtagtagtattgtaatgaaacattatttgatgacgacatgtaatttagtggtttgtgataataccattgatctgtgtttaccatccggactattcaggtattcgggtccgttatttggatttttaaatttttcggatcgggtttagttcggtacctttcgggttcgggtcggttctggatatccaaataattcttctttttgatctcctttactcaacatttagtggttaaaacacagaacaacggaaaaggcaaatcgggatcagccaccggcgatgaaggaagacatggataagatggtggcggtagggctcgtatggggagccaccaatgctctgatccgtcgtggcgctcttgcctgggataaaacaaagtcttcttcgacaacagaatctcattctcctcctcttcagatccgccgcaaaatcatgattgctctccgcgactggatcaatctcctcctcttctggcaatactcaattcctttcctcataaacctctccgcctccgccacattcttcgcccttctcagtcacgctcccatctctcttgccgttccggtgactaacgccacaacctttgccgcaaccgccgcttttgggatccttttaggggaagaaactcaaatcggacttgctttgttaggtacgagctttattgtatttggaatttggctttgtgttctgggaaattcgaattttgtaaaaccgtgactctgtttctgtagatctattttgcaaaagaact

SEQ ID NO: 37707 - DNA, 4416 bp, Arabidopsis thaliana landsberg
  unsure (1)..(4416): unsure at all n locations
cgtttttgtaaatcaaaaccacacatttttattagatatataaactgtatttaaaggtttacatgatacattttgactaagggacacgtctctagaaagacaacccaatgtagagacacatacacacatgtaactgttttgcaactaacgattctattcgtatctctttgatgtgtgatacgaatatacataaatcagttacttaactatataatatatgactcttataatataagacgatgacttggtcacttccaacactcctccttgatcatggcttcatcgttacgtctagttgttctcgtagaacttcgaaccttgatgtgattaagagctccgcctcggtcgttcattgagcaacgttcttctgcttgctagtattccaacaaaatgcaccttatccagaagtaaagacatagccacttgtacttttcttgtcctcaactgatcagctccaattgcttggtctctccaacacttgccacgtcttgttcttttctatcatcatcaactcttctctcatgtcttctatccacttcacgtctccattgctccctccaaattctgagtttttttggacgttataagacacatctcatgtatatgagccatctcttcaacttcatttgtttgacttcttgtgtccgactttctccatctcaatgggaaactcttatgtttccttttaatatccagtatccttcttccttgaggattgttgatgagacatcttttatcttcaaataagactctgtatccattggatatcatttgagaaacactcaacatatttctcgctaaacccgacactagaaacacatctttgttgatcttctctccttggcttgtcatcacttcgatgtttccttttcatgccgtcattacatgttgaccattccccaatttgatcggaactcttacactttcatcaagagtgatgaaatatttaacttccttggtcatatggttagtgcatccgttgtcaactaaccatgttttgtcaattccttttgacgcttcttcctctttaacgatactaaatagcatatgacattcatcttcattgtcatcttctaactcttcaaaatttagatgtgctcttccacttcgtctaagtctatcacacacctatgttcttcttttaccaacaatctacctcattgtgattgtttctttcacaaacgccacaccactctttggtcttccaatggtgtttcttgtcttgcttgtttcctctttttgaaccaagcttttctccataaaacgcaccctcattgatacgttcttctcggagactcaagcgcttctcatgcgctttcaaagtacctatcatctctgtcatagagagagttgatagatcctttgtttgttcaaagaccgcaatgatgctatcaaactgttgcggcaaggagataagaaccttttaaaccaattggtaatcggtcttttcttcaccatgaactcttagttgattactcatattaatcaacttggttgtgaaaaaatttatgttttcactctcctccatcttcagattctcatattctcttctcaaggtctgaagattaatcatctttacttgtgaacttccttggaactccatttccaaagcgttccaagcttctcttgcgcttgatgccggagcgattctcggaaatattgaatcagaaactgcactttgaagaatctgaagagccatcatatccttcatcacttgatcatcacgctctctagttaacgccggtgagttttcagacgacgaactcaacgtaattctattttcgataacatcccacaacttccttgttttcaagatggttatcatcttgattttccaaaagccatacgattcaccattgaagattggaataatttgctgcattgttgtctccatagctctgataccatgtagaactttgaactctcaaagttgttaaggatcggacaacacagattttactctgttttgtcttactctatatttcactctgtttttataaaacgaaaaccacacacttttattacatatacaaactgtatttataggtttacatgacacactttgactaagggacacgtctctagaagacaacctaatgtagagacacatacacacatgtaactgctttgtagttaacaattatattcgtatctcttcgatgtgtgatacgaatatacataaaccagttacttcactatataatatatctcttctaaaataagatgatgacttgatcacttccatcagagtattgaattccgtgaaatgacgattatccaaatccaatccaggatcatacctccagatatttctccatttgttggataagacactagtcttaaccacattttttgtcggaagatccangataacattaacgagcaaaacatgtggcacatcactgaaccaaccaactcaagccttagattattttgacggccgtttcatgtgaactatagcggtcgttacgaacactaggtctagatattatgcatatatacttacaaaattattccatgtgagtaagttgaatgcaacactatactcattaggaaccaacaaagttgtgatgttgatgttatgtaccactaaagtgaagtttttcaggaggttctaattcacaataaacatcaaatacgaggtcgatgtggatgctataaaaaagtgttttacgtggacgattaagatcacattgataatgatgagagaaatttaccaaacactgagttctggtatggtgatataaaagatcattttcagctcatgtagaaaacatagctcatggggttgttagcttttttgtaacattaagttttttccaacatcttcctcatttgagattttctttttaataattagaaaatccataacacaattgagataatgcgctcttccgtcccatctcgcaccaaatctcactctacaatatagcatcttttatggatcaaactcgagtttttataatatgttaaatttcatagtttctaactcgattaacctactatgactctgaattattaatctagttttcttgctatatgtatgatctatcagtcgtatcggattcatagtatcgaagttgcaaataagaatcttgtttttttttctttcttttcattttctttggttgtacgtaaaggcgtagactcaaagagtacaagttcaaaattcaagatatagttaattacagaattcaagagcttgaccaaaaagaattgaaaatagttaaatgaattagttataaaataatgaatagtttttgggattcacctccccttgttgttaagcaaatgtctaacttcgttggttataattttagtaaatccatttaagaatacaagaaaaataaaaaagagagtaacacatagtcaaagctcctctgttttagctgtcctctgtctcgttctcatctctcacatgaaccataactttctctaacatcactctcctttacacaaccccaaaaatagacctcacctctctcgtcttctctattctctccgctccttaatttccaattccaaccttctctgttttgccttgatggaaaagatagctccggagctctccctcgtcgccggtaacccggactctttcgtcgtcgacgacctcctcgacttctctaacgacgacggcgaagttgacgacggcttaaacactcttcccgattcttcaacactctccaccggcactctcaccgacagttccaactcctcctcgcttttcaccgacggcactggcttaaccgaccaatatattccagtaattttccgttattattttctcaaatccacgccaatctttatgaaatagtaacacttttttcttcttcttctttttcttattttatcagaatgacgatatagcagaatgagaatggtggtcaaattttgtggaagaatcattcgcaggagaagaccaagacaagcttcacttattttccggtttaaaaaaccctcaaaccaccgggtcgaccctgacccacttaattaaacccgaacccgaacttgatcatcaattcatcgacatcgatgaatccaacgtcgccgttcctgccaaagccagaagcaagagatcacgttctgcagcctccacgtgggcttcccgtcttttatccttagccgattccgacgaaaccaatcccaagaagaaacaacgaagagtgaaagaacaagacttcgccggagatatggacgtggattgcggagaaagcggaggaggacgacgttgtttgcactgcgcgacggagaagacgccgcaatggaggacgggacctatgggtccgaagacgctttgtaacgcttgcggagtgaggtacaaatcagggaggctcgtgccggagtatagaccggcgtcgagtccgacgttcgtgatggcgaggcactcgaactctcaccggaaagtgatggagctcc

SEQ ID NO: 37708 - DNA, 3554 bp, Arabidopsis thaliana landsberg
gcagcaaatttcttcggctttgcctcggtttcttttcactcatatgcgccgctctaccggtgagagctgagttttttcttttttttttttgaattcaccggaagctctgttcttatttttttattcggtttagttcggtttaatttggttttatgaaaactctagccaaattcaaactgaaattagtttgattttgtgttgtttagtttggttggagttaattcggtttggtttatttggttttcgttcactattatttagatctagaaatcgtagttgttttactaaacgtttatatcgaaagttttatattggtgattaaagaaaattagcacagtgaaaatgtaaaaaacgtttggagatatgtacaataagggaacaaaaatgaaagatgacaagtttgtttatataactggttgaatcatggttaagaattagagatttaagatataaaaaaactaagtaaaatttatttctattaaaaagaaaatcaaacatgggttgactttagagttatcataatgtttatttaattcaattatttatagattaaaacagtttgggttaaaccaaaccaaattaaactattcggtttgctttggatcagtttgaatttggttgttttggataaggttaaactaaataattcaatatccttcagataaacaaaattatagtgacctttaaatccataaaaaaaattatatggagtcaaaaatttcaataaatatacacaattcaaaaaaaatataatagtggaaatgtagaaattgaatttattaccaaaggtgaataattttgccactttggtatcaatataaagtgttcttttttgtcctccgaaattaattagagttcaaatgaatcatttctaaggaatgttgtttacatatatgatgtgatgcggttagacacgaatttttcgtgctaaattatcggttttaacatttgcactacgagaaattaaagataaagaaaaacttgtgaattcttccttgtcgctcggcctagtaacatttaaaatgcatccattgtgattacaacaaccaaattttatgtggacttgtagattagaaaaaaataaatttgaaagtcattgaaaattgttgaaaaatgtatttataaatttaaacaaataataatgcaacaataaatgataaacaaagaaaataataaaacaacaattaatgattgagaaagacactaaaacccccactaatcatatacatataggtaaaagaaacaaaatcaagaagagtgtttatggttaaacaaagcaaaaatgatcaaataaaaacaagattatgatgttgttgttgtaaaacggcatagtcaagtcacaagcgcaccaccagacggtgccgcaacaacaacaacaacaacacctacaccgcataagttacattacaacacaccctgtctttaaaaactctttcctttttaataataaatctttctttaaataccatctctcttcttcctcctctgcttctcttcatcttctaagaaagaaacaaagaaagacttcacattttaccattatttgctctgagctcaggtcagcttttctctcttcccctctctcctctctcttctactttatggtacagttgaattaacaatgccattgaactactacttccatgaatgtatcttctttacacttgttgtcttaagtttctatttttgtctgatccagatctagtttcttctcttgtgtcttgtgaacactttagcttcttactgtctttatgtttgttgttgttgtgtcggtttgtttttcatttttccagtaatgttgaagaaacaagttcaagatctgacttaactaacttacactagttttagtttgctagtagctatataattctttgatcctgttaaagaactcaaagatcattcgttcttgaaaacagatccggatctgagatagggttcttgataaagattcgatatttgaatcctgatttggtttcttgaaatgcagtaggagagttcaagaaacaatggcaaagatgcaattatcaatctttatcgctgtcgttgcggttatcgtctgctctgcatctgctaaaaccgcaagccctccagctccagtgctgccaccgacaccagctccagcaccagccccggaaaatgtgaatctcaccgagcttttaagtgtagctggtccgttccacacattcctcgactaccttctctcgactggagtcattgagactttccaaaaccaagctaacaacactgaggaaggcatcacaatctttgtccctaaagatgatgctttcaaagctcagaagaatcctcctttgtcaaatctcacaaaggatcagcttaagcagcttgttctcttccatgctctgcctcattactattcgctttcggaattcaagaacttgagccaatctggtccagtgagcacctttgctggtggtcaatactccttgaaattcactgatgtttctggcacggttaggattgattctttatggaccaggactaaagtcagcagcagtgttttctccactgaccctgttgcggtttaccaagtgaaccgcgtgcttctacccgaagcaatctttggtactgatgtccctccaatgcctgctccagctcctgctcctatcgttagtgctccttcggattctccttcagttgctgattctgaaggagcttcttcaccaaagtcctcacacaagaactccggacaaaagctgctacttgcaccaatctccatggttatttccggtttggtggcattgttcttgtgatcagatggttttgcagattgagttatgtttttaagttacaatgtgaaagattgtattacatcatttgaattgtctttttgatttttgaaacccattttttattatacatttttatcattattattgtttgtcattacgattgttgtgaattgaaattgttcctccattttgcttttctttagttaattttgcttcatttgcaagttaagatgataccaagaggtttaaagttcattctctttgatataatctgaagataagtcaataaatggcttggtatttgttcaatctggataaataatatgcagaatttgtttcactagtctgattacggcagtaactaggcctcggcataatacttaaaccctaaattttcaaatacccaaacgggtctaaatttcaaaatccgaaaaacccgaataggtaaccaaacatatctcaagtataagtatatattagttatatttatactaatatatataaaatattagaatttttcagatattttagttatttttgtgtatttttagatatattcaagcaaaactactcgtgttgtttagagaatttttgaaattttcaaataatttaatagatttagacacaaaattttgatattttaatatataaataaacccgaatccgaaccaaacccgacccgaaatcttgaattactcgaacggatcttaaaattctaaacccgaaaaactcaaacccaaaatactttacccgaatatccaaacgcccataactattattttttaattcagtaaaataaatact

SEQ ID NO: 37709 - DNA, 3115 bp, Arabidopsis thaliana landsberg
tccttctctctctgaacaggtccacatactctgaaaaagcaccaattttcccgccaataaacaaaacctgcttctttagttcttacacctaaaccactcttctccttctcctctatgttctgctcacacatccccacacaaagagttaaagatgaatagctcctcaaaggtgataatggcagcaacattggtaatggtagtgagcttagtcatggtcttaagcttagtcttagtcctactagctgaactctactgctctctcttactccgccgccgccgccacaactccctcaacctccccatcaccaccaccgtctccaccgccgcaagaaccaccacaactctaaaccaagccatctccaccacaagcaacgacaacacttcaccatctaacatcaattcttcttcacctaatcctctctacacaggcgttattcaaactccaaccaaaacccattataaccatgaaccatatttacaagcttctcttgatctgattcaagaaaccattgttaacgattctgtagacaacttcatctacatatcaaacccaatgtactcgaacgacgctacaagtaaaccaaccacaccatttgaaacccctgagtcttcaccgtcacgtcttgagaccggtgagtcatcatcctcttcttccggcgaagaagataacgatcatataatcgaagtttcaacgccaacattaactccaatgaaggatctacctgaaaaggcatgctctgtttcactaaaaaatgtggaaacttctgctagtgaatcaaactcgtctggttcgccgtatacttcaccgtcgtggtagggtttattgtaatttttggggatttttttgtctttaaaacatttatgttttgtttggagtgttcttggaatgtgtttggtttgtggacaaatggctcgatgaccaaagccacgcttgttttcacagagtttcctctatctgtcgttttctatgttctgattctctgtcctttatggtataaaagctgttttacacctaaagttagtattataatgataactcaaaagtaggataaagctacaaactttagctagttgtgaaattttctttatggtttgttcgaagtttaattctttgttgttgactccttaattatgcacattgcacataacactcatattaattagttaaaaaatattgcaagatcgactttcatttataaaaactgctaaaaaaaacatcaatactagtatgtttgaaatacattttgtacaggatggcttaaaatatcattcaagatttttggtaaccgacccgttaccaaatatacttcacaatttctttttggatcagatcataatatatccaaaattatgaagtggatatttatattttaataatataaaaagttagaagttttggtttcgatttggttttgaattatcatatgatacataaagtcaagaaaaatgtgatttttcttgtatacaatagacatatattactcaattaataagaaaaagtgtgtagtcaacgtctcatatcggctaaactgtttaaaaatatattcaaaattatattatataagatcaaaatgaatccaaattcgaataagcatgaagcttaacttaacaaacatctaaataacaaacatttaaatttaaaagtttgtatacgagttaattcggtttttaattaaacaatttaattttaccataaaccacatatggctctaccgatgtattgtcccatgcctagcaaccatacacactgggtttgaacctttccctgccagatccgaccatcactaagaacctggagcaagaagaccatcaattcggtttgatggaagcttaaactttcagtgtttccgaggagtcatgaagctcaaccacatctccgagaaacaatctccacgagcaccatctaagtacccgagagtactatagttaaccaccgtgacttgcaacgaaacccaccaatcccctcaccatctttttcgccgcaactacaacaactatctcgttggttaagctacgagaaaaaccgacatggactcaccttctggcttctggcgtcctcaatcacatgcagtccaaacaagggttctcctcacaccacctgaacaaacaaggccacgactgcatcaaatgaagggcaaccacacctccgctatcggagatgataaacttgctcacttctgccttcacttagcaaagccacaacttgcatattgagcataatcccaaccctacttgtcacccgaaccagattccaagctacatgaatcgaccttaaggaaaaggccagcacatcagagaagatttaccagaaatcgaccactggagaacaaaccaccgaattccaaactcaccaaaggcaacaaaccaccggagaacaacaagcaccataaaaaattgcaaaaccagcggaaacagccacggatcaatgctgtgaaaaagcaaaatgtttgaattgattttagccgctttctcgtggttacgcttttctttgtttgaatttttaaaattttttactttcatgcttttaaccggttttaagtggactaaactcttgtaattatttttttatttttttgttagttaattagcttaatatttccaaaaatgaaaacctcattaagcattttgcttgggttgatttagccatttttcatttttttcgtagcataacactcgtgcagaacacatccggtttggttcgaccagtcaataagacgaaatgcgtgccgtgtcgtaataaacaatgagcactacgtgacgtttctttgtcttcttcttctaaaaaggtttcttattcacgggaccgatttggtcaaagccattttatacattcgatctagtagtcacgcgactccgccgtcgattacatggcttctcaccaccaccacaaccataaccacgtgtgctcacgccaccaaaaccaccacaataacacccctcaattcgccacgtcaccaaactgctgcaacaaatccaaccacccttctccgccgccagcggaagataatcttctccatctcgtcgctacttacctccaaaatcatcaacaagaaactcaatgctcctgcgagacttcttgtcaaaacttcaatgttattagaagtcagaaccgtgt

SEQ ID NO: 37710 - DNA, 2291 bp, Arabidopsis thaliana landsberg
  unsure (1)..(2291): unsure at all n locations
ccactatattattatacattctcaggtagacggactttttgttctgtcttcatatcattcaatattgcgtccagtgtcaaagtactcgcataaaatactccgaccagtcttcttggaagtggttgtcgttgctcgtcaccatcccggatcctgatactatttgctgttgttgttgttgttgccgttgagtatcgagatagtgaccttgcccagaacaaagaannnnnnnnnnnnnnnnnnnnnnnnnnnnnacaatatcatgttcttccgcattatcgaacaattcatccatgctaaagaacctgtcatctttagacatatccaacaagtcctcttgtgtgctctctttgtttccccaaaacggtcctgtaaaacacaaattgcatcagtaaacgttgccatacacttcgtctgtttaacaattttagagacagaaatcaaagtgcaagtcaacgttggcacatagagaacgttggtgagtaaaatattctctgaaagaggtaaaacccccatgtttactgcagaagttttacttccatccgcaaaccccaccgagcatggtggtatagaaacaatgttagtcaagagagagagtcttccagtcatatgatgggaagctccggtatcaagaataacatcgcccaactttatcttacccgacagtttatctgaacttttgttggatgtttgttcttgaattagctgagaaagagctcgaagttggtctggtgtaaactctgtatgagagacggattggagctggttgcatgagctgcaactatttgtcctttaccacgtccagcacctcttccgccacgtccacgacccgagccacgaccattcccattacgttctgtccaccaatcgggaaaacccacaatggaccaacagtccttcttttcatgccctgttcgtccacagtgagagcagagaacaggtcgagacttgacaatggaagattcaatggaggactgagcaggagatgacatagcggaagattgctcatgtcgagcgacaaaacccactacttcttgacgttgttcttgagtccgagaagcatgaattctctgttcttctcttatgacttgagaataagcgaccccaagcgatggcaaaggatccatgttgattaggtttgtgcaaagtccactgaaccttgcagagtcaagacccaaaacaaattgatgaagcttttcatcgtctctttctttgacaattgcagttaacaccgaaccatgaggacacactgcacttgcttgatagttctttaattcatcccaaagattacacaatctgccatagtaatcaatcactgtttgtccttcttgtcggcatgaggcgagttgagctttaatctggtgaacccgtacgttgttggtgacagagaaacgctgacgcaattcgtcccaaagaagatgtgcatcagagataaaagtcaccgtggatttaactttcggctcaattgaaactcgaatccaaccaacaatcatggagttgactgttttccaattttcaaagtttggatcaataaattgtggtttaggtattgaaccattgatgaaccctgttttacgcttggcttggagtgcattgatcatatctgttgcacaagagttgtaattgtcactagataagtaaactgacgagatcatagctccaggattgtcggagctagataacatataaggtgaaactttcaccgtttctggcagacgagccatcatcaacgagagacatgtttttctcacacgaaaatacgagactcttaaccaaagagaagaaaacttaaccgaatcgaacacacttgattgaaaatacgaaagagagtaaatttcttatgttttggtagatcttagctttgataaactcaaatccctaaaatataggctctataaccttatctcaatatatcatgaggatatataatgttgtcccaataatcctcatttaaacctatttaaaatattcttaacccatttagacccatataacattgtttttaacaacataatataatcaatagttatttaaaatttacagattattctattaaatattgataaattattatattactgtaaatgttgatattactttacgattttggcagcaaatatcattttgtgagtgaatttgtttttgcaaaacaaaactttagcgacaaatacaaattttaggttttggtgaaaaaacgtcggtttacggttttggttggaaaatattaatatacagtaatataaataagtatgttcgaacgatacgctggtgacactatgagattcgtctccctg

SEQ ID NO: 37711 - DNA, 1555 bp, Arabidopsis thaliana landsberg
  unsure (1)..(1555): unsure at all n locations
cgaaaagctaagcatgttccgttgcttcatactaagacactgctctgagctacaagatctgcctaacttcattgtggaaacaagaaaacttgaagttattgacattcacggagctaggaaacttgagtcttactttgatagagttaaagattggaaggactataaaggcaagaacaagaactttgctcagcttcagctgcttgaacacctagacttctcagagactaaaatcatccgtctaccgatatttcatctcaaagactctactaacgatttcagtactatgccaatcttgacccggctcttgctgagaaactgtacaaggcttaagagattgccacagcttaggcctttgactaatcttcagattcttgatgcatgtggtgctacagacttagtggagatgcttgaagtgtgtttagaggagaagaaagagcttaggatcctcgatatgtcaaagacaagtcttcccgagttagccgacacgattgctgatgttgtcaatctcaataagcttctgttaaggaattgctcactgattgaagagcttccaagcattgagaaactgacacaccttgaagttttcgacgtnnnnnnnnnnnnnnnnnnnnnnnnnnnnnnnnnnnnnnnnggggagatgtcttacctccatgaagtgaatctttcggaaactaatctcggtgagttacctaacaaaatctcagagctatctaacctcaaagagctcatcctaagaaactgttccaagctaaaggctcttccaaatcttgagaagcttacacatctagagatcttcgatgtttccggatgcaccgatctagataaaatcgagggatcattcgagaatatgtcttaccttcgcgaggttaatctctcagggactaatctgaaaacgtttcctgagttgccaaaacagagcatcctctgttcttcaaaacgtattgttctcgcggattcgagttgtatagagcgagaccagtggagccaaataaaagagtgtttaacaagtaagtcagagggctctagcttctctaatgtaggggaaaaaaaccgcgagaaacttctttatcacggcaatagatacagagttattgatcctgaagttcctttgaatatggatattgttgacatcaaaagatccactgatcttaaaacagagtatatagccaaagcagagtatgtctctatagcagagaatgaatccaaaagcgtatcttctctcttcgacgagttgcagatggtatcggtaaaaggttgttgggttgagaggtgcaagaacgtggatgttatcttcgaatcagatgaacaacaagagaaagaaaaatcatcattagaaagtctttggatctcaaatcttccattgctaacaagcttatacagtagtaaaggaggattcattttcaagagccttaagaagctaagcgtagattgttgtccaagcatcaaatcgctattcccggagattcctgataaccttgagattctacgtgtgaagttctgtgataagttggagagattgtttgaagcaaaagcaggagaattatcgaagcttcgt

SEQ ID NO: 37712 - DNA, 400 bp, Arabidopsis thaliana landsberg
acatctaaatatcgtcttgtgtcttggtggaggtctataaaatgaaaaagtttttgcggaaccatactcataatagagagctgtactaattttcccaaggcattgggggattatacagcttattgactttaataaattggggtttaaaggcttctttaaaaagttttatttaccgaagctgggatttgggagttctaaaattatcagaattatttatgccgtagtgtgctcaattggtttaaaaaacattgggtctgaattgcttgtttcacttgggtagagaacttatggattgaggcgttcacacaccgcccgtcacactatgggagctggccatgcccgaagtcgttaccttaaccgcaaggaggggggtgccgaaggcagggctagtgactggagt

SEQ ID NO: 37713 - DNA, 2956 bp, Arabidopsis thaliana landsberg
ggcgagtttcaaaaggcactttaaaaccaggaaaggtaggaactatatagcttcatttatgtgagtacaaggctttgtaatgttacaaacacgtttctattgggagaggagctatacatatgatcttgatcccttcctatttgaaggttgttgcaatcaagaagatggatttacctacgtttaaaaaggctgacggagagagagaatttcgtgtggaggtggatatcttgagcagactcgaccatccaaatctggtttctctgatcggctattgtgcagatggaaaacaccggttcctagtatatgaatatatgcaaaatggaaacctgcaagatcatttgaatggtaagtcacgaaataagagtcaagtccacttaaggcaattgggaactaaacagcgtctatatcacaggtataaaagaagcaaaaataagctggccaataaggctcagaattgcacttggagcagcaaaaggactcgcatatctccattcaagttcttctgttgggattccaattgtccacagagacttcaaatccaccaacgttctactagactccgattataatgcaaaggttcttataacagttaattaaaatggacggtttatgcagcactaataccaagcatagactaaaactaagatgtgagtgtaattcttgcagatatccgactttggactagcaaagttgatgccagaaggaaaggatacttgtgtcacagcaagagttctaggaacatttggctattttgacccagaatatacatccgtaaagattcttacttatatttcacacctgattcttctgatagggtctagacactaattaaggaaatttaaaacttgctaataatggcatgaaatggcctggagaaggaactttaatcacacttacatatcagagcccataagcaacgaaagacagttttagcataacttttgttccatttcttctgtggcagacaggtaaacttactctacaaagcgacatttatgcatttggggttgtactgctagaactacttactgggcgcagagcagttgacttaactcagggccccaatgaacagaacctggtactacaggtaaaatggaccttctaggttctaagattcacaaaaagttcacagctcaagaaacttaacataggaatacactgctcaattttctctacgcttcaggttaggaatatactgaatgatagaaagaaattgcgtaaggttatagatgtcgagctgcctcggaattcatacagcatggaagctatagccatgtttgctgatttggcatcacggtgcatccgtatagagagtaaagagcgaccttcagtcatggattgtgttaaggaactgcaactaattatctacacaaactcgaagggtggtttgggtgggacgattcctacattcagaaggctctaaacactgaattctttgaaaccagtaatcagtattactgtcatttttcctaaaatgagaggtggctgatagaaaaacttattaaaaatataaacaaataatcctaattatgaattaccggaaatttaattcaacttccagctactaaactttgatcaagcaatgttatttggatatatgtactatcaagtcaataagacaatcaagcaatagatgtatctgaatagtatgctgtatttgctatgaatgttttgcttaagagaaatgataaatattaattcacgtgtgtagcctttttctttccttctttcacctaatgcctaaagaattaaccacatgtatactaacaagaaatacaatcgctgcctatacatgtagtttataacaaagataagagtgtgtgtgaagtacctttactaagatcatataaacaaaaggttgaagcaaacgggattatcaacccgtacccttggtcatgtcacatttagctcctacatgatggagccacaatttttgttataaattcagagaagctagacaaacactaaacgctaaattggtaaacagatggaaaaaactgtacccatgtttacacatttgcagaggaggtcagctcattatcagaccccaccatttctactatagggttggtgcatagtggaagaagcttcttccgcatcaaatgcttacgccgctgtaacatcagaaggaccaaaacggtatctgtcttaacaacctcgtatcctgccttcttgtacatattgaaaggagcctcatcaaccatcctacaatgcaagtatacatcttttgatggactaatctgagatatcaattcctcactcgccttcaacaaatgccacccaattcctctccttctaagatcctctttgacagtcatgttacagatataaggtgattccttaggaggagtaggagaaggaggagaagcattagcgcctcgtttctccaaacaaacctcaacagttccagccatcacagcctcctcctctccatcatcactaaactcatcaacttttttcctaaagaaaccaactaaagtaactgcgtgtggcaacacttctcttctctcaatcaaatactgcttaaccaaaaaccgtaacacagattgataaccagaaggcaataacatcgattcaccaaatgactcagccaatagatgcaccgttgaatccatctcttcatgtctcataactcgaacccacatcgatccagattcaagctcctgaaaatacgcaaatccttcaagagttttaagcttctctaactcatcgttactcaaaaacctcccggtacgaaacgattcctctagaaacgcgtaattcccggtcgatttcgaattttcttctccagtttctgtagctgtcgaaactgaagaaggagggaaagcgaatctgagattggagcggtgagatttacacgaatagagtaatggatatctatgtgacgaagacgagaagccagacttcgttgattggctcggtttaagagaatcaacagagaaagagagtgagatgc

SEQ ID NO: 37714 - DNA, 1850 bp, Arabidopsis thaliana landsberg
aatcaggtatgtcctctaacctgtttgatttgtctactgatgagtctgttagtaaaattgcagaaacaggtagaacgaaaagggacttatccccaggtggagctattgatcaaggtggagaaaacacacctgaacagaatacaaatgagacaacaccagaggcaagaacaaggactcctgttaatcgtcaaatagcaattcacagagcaaaaagacagattgtcagacctgccagactagaagactacatcacagatgaagctgaactagatcaagtagctggatatgcctatatggccactgaggatggagaaaagtcagaactaggaagctttcaggaagctttagatgatgctgatcaagacaagtggattaaagcatctgatgaggagatggaatctctcatgaaaaacaaaaccttgatactggtggacagaaataaagaacagaaacctattggttgtaaatgggtgttcaagaggaaagctgggatagcaggagttgagggtcctaggtttaaggcaaggcttgtagcaaaaggttattctaagaaggatgggatagattaccaagaaatcttttccccagtagtgaaacatgtctccatcagattttttctaagtatggtaacccattttgacatggagcttcagcagatggatgtaaaaacggcgttccttcatggtttcttggatgaaacaatatacatggaacaacctgagggttatattgatgaaaagaatccagaaaaggtgtgtctgttacataggtctttctatggcttgaaacagtcactaaggcaggggaacaccgggttcaatgaattcatggaggctcatggttacaagctgagctcatatatcagctgtgtgtatttcaagaagtttgcaggtggtgattatgtgttcctattgctatacgtagacgacattttgatagctttaaagaacatgaagcatgtaagtgatctcaaagagctgctgggatccgattttgaaatgacggatctacgtgaggcaaatggggagtttggatatggaaataaacagagacagacttaaaggagctctttataactcccaggaaggttatctattgaagctgttgtgaacattcaacatggatcaatccaagccggttctaacgccaatgggaatacatctgatattgaggaccgctacagatgaagaagttaaaattcagtacgaggcaatgagaacagttccatgtcagagtgtaatgggaagtctaatgtatgctatgataggcacaaggcctgatctagcacattttgttggtcttgtctgcaggtttatgagtaaacctcttaaagaacattagcaggcagtcaagtgggttctcagatatattcagggttcgttgaagagaaagttgtgttacagtaacaagggagatttcataattcaaggctattgtgactcagatgatggtgaagagcaagacgggagaagatcaacttcaggagttatattcactgttggtggtaacgtggttagttggaagtctagtttacagaaagtggtagcgttgtcatcaacagaagttgaatatctggcgttgacagacgcatcaaaggaagcagtttggttactaggactcatgaatgaactcggttttgaagaagaaacagtagacatttataatgactcgcagagtgccatcatattagctaaaaatgcagttcatcatgacaggactaagcatatagagatcaagttccatttcattagggtgttgatctacagtggtttgataagagtgaagaagattgctacaaaaaccaatcctgcagacatattcacaaaagtttgtaccaatgggggaaaact

SEQ ID NO: 37715 - DNA, 2230 bp, Arabidopsis thaliana landsberg
  unsure (1)..(2230): unsure at all n locations
atattagtttctatatcaacagctgcatacgcatcattggaccgttgccttatcatttcaaacggtttttgtgatccgaacacttttagtttttacctcttcgaatttttcgaaattttgggtgtccagctcgtcattaacttggggaataaaagcagccttcatctgatacaacttttcccattcgacaccactgaaccaagggtgttcctacaaaaaataccagcagaaagcgtttatttaagcatttatcgatagtctttagacacgggaacttcgaattataaagcacaaagtaccttaatttcatttgctccttttgttccaatcctttgttctacgttgcataaaagtctacaaattagatccttggcttctggtgatagcctaacctcatcagggaattttaaataatttttccaatttactatctgcattaaaaacaataacaagtattcagagatgtgcatatattaccaaagaggtatcattagaagatcaagaactaaatcgaatgcaaaaatttgagattactagaagtctagaacagagttaaagtccacaaaaagtgaggattggtacctttctacaagttgtcattggctcgtctgaataaaatggtggaaaccccacaagcatttcatacatgatcgcaccaagtgaccacctataggaagaaaacccgaaaaaattatcgacaacaatgtattttgagttgaagaaacaaaacagaacaagacccaacagatttgctgcacctaccaatcacattccatgccatatcctttcttcaacaaaacttctggagcaatatagtcaggagttccaactgtagaataagcctgcaattgatagcatttcacttaataagctgtatttgaacagaaaacttatatatcagtgagaaaaacttccataagatgaataaattaatgatgatttgttcaatctggcaagtagaaatctcagaacaagaaaagaacgataaactcacaagcatccttctatttctctgccagttttgtaattgttccatttgagagcgggtacgtctcggtgccacagggcggccatcactttgtagagccccactaaggttgtgtgcaactacgaaatctttttcctggagaatactacaatctagtggcttacataatccaaaatcggataacttcatgtgaccgcttctgtcgagtagcagattatcaggcttgatatctctgtaacaaattggagaagtaaatggatggtcagaacaccaaaaaagaaaaatgatacgctacaaatttactcagatagctgattgcttcactagacctgtggatataattgtgcttatgaatggactcgatagctaagacagtttccccaacataaaatcttgcctcatcttcagtaagtgtgtctttcctcataagtaatgtgatcatatctccaccaggtagatactccataataagatacaaatactcttcatcttgaaaagaacaatacagcttcacaatgcaattgctgtcaacctctgcaagtaaatttctctctgctttcacatgctccacctgaaaaagaatcagatttcaacaaacatgaacgataataaacaaagatatatcaaacaaaagcagcttgaaggagatacctggcctctacggagcatctcagatttcttaagctttttcatcgcatagacattgcctgttgtcttctccctacatatcctaacctgcatcaagaggaaaaacanacataagcattgagattacaaattttaagcgctatcccaacaccaggagctaactgtatgatattatgctgaaaactacaaaaagacaatctgatttttaagaaaacgtgtatttattctcggatggcataaaccctacaggccactaactagccaactaaagatcaacgaatccaagaactactgcaggtaggtacatcctcccagaagatatttgcatagtgcttctagcacacatggatgcaagcccttcaaggaaggtattcatgtttttaacaattctacatcacaggacaggacgatcaagatgatgtgtagatatgcacaccaatgaaaagctgagaagaaacaggaaaagtttacaataaaactaatgctacctctccaaaagccccctttcctatcattgtcaatggctcgaagtcatcagttcccattttatgtctctgacggcgcatgtattcagtttccttcttctctagatcc

SEQ ID NO: 37716 - DNA, 2714 bp, Arabidopsis thaliana landsberg
  unsure (1)..(2714): unsure at all n locations
ggcttgttaatcaaggatgagctcccacaaccaatgtacagtttcaaatttatactctctttttttttttttggtctcattctcaagtctgatatcttatatttatccagtgatgctgactctgtgaactatcagactgccaacaagttaaagagtcccttgatcacgaaggtaaactagagcttggtctattggcttgnnnnnnnnnnnnnnnnnnnnnnnnnnnnnnnnnnngcaaagaggcttattgatggcaatggtgaactgaagagcaaactgctagatttccgtaacgacccctctatatcatgtgagacatatacatttttaaagaatcgtttgttaacaatgtgctggcttaatatggatgacaaaattttattgaggttttcgtgttcactatgtacaggttggcttgaagatgctgcttattttacagctattgacaatactttaaatgcatacagttggtttgagtggcctgaacctcttaaaaacggtcatctttctgccttggaagctatatatgaaagccaaaaggagtttgtaagatttttttggtggctctatctaacttctttgatttgatttcatcatgaataatgttttgtgaaagcctttgagagtaacctcatcttctntgctgcagatagacttgttcattgctaagcaatttttgttccaaaggcagtggcagaaagttcgtgagtatgcacggcggcaaggagttgatataatgggagatatgcccatttatgtaggatatcacagtgcagacgtttgggcaaataagaaacatttcttactggcaagtaaattttaacatatggaggcaaacagttttatcatatgtaccaggaagaaaattagtctttcctgaaagtcgctctttttttgttttgctttacacagaacaagaaaggctttcctcttcttgttagcggtgttcctcctgacttgttcagtgaaactggtcaactgtggggcaggtattgatgctactcactctgctaacttagtttactgataatatgttttgtttaccttttcacttaaatagttatgaaaaggcactgtttgtttttagttataatttgtctcgacgtaagcaatatatttagtgttactgtagcatgttcaacgtgaatttgtttctggctttccctaaacaatttgttgtacttcacaattgttccatatcctattctttgatttgaagccctctttatgactggaaagcaatggagagtgaccaatattcttggtgggttaatcgaataagacgcgcacaggacttgtatgacgaatgcaggattgatcacttcagaggatttgcaggattttgggcggtcccttctggtgagtttaaattcaaacgagaaaagagtgactgatcatatatgttggctacatattggattggtatttgcataggattgatcagttgtgatattttgcagaagcgaaagttgccatggttggacgatggaaggtgctttgcttaattcattgatgtaaaataaagtaaggtaaagaaactaagaactgcaaaagttgtattaatgtaggtaggacctggaaagtcattatttgatgccatttccaaaggcgttgggaagatcaaaatcatagctgaagatttggtaagctatcagacttaattatacaaatactcagcacttacataaagctcaacctgatacgttataatagatgtgtatcaatttatgagtttataatgaacttgcaagacttgcttgtagaatatttgatggccgatcatttgactgtgaaatatcaattgaaccagtagaaattcttgatgtcctgtattcctcaataatccgagtctagaatcatatgctcagtttctgcaaggcaaattacatattgaaaatattgcatgtgattgtttgctaatggaggctatacttttgccataagacagggagttattactaaagatgtagttgagctgaggaaatctatcggagcacctggaatggccgtcctccaatttggtaaaatagctttggcttcctcatgttcttcactgcctttttaatttctctcagtctacttgattatttatctgatttcagcttttggaggaggcgccgataacccacatttacctcacaatcatgaagtaaaccaagttgtatactctggaactcatgacaacgacactgtaagttgattttactcaatggataaaaaataaaccgaaagaaatgtatctgtctcgttgatttttctttggtatatagattcgaggctggtgggacactctggaccaagaagaaaagtctaaggtcatttcattaatctcaataccattaggtttctgttttttccctcagtttttgattgtaagatattcacaatggcaatatcctcgtgttgcaggcaatgaaatacctgtcgatagctggagaagacgatatatcatggtcagtcatccaagctgcattctcttcaaccgctcaaaccgcaatcataccgatgcaagacattctaggacttggaagttctgccaggatgaacactccagccactgaggttagtcactgccattttgttttcaactgatagcaattttgtttttagctcatagcaatagtaatttggtttgtgatacattgtctataacaatgtaactttggttttgtacacaaaaaaaaaggtggggaattggggttggaggattccaa

SEQ ID NO: 37717 - DNA, 3834 bp, Arabidopsis thaliana landsberg
ttgcaaatgtgagagatatcattcaaatttttaatggatgatgtagtgaagtaggattacatgtgtttgactgatgattatagtttgctctaaaacgtgcagccatcggcgtattgttgagtacaaaacagcttattactcattttatcttcctgtgagtactctgaatccctctctctctatatatatatatatagagtcacacgtaggttcagaggttgcagcataatttatttcgtaagctagacacattctgtttgaccgataccattggatgtaatgagatgatctgttaaacattgctatttgctaggcaattgataacatttaaagtctatgaaacattttaagtctgttgtgaacagaggtcctcactgattattgcactcaggttgcttgcgcattgctcatggcgggagaaaatttgaaaaaccatactgatgtgaagactgttcttgttgacatgggaatttactttcaagtacaggtagttagttagatactaatacacgagagtttatataatgggctcatttcaggatccgcgagagcaatattattaagttgatatcgtttcttttccataggatgattatctggactgttttgctgatcctgagacacttggcaaggtgaaaatttatgccaacacatttggtattcaaagctgatcttattgtatttttgtgtttatcttaccaagcatgcatcgtatatcacagatagggacagacatagaagatttcaaatgctcctggttggtagttaaggcattggaacgctgcagtgaagaacaaactaagatactatacgtgagattcagtttctttctcatgcgtatgaggatcattttctgcataagatttgtatctagttttgaagcaggatcagcatgtttactggactgaataaattttcaatgtttcaggagaactatggtaaagccgaaccatcaaacgttgctaaagtgaaagctctctacaaagagcttgatctcgaggtttgccactaagcattaactcaaaacctttcgttagttagaccaagtagaataagagaacgtaattattgcttatgaaagtagagaacatgagagatgtgatatatatgtaacaaaatctgcgtttgatcttgattattccatagggagcgttcatggaatatgagaaggaaagctatgagaagctgacaaagttgatcgaagctcaccagagtaaagcaattcaagcagtgctaaaatctttcttggctaagatctacaagaggcagaagtagagacatactcgggcctctctccgttttattcttctgacatttatgtattggtgcatgacttcttttgccttagatcttatgttcccttccaaaaatagaatttgagattcttgttcatgcttatagtatagagacttagaaaatgtctatgtttcttttaatttctgaataaaaaatgtgcaatcagtgataaattgatacttgttaatgtggcaaaaattttgtgtcacatgagggtgcaacagaaatttggaaggacctgaggctgtttgagcttacatcaccttgcaaaatcgaaacagggtttggggaatctggtcctatgtcaaattagggaccattgttggagaagaagaattttcaaggacatgtgtaacagatagactccaggaagcacttaagaagttacaatagataaagacgagaagattagtggaaatgaatctatagtgatgatcacaatctaattgatgatcaccgatttgagtctcatcttagacagtacattgacaacaaaggtaccatagttttagtggttctgattttctaatatagaccccaagaagatattacagagataacactggttctgcttttcagcttaacaataaaatacatctgaccctatatttatgcaatgtctccgtcctatatctactatatcgctaaacaatgtaacactgaaaaatttccctaatctacattgtgagagtccagatcaatagtccaatgcccatgtggtagatagaccaccttgccattggctcagtacttgacgataagcctatatcagtaacacccacaagaaatcgacagtcaccaactgaaggatctaggaaggtgaccatgccaagtccatcaaagtcacagctcttttcatgttgcatctgcatctgatagtaactgttgaaagcgtatgagatattatctttttcaccaagctggctgcacgagcccccgtcgttgagcgttgtgcaatctgcttcactgcaagcaagcctgaggtggtcaccaacttgggtcatgtctcttgatgggtgagccacacaccaccttgaaggaaggtactgcacattttttgcattcttgagtcctctgttgcctagtcctaagttgagacgatacttggcctgtccatcgaaagagaagattccccaatgcctctcaaagttaccaggcagtgtgcttttcgctccttcgtcaagcaaaccgaaaagatatacatccgcaggaggagatctaggcctgagcggtgttcctttgttgctcaacacatggctaatgagcccttgattaaaaaccctggctgctgtgagattagcaccaactgctccatctgtaggccaaccaatctcaccaataactataggcatttgaccatatccaagcttggtgagagcagcaacaagagtgtcaaagttcccatcaaatgcattatagtaagtgttaggcccatccggaaccggatgactactcccctcaaaaaaggcatagtcttgtggaaaatccgagttcccatagagactaaggaaaggatagatattaaccacaaaaggagagccattggagttgagaaacgaaaccaattgagtcataatctgtgtaagctcaggccggaacatcccctgagagggaacattagactgatacgcatctgcgttgcaaggaaccaccaacttcacatagctagctagatttgctctaaccaaagattgttgcaggttaaccatagctgggactacatagttctgaaactgaccaccgtaaccagtcagaaacggctcattccctactgcaacatacctattcaacagataaattggtaaaatcctctgcttaatcatagcttaaagacacatatactctgagagaaaagatacctaatatcagcaccgtttttgcctatgaagcgagagagattttgctggacaaacaaatcagaattgaaagttgagagcatctcgttaggaatgccgatcattacttggattccagtacccattaacgctcgaagcgcatctggattcgcatcgaaaagcttcaccttggtgatcttgtttgctttgaggagatccaccactgtggaaggtctcatcttgtgaaacgacaacgttccccagttcacgccgattgcagattccacctcatgggagacgagaagaagggagagggcaaagagagctacacctacaccgcttcccatctttttcactgagctctctctcgggtgctcgacaaagatagcaactttttaaaggttacagctttatttttataaagagactgcatgtcgttttctatttaaataaacgtcaagcagtgcggtttctaaataggaaacgacatagagattgaaattggcgacaatacaggttgatgcatcgctggatttgctggaaaacaaaccgtcaatctccgtctttatagagaaaaaaagattctcttctcttctcgttctcgtcatcgtcttaaagaaggaattcgatttttcgcctgaacctgcggatttttcgattcttcaaattcaatgtcttatgcttatcttttcaagtatatcat

SEQ ID NO: 37718 - DNA, 1385 bp, Arabidopsis thaliana landsberg
  unsure (1)..(1385): unsure at all n locations
agtctacacgatcctgtcacataacaagctgctaggctcaattccaccagagctcgctaaacttacaagacttgaagaagtcgacttatcatttaatgaactggccggaacacttcctaaacagttggctaatctcggctatcttcacacattcaacatatctcataaccatctctttggggaactacctgcaggtggaatcttcnnnnnnnnnnnnnnnnnttcagtatcaggaaacccgggaatttgcggtgctgttgtcaataagtcttgtcctgccatctcccctaaaccgattgtgttgaatcctaatgcaactttcgatccttacaatggtgaaatagtgcctccaggtgctggtcacaaaaggatactgcttagtatatcttctttgatagccattagtgctgctgcagccattgtggttggtgtaatagccatcacggtacttaatctgagagtgcgcgcatcaacggtttcaagatcagcagtaccgctcacgttctcaggcggagatgacttcagtcgatctcccactactgatagcaactcagggaagctggtgatgttctctggtgaacctgatttcagcactggaacacatgctctgcttaacaaagactgtgagcttggtcgaggtggatttggagcggtgtacagaacagttatcagagatgggtatcctgtagctatcaagaagctcactgtctcgagtcttgtcaagtctcaggacgaattcgaaagagaggtgaagaaacttggaaaactcaggcattcgaatctggttaaactcgaaggatattactggacaacttctctccagcttctgatctatgagtttctctctggtgggagtttatacaaacagttgcacgaagcaccaggaggtaatagttcgctttcttggaatgatcggttcaacattatccttggtacagcgaaatgcttagcttacttgcaccaatcaaacatcatccactacaacatcaaatcgagcaacgtgttgctagacagctctggtgagcctaaagtaggagactacggattagcgaggctgttacctatgctagataggtacgtgctgagtagcaagatacagagtgcgttgggatacatggctccagagtttgcttgtagaacggtgaaaataacagagaaatgtgatgtttatggatttggagtcttggtccttgaagtggttacaggtaaaaagcctgtggagtatatggaagatgatgttgtggttttgtgtgatatggtgagagaagctcttgaagatggaagagcagatgaatgtattgacccaaggctgcaagggaagtttccggtagaagaagcggttgcagtgataaagctagggcttatttgcgcttccaggttattaa

SEQ ID NO: 37719 - DNA, 733 bp, Arabidopsis thaliana landsberg
attggacggggtacgcaataagaactccatggtagaacattatttcaagtgtatcaagattggatgtataagctaagagctgtaaaaggaatgttgggtcctgcgaaccatataaactgataccgaagactactattaataaagaaatagaacttcctgccgagtacaaaatcagttctgcagcacgaatacacacggtcgtttccaccccacatgggtaaaagatatcaacggcaattaatatctaattcccacatgatgaagaacaggacaagagccccagaagacagtgatcctatttgaccgatgcacattgctaacatcaggaaatgaaaaaatagggaatgccgagtaactggaaaagccgctaaagtggctgacgcggtaataaatcccgacagtagaatagctcctattgaaagcccatctattcccattctccagtaaaaatcacagaaatcgcaccatgtataatcggcggacagatgaattaatggatcggccattttaaaactatagcacaaagcgtacgtcgttaaaataagttctaagatgcaaatgcatatagtataccatttattgactttatttcccctatgcgggagaaataacattaatgaaccagcagatattggaaaaacaacaattattgttaaccaaggaaaatcattcgtggtaaagacaagatacaccaggtccaaagaacgcgtactcaaaaaaaatatataaataa

SEQ ID NO: 37720 - DNA, 2394 bp, Arabidopsis thaliana landsberg
gttggagtgtgaatgtaaaagcccataggcccattaacaatataactagtaaagcccattaacatttttcagcccatgaggagttttctagggttttgtcttataagatgtcgcatttaggtcattccgcctcttgcttctcttcactcacaatctcacagcaaagcctctcgttgctagaggaatcaaacaatggtaaaccctagctttaatctctatctcttctcatttctcaatcgtttcttcttaatcttctcttaagaaaatcgggttttgatcttcatttcatatagaaatctcctgcattgcttttgattagatatggtaacgagaattcgtgatcctatggttctatccaccttcgtagatgtttttcttcatgggtttttggttttataacttgcttgagaattgaaataggaaaagtttgagactttgcttttgttctgttttagaggtcactgatacgtattcaatggagttcttaccgtagatctttgttaccatcgaagaacctttatattgttggatcttagactaataaaataagatgatttgttgttggtaggtgtttgtgaagtcctccaaatcgaatgcttacttcaagaggtaccaagtgaagttcaggagaaggagaggtattgatctgttgttactgtcaagctagacttcgctttttggtctgttatattgagtttatatgggattaggtgttgtgacctgcaagtggttgctcttataatctgtagatgggaagactgactacagggcaaggatccgtcttatcatccaagacaagaacaagtacaatacacctacgtatcgttttgttgtccggtttaccaacaaagacatagtggcacagattgtatctgcaagcattgctggtgacattgttaaagcttctgcttacgcacatgaactgtctcagtatggtctacactgttggtcttacaaactatgctgcaggtattgaatctgtcatctgctattgttttccaatttaatatgggggattctgtctttatggcttacttatgtgtaaattttttttttgttgaactagcttactgtactggccttcttttggctcgccgtgttttaaagatgttggaaatggatgacgagtatgagggaaacgttgaggtatgttgtgtgattggtttcatcttgataataagaagcattgttattgtctcttgttagaaactcaagtcacacaatgaatcaggccactggagaggacttttccgttgagccaactgattcaaggagacctttccgtgctcttcttgatgttggacttatcaggaccacaacaggaaaccgtgtgttcggtgctcttaaggtattaacttgtttctctttttttgttgtgagtgctcttatttgtcattcttcttgagcaaatgcttatactggcaattctttaatatccttttggttcgctgtttgaatctgtagggtgctttggatggtggtcttgatatccctcacagtgacaagagatttgctgggttccacaaggagaacaagcaacttgatgctgaaatccacaggaactacatctatggtggccatgtctcaaactacatgaagctgttgggagaagatgagccagagaagttacaaactcacttcagtgcttacatcaagaaaggagttgaagctgagagcattgaggagttgtacaagaaggttcacgcagctattcgtgctgaccccaacccaaagaaaaccgtgaaacctgctcccaagcaacacaagaggtagggaaacagaatcaatctagtctatctatattcttgtcttgttggtgtattggtgtctcatttggtcttccatttaacaaaacaggtacaacttgaagaaacttacttacgaggagaggaagaacaagttgatcgagagagtcaaggcattgaatggagcaggtggtgatgatgatgatgaggacgatgaagagtaaatcagtcaagccttctttatctcatgcctcttgtagttttttatcttttgagcttaatgcctcaaattttctgttttcagactaaaacactcagcttttgtgttcacattttaattgtgttcgaggattttgatattgaggatacattttctttgaagtatcattatcttattattacctccatcataattttcaagaatttgtatgacaatagtttgatgacttgattttatctgtagtttgctattgttaaatgtaagaactgttagacttcatctatatgaactagaaaacattgctacaagatgaactagatcacattactacaagtttagagctaaatcactgtataaggaaaaaactcagtattctcttggagctattattatatgtagccttatcgggtactggaactgtcgtatgca

SEQ ID NO: 37721 - DNA, 3334 bp, Arabidopsis thaliana landsberg
gctttgatatcttctttagttgtcagatcggttgtataccgattgtttttagtttctcttgtaggtgatcttgcaataattctatagatttcagttggtggttagttttaggtgttagtcactcataattaatttatccaacttgtatccctagaaaactcgatttgcaggatcgtctaaagactaaagtaatgaaaggaagttttgtttccagcatcgatgatcaaattttgaggatcaatcagattttctatctcttatgtggggttcaattctctgtttttgtatcctctctctctgtcttagcagcctctggtgagaaacaaccaaaaatcgatgtctgctgttagtccggcgtcgatttcgatcaccggatcggagttcttgacggcaaaggatgaaggaatgtttcatcgttctcttgcaacacgttgattccacgtgtcagttgttttaagaacgtgagttgtattagagattatccttcctttttacaagatgtaactgactgggtcttgatgggctgtgtattctgtgaatctttaataatacataatcttcagagacttatctaagtatattaagttttatttgactaatattatatattcttttgtaaacattgactatttagaaataaaaaattgcccaggaattaaatgagcattatcccaggaatccaagggaaaacttattttagatgaaaaaaattgcttagtaaaagcaaccagtcaaaaccaatattttgagcaaagtgggaaaccaccggagacacgacctaagcgggaaacatgaattaaaaaaacaaatacaagaaaaatgtctgttttcacaaaacaagacattatcctaaaatcgggtattcaagagaacccaacaaaatctgcaaccaagatttgagtttgaaacaattacacaaagattggttcacgtaaccatcagagcagatccattacggataacacaactttggaaagagtaaagcatggaagctacacagttccttccctagagaaataactaatttgaacacttaattcattctccttgttgcaataatacctgacaacggtactcccccaacgcccatatcggaaaaatgtttcgatacgcggcatatgttatcatgcagttcctattgaagactcccattatttcctgatatagagagtcaagataatcacttaaccgttaactaagagaaaatccaaacaatgatgtggttgatgcaacttgttacctgttgtggaaaatcaccattctccatttgcgagttgattaaaactttcgcagcacgatgaactggtaatggatctctctccatctgaccactcattattagaaccatcattgcttgtcccggtatttaccacattggtcttattcccctccaaagaaatatacttcttgccgggacaagagagaaaactctctccccaaccaccttcatcattttgtatcttaagaaggaattgaaccgctcgacggatcggctcatagctttggtaagtcttgcccgcagcaactaaacctcgaacagcaaagaaggtcgcgtatatgaaacacactccccaatttccataccacgaaccatccgccatttgcaaactctctatgtattttacagctttagctatataaatgtttctatttcttttgttctgtgccttggaaactgtttcatgaagcgagtcaacactactactgctgaccccgtgcattctacatactcatgctcgagtattgtctcttccataaactctatgggaataagccactgcatttgaatatttgaaatcatatttttcatttatatccaaataaaaatgaaacttgaacaaatgattactacctctagccactttttcccactcgctctctcccatacagctttacctccattttcgctctgtcaataagagaaatgtatgttttctttttggttgaatgagaattgtgttactaatcagcttgtggtgtttaaaattaatataaaaaaaaatgaatgatatgtgataagagtttaggtgttttggttttgggagttttccttttaattttgttaagtcggtttgtatgaggaactatataaggtcctcttataatcaataagaaaccgaacttccaacaattaacctgattttctaagagagacttgggttaagaggaagctttgctttaatcttcttctactctcaaactatagctacggctcctattactagatataagtctaaagtgttctcgtaacaattacctgcaaatagagaagcatattgacggcatcataaagcctctccacgtccattttctcatcaatgaaattagaaggcatgctctcaaagatcaggcagcactgaccacacacgggaattagtaatcagatcaatatattgggattgaatgatagagaaacacacacctctaaactctcggaagtacaatctgaagctggccatccttgatctttgtctgaaaaaccccatcctcctttggatatgtctctaaacattttgatatagtaaccaggaggattctctataagctgagacttcctcaagaaagagtatccctttattagcattgatcttatctcatcatcaatatcagcagctaacatgacttttagcaacaaaactgtatcccatatttggctaccaaaactctacacattatggaaataatttgatgttatcttgaaaaaatgatttaaaggtcaaactctatacattagtgaattcgcattagtgccaaataaaaatgaactaacctggatttttaggccgtcctccgaaatccatatgaaaccagagacacgagcaagatgttttttaaagtaaccactctcgggaccttctgcccaacaagcaagcatatgaaacacctaaaacattttttttttaaccatataacttattagtatagatattataagattcagtatacatagttttggtattaatatcttagagagatcaatcatatatgtcaactagattctctaactcatgtataactatgaatccctaagtgattaataaaagtatcggttcataatctctctatataactttttggtttctctttacaattgttttttaattctttgtatttttttttttttttttctatttttgattcttataccgtttacctttggcacacctccaccggtaatgtattgggtggcttcgtcatggtaatggataagttccaaagcccttcggatagctctttctcttatgagcttcttgaaaggccatcgatttaagatattctccgagaacatgtgcacacttttccaaaacaagtcttgtacaaatgtttgtggata

SEQ ID NO: 37722 - DNA, 3054 bp, Arabidopsis thaliana landsberg
  unsure (1)..(3054): unsure at all n locations
tgcagttcgactctagaggatccccgtttgagttttgacattttaccaaactcactcactgactcacggttaggttttgacttgtaaagagttggctacttgggcctaagatgggctttatcaggtcggatttttcacaaaaaaagtcaaaaaaaaaaattcttaaaaatgggtgagcaaatgaaaagcctttgaccgattcctttactcgaagaggaagagtagaatacgattcgtagacgtcgacgtctttctttaatccatcggacggattccatctctttttttttttggcaagatgggtacacatttcaacgaggactagttgcggtatttaataatcacatttgtttctacatccgaaaatagcttaataggacaagcaaacgaatgaatatatcaatttacgcgtcaatccagccctttaatttcagcattcatgacgttgcttcgtagtaagagagtgtatattagttaatttgaaaccagatcctctgctaaaaaatttttagcgttggttcatcacaaagaccttaatttaaaaatatgaatgttaatatgttaccatggtccccaaaaaaataaatactacttgaatgttacaccttacatttgaatcagccatcttttatttttttttctatcaagagaacgcctccgttgaccattttgaatacggttttattacttcctaatccaatatcaaagtcttaaaaatttgtcatgtgattgattcatagagaaaagctacgattgattttttttccataagcagagaatctggtttttgtttctatgcaaatatagttcgaaactgatacataactcgagaatgcagaataagaaattagaaaccaaatttgttttgaacaaggagagcaaacgatatatatccatattcagatctaaatctcaaccatgtatgaatgaaaagagatccgattgaagttagactgatgatgattgatcacatttaagaagaaaagagtacctaatttccatagttattcttattcccgaaatccagatctgaaatctggaaaactccctaggtcgaaggaggagcggcggatccattgctgttgaggagagaagacgacgacatcatcttctgaaactcctcgaaattaacatttccatcgccatcagtatcaacatgaccaatcattctcacacaatcttcaacagagcaagtcataccaagacgattcagaactttatggatctcagaggacgaaatcagtccgtttttattctgatcgtagagatcgaaagcgtcacggatctctacagcggaggaagacgagcgacagagagttgagaattcgtcgaggttgatgtaaccgtcgcgatctgtatcgacttcttcgagcacgcggttgagttccgtctctgtgtaggaagtccccatagccttaaacacaccgccgagttcgaggactgagatcttgccgtcgccgttggnnnnnnnnnnnnnnnnnnnnnnnnnnagctcctctggattagccatgtccaccgttgcaggcgtgggtttggcggtttctggattcgcgcttgccattttttttttgttaaaggtaaagttggagagagagataaagagcaattagaagatgatgagtttgacctttttatagaccttttcgctagatgtcactatttacaagtttggaatcgaatcttgtgtatttaatttccgttataatacgtatctggtttgggaatactgtatttggttgaaatatgaatgttttgatctgttatttaaaatccttttttctaattatatatggttattatatacactctcaaacatggtattctctttttataagtactacttttgctaggaaaaaggaaaactaaaatactactttcaatattcacaatgaaaaagaattatatatggaacgttttaggatattaatgttactctcagtctttccacatggcttaacgaagacggcaaggcaagattatgtcacgtgccttgataatttgttttttcggctgtaaatgttaaaatgaaagttacatttgtttaagacgaaataacaatcctgaaacagagaattcttcttttaatccattacttggttcagtcttaaactatgttttgataatatatcgtagggactattatattacaagtgttactattttgatgataccattgctttattttagtattttgttatgcatttaaagaaaataaaagttggaggggctaacgtgactgagtgaatcagaaatgtgtctcaatctaacgcggccaacacgaccggtacacactccttttacgcggtgtgattgttttacaagtagtagtggggtcttttttgaattatcggtgtttttttttggaaatttggtagcactcactgctgtggcgatgatgcctaaatcacatctacttttctagaaactaaatgaaaactaaaatacaagtctagaccaacaatattttatcaaaacaaattattaaacgttgtttgtcaatttttcttaaaatggcattagagcctttacaaacccaaaaaataactttgcatgccttttattgctcatattgaagaaagtgatatcacggcttcagtaaaccaaataatttcttgattgtttctctgtactgatgaaattgagcttgcttgcgcaacaagcaaattaaatattataacatttgaccacaaaaaaggggactcaatatttatacagagagaatagtggcctttaaaagcacagaaacttcatgattaacaaggtaagcaaagaatgatatgggctatctatggaggctgataacagacgtgaagttgtatcatgtttcatccctgccccctacaaatgagaaacacgacatatatcaatcaagcagaaccttgttgtttatcaaaccgaaatgggaaaagaaatgttagtgtatcttaagcaaatgtgcaacaacaaagatgtaaactttaagttcagcttgtatcttaggaatcattccctaattaagcacaaattggcagatcaactagggaagaaattgcgaccaatcttataagttagtac

SEQ ID NO: 37723 - DNA, 4029 bp, Arabidopsis thaliana landsberg
  unsure (1)..(4029): unsure at all n locations
agctttatgaagaagaatataatgaccgtgccgacatctattcttttggcatgtgcatgttggagatggtaacatgtgaatatccatacagagaatgcagaacccaggctcaaatatacaagaaggttacctcggtaagtctgacctgatatatataagtcttacatttctcttcgacacagggatcgtccttgaccattgttgcattagcagggtataaaacctcaatctctcagcaaagttgatgatcctcaagttaagcaattcatagagaagtgtcttctcccagctccttctagaccaactgctctagagctcctgaaggaccaactccttgcagtagatggcgccaaggactccactcttactgcttcatcaaacacaacattcaaacctgcaatgccaccacagtctgaatatcgtcctatggatgttgaatataagaagaatacaagtgtttccatctgctcttctgctaaaagcagccaagaatgcgcattgctccagaccatggaagtccagagggttgctgaaagtaccgaattcaagctgagtggagagaggagagatgatgtggcagcatcaatggctctgcggatcgcgggctcatctggtctgtttcacgatatcttatggccattttctttttctcttctcttgcatattttcgaattgcttaatgacagtataaattttatatcaggtcaagcgagaaaagttgattttgacttcaatctgaagacagacacagcaagagcagttacaggggagatggttgaagagcttgatctgtcaagccatgaggttactgtgatagctgagatgatagatgaactgataatgaagctgaaggctaatcgaagcctgcctaatgcaaacagtgtatatcagtccaaggatgaagaagctggagaatcaatgaagtcagagatatcagcggactactaccatcgggtctcctcaaacgaggggtcacggctcggctgctgctgcgaggcagtagagtcattgttgtcctcgtttctggattcatgctcaatggtgtcaaacaagcagtcggaggatctgaagacggagctgaatgtgatagagtcacaatataaccaatcgtgtcaacgactgcttagaatgaaagaggaagctatagagaaggcgaaacggaagtggatgaagctgagttgatgattccttcatttcatttaacgtagccacagttttgggatttactcaactttttgttttgtttctttgccttttatttcatttctcgtagcttttggttacatgtaaaaatatgcattgcatcaggaatcacagattgaaagaatgaaatgtatttgacgctaattcaaaatttagaactatatggattgtgtcattgtgtgtacatatctgttaatagtttagaaaattggcaaattcattttcgagatataaaaagataggagccaatgaagaagaataaataattaagagatgataacaaaaacaaaacaaaaaagaagcaatgactgtttgctttaataaataaagatattcaaaaattccatcacatgattgcaccgacaacagcgcaagccagcgaagcagcgacagtggagaaagcagaaatgagcgaggaggaagcagacgatttctgagagagaggaatggacccgaaggcgttttggtaagagggagcgtcggcggcagaagacggagacaaggcctctgcttcggcggagtaggtgccgacggagactaggagcttctggtacttggtacagtggccggggtttgcacttgtgaagtatagggttccgttttgggtgaggttgaagagagagttgccgtcgttcatgtacaagattgggtctttggtgttgcagctcttgaaattggagggcgtcacttgaatcagtgagtcttcgcttggtgggtacaagaacactttattggttgcagcaaccaaaaacaaaccaatgattagattttagagagatttgaaattataagaagaagaagagttagaatattgacttacagagggagtcaccgatcttgaaagagtgagatttgggccatttggaatagactttagcatcaattgggatgccccaagcgtccaagtcnnnnnnnnnnnnnnnnntcgacgacactttaccaatctcttgtcccaacaatatcatcacctgtaataccaccaccaccatcggtcttgctcaaactcatcactcccatcttgattggtctactttgcttctcagatctcctgaaaagctaagcttataaattggtgaagcaaaggaggtggaatgacggttgaacccctgactgaagatggggcacatggcctgaagtggtcaatgtcgaatcgtatcagtacataattgggtctaattttttattcatttgtaattataataatgtctgcttgtgtattgttgtttcacatggccaccactttttaaataacgtgtggttccatagatttattcatgtgtttaagtgtattagtttatgactgactatcgccacattcaaacagagacaattattgcctgaattcaaaattgcaaagagagattgagcttccttttaaataaatctatggtttctatggtttagggccaaaatcgacttataaagattgtttttgacgcacaaaaaaaaaagtagaaagattcaagaagaatagtggctaaagcccaaataagctgacgtgcagaggtattagggtgtgtttgctacatctggtgaaggcccaaaatccaaatttaactaaccaggtggaaagactttatgaccaacgaacatattaagacaggtggaaaaatcataaagagaaacggaacggcgtttcttcttttatcttatgtcatcggagatttggttattatgggtttagagggtcagcttctgaggtcatctccttttctgctgaccactcttgtgatcctgcaatgataatgagagatacactagaatcaccagtccacaataattgatctgatcaatggtgctgttagatatgaacatataacagttctaatgtttgatggaaatgcaggcaaccgtgataaatgaatctacaagcatgatacggaattgcagatcaaatgcaatgttcatcagttagaaattcatgcatgatgctatcatagaatccactagttaagttctacgatccaatcaagcgtgtgtaccacatgatttctacttccctttaaagcattttgtgagtaatgtcagaagacttacttgacttgtggatctcggctacattcatcaacctcctctgcaatatagaggccacaaaaaggaatacagagcacattccaaacatcacggtcattggaaacgcgtcaacctttagcatacaaagatcagaaaagcttgttaggtccatggcaatgcatcttttcctatacaggtttatatccaaacaaagaatccagatgatagatactgaagattgtacattacctaagggagccacagataatacacattaaaaaaggaagaacctatatgatggatattgaataaatgacttatagattgtacactagtatctaagggcaaggtaactcgttctgaataattataaacgaaatgggaatctagatacgctcagcaggccaagcgaaatatttacccaaaagctagagaagtgtaacaattctgttcagaacataacgttccgtactagcagtgatactaacaccagtgcctcgaagaagtctgaataaaaagagaacaggaaaactcacattgtataatacaaggcagacaaagatgttgagtgggatgcggaaaaaattcatgatggtgcttctagcttcctctggaatgtattgcgatctcatcttcattatagatggccaaaagattcctacacacgcttcaaatgtgcagaaacccattaactgaatgcatccagagaaggatatgcttcctccttttacacttgagggcgcctccaagaactgttcctatttggaaatcgagaagttattatcggtactactctttgaatatggagagtaa

SEQ ID NO: 37724 - DNA, 5985 bp, Arabidopsis thaliana landsberg
  unsure (1)..(5985): unsure at all n locations
cctacgcgttaagaacgagtttgatacccgtcgttgcaaccacagtaactacttttatggaatctggtgtaataactccacaggtgcggtcacaaagctacgactacgggactgtctcagtggaactctcaaatcaaacagtagcctcttccagtttcatcatcttcgctaccttgatctctctcacaacaacttcacctcctcttccctcccttccgagtttggcaatctcaacaaattagaggttttatctctttcctttaatagcttccttggtcaagttccttcctcattaagtaacctaagcatgctttctcagttagacctttcccaaaacgatctcaccggtagtttcccacttttgcggaatctaaccaagctcacagttttagacctttctcataatcacttctccggaactttgaagcccaacaatagcctctttgagttacaccaccttcgttaccttaatctcgaggtcaacaacttcagttcctcactcccttccaaatttggcaatctccatagattagagaacttgattctttcctctaatggcttttctggtcaagttccttccacaattagtaacctgacccggttaactaagttgtaccttgaccaaaacaagctcactagtagtttcccacttgtacaaaatctaaccaacctctccgaattagacctttcatataataagttctttggagccatcccttcttctctcctcactttgtctttcctatcatctcttgatctgcgtgaaaactatctcactggttctattgaagttcctaactcctctacgtcatctaggcttgagttcatgtaccttgggaataaccattttgaaggacaaatcctagagcctatctcaaagctcatcaacctcaagcatctcgacctctctttcgtaaaaccaagctacccaattgacttaaacctcttctcctctttcaaatctttggtgaggcttgttctttccggtaatagtttattggctactagtataacttcagattccaagatcccactgaacttggagaatttggtcttgttaagttgcggcctcattgagttcccaaccatcttaaagaaccttacgaaattggagcatatagacctttccaacaatagaataaaagggaaagtcccggagtggttttggaaccttcctcgtctccgcagagtgaatctttttaacaatttgttcaccgatttagaaggttcggaggaagttttagtgaattcatcggtgaggcttttagatttggcttacaaccattttagaggaccatttcctaaaccaccactctctatcaacctcttatctgcatggaacaatagtttcacaggaaacatacctcttgaaacctgcaaccgaagctctcttgctattcttgacctatcctacaacaacttaaccggtccaattcctcgatgtttgagtgatttccaagagtctctcattgtagtgaacctccggaagaacaacttggaaggcagtcttccagatatattttctgatggtgccttgcttcggacacttgacgttggctacaatcaactaaccgggaagcttccaaggtctcttctgaattgctccatgctaaggtttgtaagtgtagaccacaacaaaatcaaagacacatttcctttctggcttaaggctttgcctgatttacaagcacttaccctccgttcaaacaaattccatggccctatatctcctcctgatcgaggtcctcttgcgtttcccaagctgcgcatacttgaaatatcagataacaactttacaggaagcttgccaccaaattactttgtgaattgggaagcatcatcactccagatgaatgaagatgggagaatctatatgggagactacaacaatccttactatatctacgaagatacagtggatttgcaatacaaaggtctattcatggagcaaggaaaggtccttacttcctatgccaccattgatttttctgggaacaaacttgaaggacagattcccgaatccattggtcttttgaaggcattgattgcactcaacttatcaaacaacgcattcacaggccatattcctctgtctttggcaaacgtgacagagctggagtcactagacctctcaagaaaccaactctcagggactattcctaatggactgaagaccctctcgtttttggcgtacataagtgtggcccataaccaactcagaggtgaaattccacaagggacacaaatcactgggcaatctaaatcctcctttgaagggaatgcaggtctttgtggtcttcctctccaaggaagttgcttcggaaggaaagtgccaccaatacgacagtcaaagaaagaagacaaccaagaggatgcaaaagtgttgaactggaaagcagtggcaacagggtatggacctggagttttttttggattggcaatagcgcaaatcattgcttcatacaagccggagtggctaaccaagataattggtccgaataagcgcagaatctggtaggatgtttttggttttgagtttgaataagacatgtttgtcacatagtttgtattgaagcatttgcttgtattttacttatttatctataaagtaagaatggtgaaattctatgtactcatattcatatacatttttgtttcttccaacgaaaaacatagcagaggcagggaagaggtgaatgtggttttgggtttagtaataaaagattagattgatccactcaataacaattccagaaaatatactaatatatatatgctgtattattattgcagcatcttaaaatgtataaatctatattaacaattttggaatacatttatatataataataataaaaaacctttattgaagtaagatattacacaaatgcattgatttaaataacaaaatataaacctcatattaaaggtaaattgagattataacaaatggaaaatccttaaatacaatctcgatgtttatttaagattttacataattaaaggttcacactcttttttttttttttttattttttttttatttttaggttcactctccttgattgatccatactctctctggtttgggtcaaacatgcaaccgaaactcacaacggaagaattattgaatgatacgttcaaggtcttgaacatggtacgtcacagcgtgcaccaaattttattggaaactcaagaaaacctctgagatataggttcaaggttcagatccttaaatgggccaacgaagaattcccattaggttttctagccacatagtgattggaggattccgaggtggtgtctctataattaggagggttttcttcagacaaaatctctttgatgggtccataaactcgaggattcgccatcaaatacgagctgaagaaacatgccactgaaattctcggtccagctacattggccaaaaccctatgctccacgcttatgaacttgtcgtttgttataagctgcacccaatgaggtaataaaagtcagatttatattagtccattgattaaccactgatcaaaaaccaaaagggttagttagttagcctgaagaagatctccaacgttaacaacaagagctccagggacaggaggaacatcaacccaatattggtcatgaagaacttgaagccctccgatatggtcttgaagaagaatagtgagaaaagagttgtcggagtgtttcgttaagcctagagtaaggtcgggttggggacatggcgggtaataatggccgagcaacagcaaggagttagtgcaatccatgtccttgaggtgattagtgtttaaccctagagcttccgagagaagctcgaagagtaatttacccaatttcatcacttcctttgagtactcaatcatcatctccctgaaaaaatgtccaccaaaatctttaagacacactaatgaataatgggggcgtaaaaatcttcaacgaaatcctagcgcttataactatttgaataagttattattggatttatgtatttcaattgttataaaaatttgttaaaaaagaaaacgtattattggattaatattcgtctaacgagtagtgaaacactattcgaccatatataatttcttcggaccgaggaacacaacatgttacaaaagcaaaaatagtcaaactcgtaatttaacaaatttggaaatcttacccacaagtggcgggtaagtcctccggtctcgggggatctggtgctgtataacaaccaagtgtatctctccaattcgccgccggtgagctaaacagatcgaagttgctgctgtataccatcttactagctggatctcgagagtaaaaccctttcttcacttcagtgtcttgctcgtgaaactcacgaatcccatctatcatcttctccaacacatccatcgggatcccgtggttgatcacctggaaaaatccccatttctctgccgcgtctccgatcttctccaccaagctccgccgcgtgatcgagtccgtgccacctcctttgagatcgattgtggggatggagaaatcagaggaggaaggtggttttggacttgttaaagtagccggaggtgcacgaaatatcgaaggaatctctgtgattccggcgtcgataaggcctttcacgccggttttagtctcgtcgaaagctttgagtagagttgaacgatcaagtgcagcaacttgggaagtgatgactccattgcttttagctgaaaatgcaattgccgttggtttgaagttggatcttaatactacaagttgtcaaaagtttcacgagtcaacgacgaagatagatgagaagaagtacatgtcttagttaaattattcacgtttcccacgtggggaaaaaccgggacaagaaaaaataatgataacaaaaaataggaaaatggagatgcggggtatcgatccccgtacctctcgcatgctaagcgagcgctctaccatctgagctacatccccttttgacaactatttcagcttatggttttatatataataaaaaacgctataataagacaaaacttgtaaggatctttgaccaaaacacagactacagcattccgacaaaggtgtactcgttgttctctgttatctaaataaaataataaatactagatttgttcttctatgtacttccaaaaacctctttttatatgcaaccagaaatcaagaaaatactctaacagaacaaagaaaaagaaagggttttttttttctgctatgcttccacattcattctttgatggttggtccactatacatcaatgcagtaaccgttaaatcctctggcttctcttccctctccttcaaccatgcatagccttccttctcctcctcggcaaccacgactccatcgactgaacattccaaaaaaacaacacaaagatctcaaactactaaataggcaagcgtgagcatttggttttctacagttcgataccgatattttaggttttgggaaacaaatccaaactaataacaaaatataaataatatcaacattgattcatattttgaaagtatttcttccatatatacaaggtcattcagctggttggtgtggtttatttgttatcaaactctttttccctattcaggttnnnnnnnnnnnnnnnnnnnnnnnnatgttcaaccctactacagtactactagtagctagattctaacacaaatcatagaaaaagtttcgaaaactatacccgagaaactagagaacggataatcgaaatagtaagtacaatgacgtcctgcgggatcagagtatggaggaccaataacatcaagaaccgcgcaagccgttttcgcggtgaagcaatgcatattccctccatcagccgggtagagtatagaagtatcacaaggtgcggtaaagtccgaatctactttcactttcgccaaacgagtatctgaactcggctctacattgattcaaaaacaactacaacaacacatgttaaacaataacatagtcaaacactaagcaca

SEQ ID NO: 37725 - DNA, 2593 bp, Arabidopsis thaliana landsberg
agctgtaaagagattgtatatatcagtttaaatacgtgtaattaaaatttaacgccagttaacgactctgtaacggccgttgacggacgttaagtcacgtgtttgaatataccaacaatttaaacataaggtatttttagactaaatatatttaattgagatatttttattctaactaaaaagtattgggtattaaacatccaaattaaaattagttaaggtttttttttgggatttttcccatatttgattgggaaaattgtcagtgttaatgagctagccttttggtttagcatctttctattttgcagcagatgaaatatgtgtccaccaaatcgtttggctatttgtaaaatttcatggattattgtagcaaatattttttgaattaataaaaaaactataagaataaacatttcaatgttggaagctacataagtgaggatccgattcaattatccctgtctccgatttgattcggtaagaaaatcatatctgtaacaaaacactataatagtagtctcaaacgctccaacttctaattttcaaatgcttatgttcgaatcttctaattttgtttgtcatgagcattattctccatcttcttgatgaccagtttgttgttaggctggtcagcatggataagaatagtgccatcctctgcaaaatctcctttcaaaacgttgagggtgatctccagtttgttgttaggctgttccaacctcttcttcatttgtctcatctgcaccacctctataaggtaacaatacaattacaaagggacatgagacaatatccactcattgtcaatagcaatgggtacggagtatacttgaacaaactaatctatgtgaagaaatatgagaagagacttaagtagtatatgatggacatgggataatctactcattaccaattgcttttgagttggacgtctatgaaacttaacaatctatagattgaaaaataaagattgtgaaaactaaataggaaaaaacaagagtaagatacctgtaactccaagattttggatatttcgcttgaatttaaaggctgggaaactatgtattcatcaattctattcatgaactttggcctaaaagtttttcttgctaactccacaacttgttgcttcatcatttcataaactgcttctttgatatcttcattgttgcgaatagtctcaataagtatatgtagagatcttatatttagggccgacccaaactatttgactgcctaaagcaaaaacatttagcccactaacgaaaactgttaaaaacacacacacaaagttttagaaacctcgggaatcaaaaccgtgacttttactttaaaaatgtttgaacaaccactagaccactgcaacatttttaaaaagtgttatacttattgatgcctaaagcccttgcttcatgggctgtagccatgggccggccctgcctatattagacgtaattattacaaaacagtttgtgaaacttagtgtcctaccatgagaattagttattcttccatcgtctagtagttgtagcaagatactgaagacatcaaggtgcggtttctcgatctcatcaaactgaaccactgaataaggtctccttcgaacaacttcagttgatttcccaccgtcttcgtaactaacatagccaggtgatgcaccaacgagctgtgagactgacgttttttccatgtactaactcatatctatcctcactattgtgttttcattgttgaaaaggtatccagctagtgccttggcaagctcggtcttaccaacacttgttggtcccatgaacataaaactagctatagggcggttaggatactgaaataccagcctttgaacaagggatagcatcggcaactgactctacatccaagtcttgagcaattattctctcgtggagtatttgttccaacatgactagcttttctctctctgattgctgaagattggacagtggaatataggtcacttgcttactatatccgctatgttaagctgtttacttattctcgggctagagaatgttcatgctttctagaatttgtgtggttctttctagcttcttctaactggccttggagggatacaagggttccatacttaagttggaaatctggtcgaaggtggaaatctaacacgatggcggtcacttcttgtggaatcaaatgaggggaaaggatgacgaggtgaggtgcaccacagagtaatgataagactctgatacaatacaagttcgaagccttgatgactcgctcaacaagacataaaaacaaacactaactaaaggaatctacctaatttagatgataaacaataacaaaaccccttttatttttattattgtcacaactaatagataatttatacaatttaagtttctttttttaatattacaatttatttttattttatattcaatgagttatttttataaaagtttcttcccttctttttatacaataatccatcttttttctttttaaaataaatatattctctttttttttttattttttttatttatatttttttttatttttaactatcatattttattattatttacttactttctttaatttt

SEQ ID NO: 37726 - DNA, 699 bp, Arabidopsis thaliana landsberg
atccgtcttcggcaaagatgacggcaagacctcgtcttttctctttcattgcgttgagaggatgggcgggaattgcggacgtgaagctcctgttgatcctgcgagtcatatgctgctcaagataagcctgctggtagttgaacattcaactggaaactgcaaggctcattaatagtatgttgttgtggtaactctactcggataccgatattctagagctaatacgtcaacaaacccgcttatggaagggaccatttattgataaaggtgaccggctctgcccgtgctctgagattatgataactcacgatgatggcctctggctggcgacgcatattcaaatttctgccctatcaactttcatggtggatagggctaccatggggaaccgtgacgagaattaggtgattccgaaggagcctgaaacgctacccatcaagaagagcagcgccaattccaatctgaacgggaggtggacaataataacaatccgggctctttcagttggtattggaatgagtcattaaatcctacaggatccattgagggcagttggtgccgcagccgggtattcgctcatagcgatttaagtgtgcagtaaaagctgagtgaacctggatgggtcggcggccgctttggggcatggcggtgcccttcgcgggatcgctctggcttatggcggtctgctcgcctgtcttg

SEQ ID NO: 37727 - DNA, 2007 bp, Arabidopsis thaliana landsberg
atcttcatcttggtgacgcagttctaacatcaccaaaatcttccttttgactagataaaaacacatgatgatggagttgggcttattccttctctctacactactctttcatcaagatgtgttgttattgcaactctcatcatatccatacatgttgagagattgatcgcttattttctcctgaaaaacaaaagaaaagaggaaaaataaaaggtttagtaatgaagacatgtttcatataatcttgagtgaaaaagctttattttctgtcatgtatttactttgattgaagttgtagatgctagactatcaacttggctattattctggctgctttacgacgaaggacgcgtgatagacatgttttcttctgctaaattcatgagccttttcagctcaggcaacacaaccgttcccaagtcaggtctatctttccgtcttaactctgcgcattgtaaaccgatttttgctaatattaaagcctcttcaattggccaatcagtaacaagagggtcaagtatcttggcaaaatttccttcctcaattgctttctcaacttgatttgtcaaatccattggtgtctttgctgtaagtatttgcaagagcacaatcccaaatgagtatatgtctgatttggttccaagcataccagtttgctggtattctggatcaatgtaacacaatgttccagcagtggatgtcattctataatgcgttgcgatgtcatcaattgtgggagggacaagcctagccaacccaacatcagaaatcttgctgaccatgtgctggtcaagtaatatgttagctggtttcaagtcgccgtgcactagtggctctggctttagctggtgaaggaaattaaggctagtggcgatttcagctgcaatgcggaatcttagctgccaagaaagcactggagagtttcctcgtctaaggagacaatcgtctaagctaccattggacatgtattcgtagactaaacatccgtattccgcgcaggctccaaggagcagaaccatattaggatgtcttatacatgtcaagacttccagttcttgctggaactgtgatcttccttgtgttgcatccggtctcacaacttttagcgccactggtgtgtaatctagagtacccttgtaaactgttccataactgccttctccaatcttatgactatctgagaattttgttgttccttgttcaatctcctcaattgtgtatttcctatacattctattactatgaggtaaagcatgcattgctttattttcatgctctacttctcgtagagccgccgtttcgatttgctttcttttttgagcttcggtttcagccattctatgagcggcttctaatgcttccatggctgttctactctttgccttctcattctctgctattgccattgctgcttctgtggcaagtatagcgtctgctagtttatgtttcctttcttctttccatttgtgtagctcgatagtctgacaaacacatagattcatatcttaatatcataagaccggatgattatttcaagtatatatgtatatgtatgtatgtagttatacagtcttgttagctgcgattgcttctttgcatgcactattatacatgtccattgtatgcttaagttctagttgtagccttctcatctcagattctacatcatcctgtgagaatttatagagtaatcaagaaatattaattaaggcagacaaagtttgattagtaagttatttttattaatttacctggctattcattggcaatgatgagagtctcccactttcttggcagcttgtggagaatgcagaataagaagaacacaaatctatggcctgtttttcagatgagcttgagtatgtagcatagttggatcggttgtcctcgaaccaagccatgattggccaatctctactcacaaaggataagtctgagacaatctctgaggcctggtatgtcccttgatcatattcatttctcaaagatggagacccattaatatta

SEQ ID NO: 37728 - DNA, 922 bp, Arabidopsis thaliana landsberg
atctttgaggactccggacggtagacaatgtttcttccacgaggaccgaatttcaacataggtccgaggtaccaccaacatttgtcagccattttcttggctatcttcgcaagcaaatcatcaggaatatttgggtttggcatatttaggagtaaggtgtttcaacaaaatgaaattccaacacttaaataagcatcattgaagatatggttgggtaagttatggttgtatttattgcaaaggtattaagtgatgatgtgtattcgtattgtcacatcaacgtaatagtattccatatataatttgttattgttgttatgagcaacctctttttaataacagcttaaaactagacgtgtacgtcttagtgtacgttttaatgtacgtcctcatttacatttctacatttgcccaacaaacagtgtacgctgtagtgtaggttttagtgtacgtccacatttacatttctacatttgcccaacaaacagtgtacgctgtagtgtactataagtgtacgtccatatattaatatcaccatttatgagacaaaccataaaccttatctgtttgcatgtgtattttgtagtgtacgtgagagtctttatctcaggcaagcgtacgtccatatctagttttccgagataaaccaaaaaccttaactgtattatttggtagatgcacgtgtacgtagttgtggacgcttagattttaatatccacaatttacatttactacggaaactaaatatcatttgagtattttgcggaaaaactaatccggagaaacataacacaccttgcaaatttcttaagcaataatataatttcaacataaacataaacaacataggtgaagccctatcataatttgaaacatgacatagcgggtaacataaacaacacattaagtttaatgaaataac

SEQ ID NO: 37729 - DNA, 760 bp, Arabidopsis thaliana landsberg
accccaggagaaactattccatgtactccccagcacatgcatatcacagtaaaatagcataaccttaattttctgaaaggaagattctactctcgtaggtccacctatcttttctttgttagatatgatatcattaaaatctcctatcatacaccaagctgtttttcttgtcaaaccaattatccttaatctttccaaaagggaatgtctgagatgctgcttaggattttcataaacacaagaaacaaaccatctcatattgtcctgtgaaatcttcatatccagtagattcttatcttcaaacagaaaatttatctccaagtgttgtttccaaaagattgctaacccaccactctttccaatcggttcaatagtatgaaaataatcatagcctagccatctgaaaactttcataataaacggatcagaattcatggtctccatgaggaacaagatgtcagggaaatattcctttttcatttctctcaagtgccgaattgtccaagggtacctcagtccttggcaattccaactaaggatgccttattgatactgcggtggttcttgaggaaccactgtaatgagagactttactgtactatcagatctttccgagtctgcaattttcttattccttttgatagcagaagcaaactcaatattaagactaacctctttctcttttataccagcgaaagaatcttgcctcttgtgaactaaaggagcttttctttttcttggattcttctgcttaatactt

SEQ ID NO: 37730 - DNA, 2979 bp, Arabidopsis thaliana landsberg
cacactactattgaagataaaaagctggatctttttcaggccaagcactaacttggggatgatgataccatgacgagcacgacgggttgggagaggagaatcagggagtgtggtgggaaaacagagcagagaaggaggagaagaatggtacgatgtgattttgtatcttgggattatagacattttccaagactacggtgtgagaaaacgccttgaacattgttacaagtcaattcaacacagctctaaaacaatctcagccgtccatcccaagatgtattcttctcgtttccaagactttgtctctcagatcttcttaccagacgaagatccttctcactgatacataacttccatgtcttaacatttctacttatatccactatttatttagtttagcgaaagtttatttgtttgtgaagcaaaagcaacctccaattttctctttcttttcttaactctttggccttggtcgtccaaggctcaaatttcctttatcaacttatttacatataaacattgcaaattttagataaaccggagttaattccaaccaaccagactgaaattagaaattccatacgaacaggagcgaatccagtaaaccaatttgaatatctcacccgaaccaagttttgatttatccaaccggatattctaatttcttccaaaaagttttaagcaagcgaataagtgggggacatgtggaagcgtcgcagagatttggggactcgtggaggaggaatgaatcatcatcttttgttctcactgatccttgttacttgttttccgaacaactcggctgattacggattttgcaacttcaaaacgctcattcccgatatcgctccggatgagtattaccaaacgtatcatcagattgacaaacgcaggttacttaattatacttgtgatttcgattcttgttttcttttgttggttgtcaggagtagagtcatttttctaagtcttttttatggttacttgttgtagctcccaagctggcagagggaatgaccggaggaacgtttccaaattagaatcaaatcacaaaacaaaaaataaaaaaaaaacttattttgtcggcaatgtttttttgatatttcatcttatgacaactatgtattcggaaatcttgcaaaactggatgatttagatgtgaaaatattcagcgcttaatgaattaaatccggttaaccagaccaagcagaattaaaatggaaaccaataaatcagaacaaaacagaacatatcttttggttttcatatcaaaccaaattgaattataagattttgccttggattttggtttggtttcttatgcaacttcccaaaagaactgatctgtccaaacttatgatatggcaaaataacattttattagttatagcaaacccaacttattacattacgatcatcaccattcaccatcataacgatgtgtggtcttatatataggttttgtcgatcagaagaaatctttaaaagtaggaagtttgatttctcccttactagagatagggatagtaaattcccctacaacaggaaggtcgatggttagaccgatttggagctcgtagtcaatgtcccagtccacaccaacgtctcgagccaggttaaacagtatactatacggcaccaccacgggaatatcaagagccgtcatgtccttagctttcagagaacccgggtccggtatcttcccctttccaatctccctgtttacaaataattagatctctgttgtttacaaaatctaacaaagaaccaaacgacggagttagtaggttttacctgccggcgctgtggaaagtgaaactgatctcacagatcggaatcgaatgactgtaaggattggtgacagagactttggccaagtactcaactgagtcacggttcacgtctttgaggtcaacgtccgtaactgaaccctccggtttagggatcgcggtgagtttatccgccacgaagtccttggctttatctagcaagctcgccataataactcttcttgtttaaatctctttgtttttgtttcggtgttttaggtttgtgtgtatgatatgaagtttaacttggaatatatatataaacggatgggattacgatgttcttatgaagtcggtcgatgtaaatgggttaaattttataatggtttgtgtacgtgtgagggttttccacgagtgagagtgaaagcgtgggttatacgtgtcttgtgcttgatttttgatttttttcgttacatgacaacaattatatttcttcaaaaaatatatcataatgaaaatagatattttgtttgcagttatagctaaactagataattaaatactttttgagatagtcacacgataaatttaataccaaaaaaatggaaagtattatacaaaactaaaagagggaaaagtattcgcgtaaggaataagatgcgcaagggattaatggaccgaccatgtccccccatatgcacgtcggtggaatgtagtagtactcccatgcattgcggtacactatatggacaatgcacttatgacccgtattggtatgggtttctgatggatattaaggtcaaacttaaatgggccacaggccataagcccattcaaatttgtaactggactatgatcactgtgaagtcgtgaatcttcttctcttaaaaacaaaactttgacatgatcactgtgaagtcgtgcactgtaggcatgtgacgtgttgatggatgattagtggaaagggattggaagaagcgtgtccaattagtcgacagctgcggaatggaaaaactgagtcagcatttatgttaagaagtcaaacctacgcctcgcatggtttgttagttaatttgacttattgaccagtcaaagcatgctttgacattttagtgatacacaaattttataatataaatccgcaaacactagattatattcacacttctctttaattagtgtttggttccacgattttcaacggccgagg

SEQ ID NO: 37731 - DNA, 1517 bp, Arabidopsis thaliana landsberg
aatgattattttattgtaaaataaaatttggatcttagcttttattacgtaaaaataaaaatataagtaatgcatacaagtaccaataatcatatgtttcttccctttgtctctttctgttgaatattcgacccaccactttacatacaaaagattccgataaaatgttcaacacatattaaaaatataaagtttgatgtccatatgaaatttaaatcaaagtaaatttagtgttatgaagaaaatattattaaacttgatgactttattcgattaagtcgagttcatgtacatattaaacaaataaagccagaagtcaagtgtcaaagcattacttatatatctaattaatagacggtctggtcgttatcattctttttggttgctagaaaagatcatgatatggagtttttttgttatgtttatgttaatgtaatttaatttaaaacacagcggcccacatttcaaatcatgttatcaaatcgtttaggttcatgtttttcaattcgcttccatatataacaaagattttaagccattatcataaagcaatataataccaccaaaaacatattggccacttttgctctcatcaaagtggccactcgaatttgttggaaaagaccactgtagtatttcttaatattgtttcgaaacgaaaagagctttttatattcatattccaattttaaaactagagcatattgtgaatctgcagaaattctgaactgtattctgtttttaatattttggcacgcatatttaaagaccaaagttttatatatagaggatatttctgaagaaaaaggtaaaaaaagactagtcaataactcggctaggtttaaactttgcaatatttcaaaatcattttccacaatcacatttggttagtggccactttgcgaaatgtcgcaaaaatttacatttctacgaagtttcatgaccgataaaaacatgcagtattgcaaatcatttttttcccgtttcgtcattacccaaatttccaatcatttgcaatgtaaagtaaataataagatttttatacacttcaagctctttcttctagacaggtgaagcgtgaaatgtgtaaagcattaacaataattagagaaattaaatcttaaaaaattttcaaagtgtacaacgctaaaaaatcggggcatcttttcaattaggtggcatgtaattgtcgtggagagcgtgaagttgaaatcggtgaaggcccatcattggcaaatcaatcggcattaaaaaccaatgatgatattttattttctaaacaagtcaaaatggttttatttgggtgatcaatcttgcattttttgttgacgattggctctttcgtaagtgagcaacctttagaagacccacccactaattagtatgattattattaaggatttgttttgttttgtttttgtttgttgtttttttcttactaatggacaaacgtgaaagccctaggccccatgcacaagcttagtaaaaggcccgtggtatgtaggttatctttattt

SEQ ID NO: 37732 - DNA, 1379 bp, Arabidopsis thaliana landsberg
  unsure (1)..(1379): unsure at all n locations
tagatatcctctgaaaaaatatcaatatgaatgttttcttgctgggctgattctaagattctaaccaagaaaggtctcaacacaccaaaaaaggacaacactcctttgttgcaatgcacacatcacatgtgccctgttagagtccactggcacgttaaaactaactacaaagactattggcgagtgaagatagcaatcacaaatttcaattaccggatgaatcatacactctggactttagcaattcagcatccaaatctcaacnnnnnnnnnnnnnnnnnnnnnnnnnnnnnnnnnnnnnnnnnnnnnnacggatccataagtaaataaatacctccctcaaccacaactattcaacttcaaaccaaccattgaatgactaataacattcttaaatctttttgatacagatgatactggaatgttctatggaacgaagttttacaatgatttattaatggaagctggaccttcagggaatgtgcaatcagaggttttgctacagaaagatcaaaagacttttactttcaagcaaggttgggcttttcctagaaaagtttactttaatggtgatgaatgtatgttacctccaccagattcatacccttttctaccaaactctgcacaagggaactttgcttcgttctcactcaccattcttcttctcctattcatctcaatatggtgatttgatctgatccttctgggttttaaaacactgaaccagaactgttttttgtaaactcattgcaaagattgtaaaagaaaaaaaggagttttgtgagaggaaatgattagagatgtgcaaggcttttttaccttgatcactgccattgatcaatgactctgtacttcttggctttttgctttggtactaatgtgaaagtgaagcatattgatttgattgagaaagtggcaaaacaacgaaatgtttttaattgggctcaaataaacgcattttgaatccagcccaataaaagcctggtttaacattcacgcgtttcaatagattcgcgtgtgtattattttcgttggtctgaaaaggcaaaaggtcaaaaacggcgttttgtttgggagacactttttgttcgaagatattttctcattctctgatctctctgtccgaaacggctccgttaattttaaagtaaatattccaaaataagtttatgtcaaggctagtctttttgaaaataagatcagaattttacctatatatatatatttatttatcaaaaaaagtagacactacttaaaagattagtattatcaacgagtaatacaaaatggtttgcaagttaatctaattaaaaacaaaaaactaagattgctaaaaaacaaaatttgtgaacaagttgaactaaaatctagaagccagt

SEQ ID NO: 37733 - DNA, 1187 bp, Arabidopsis thaliana landsberg
ccaccgacgtcgtggtcgtaatcgccgacaagatttttcagatgggttatcttcaagattcgtgaaaaagcttcctcaattcaaattctgcgaacctagcacatacacacggtacgagagcgattgtgtggtttgttttgatggattcagacaaggacaatggtgtcggaatcttcctggttgtggacacgtgtttcatcggaagtgtgtggacacttggttgctcaaagcctcgacgtgtcctatttgcagagctagggttagattgtgggaggaagatccacaagaaggaaaattatggagatgttttggtcatagaagaagtagtttgctagatttgtaagtgctatgtttcttgtttttgttttgtttcaatcatatttggattagaagttataatcatttaataatgttttaagctcattcaacatagttatagtttctaactcgttcttgatgactagttcgttggaggagactaattgcttccttattggtttatagaatgattagaacccttaagctctcgaaaaatatataaatagatagatatgtagtcgttttcagttttaacacggtgctacagagtttcttgaccgattcaacacgaattgttgaacatgttaccgagctcttgttttctctctttaacatctctatttgtgtcgctgtcaggaagtaattgtttagacttttcatcgatgtgttatacttcggtttcttgttcttgaatttgtctaagtcttggtttctttcgtttgatttttgattgaataggtaatattgtgtggttatgtagacgtggactcagtctaatggatgataagaatctccaaaactgaagctacgaagaggtacaatacaagccaaagactctttcctccatagagaagtagcgggtcgatcttatggtaatatataagcactaagcagatgggcgtttgatcatataaaccctcactaccattaccaaaaagcaatagccaagagctttttttttcattttccttttgaaagccatggatcggttttcgttcttgaatgttataatggaggttgcgggtattctaaatgaatcccgcaaactcttcctcaagaacaaaaagttgatgttctcagtcttggtattccctctcttactcaattgtttagtttacttgttcaacgccattgccatcaaacccgag

SEQ ID NO: 37734 - DNA, 256 bp, Arabidopsis thaliana landsberg
  unsure (1)..(256): unsure at all n locations
cccgacgacccccacccccgggcgacaaaaccacggacccggacgaagaaggcccggacccgggcgacgacaccaaccccggggcgacaaaaccacggacccggacgacgaagccacgaccaggacgacgangccgcggacccgaaagacacggcccgacgaaagccacnccaggccgacaaacaaacggacccgggaaacggaacncgacgagnccaagcccagaacgacgacaccacggacccgagggagaaaa

SEQ ID NO: 37735 - DNA, 1853 bp, Arabidopsis thaliana landsberg
tgtaggaacagttattcctttcttcgtgtgatcatcatacatttgaacaacctcaacagatgtcttgttcatctgctcaatattcaggtgtgcatcaaacccatccgaaaagccctctcctttagtatattcacatagctcatgcattgcaatgatgtgaagtctaatctgtaacaggaaaatcaatagtaagaacacacgcatttaaaaaagaatattgtttatcatcctgtttaatgagatttatataagatcagaaaacacaaaccatttgctccagcaaagtaatagcttcttggttgaaaatatgttgcattcttagatccatacgtatagctctcatcctatcccataagaaattgtacatgccaagaaagttttcattgtaaggtcggtctagcaaactcagcaaatattccattgtattttgcaggattggcattggtcgtatcaaaattgcttctcgctccgccgtcctagtatactatccaaaggcagatatataagtagtcatcatggcaaatgagtggtctagtatatttcatctaagaaagaatctgaagcttaaatgatattaaaaaggtgagcttactttcttcacagcaagggatttgcttgtctggttcctatctccatccacacgctcataatggtccaagtcacccttcctctcacgctccccccgttctgactctgggaaaatgaagaaaaaagtccatcattatatttgttctgcgatcagattactataactagaactagccatcatttatggacaaaataaatatcgttggcaacacaattctttttttatcagattatatgaaccaaagactatttacactcagttgtcaatttaatgcatgtctcaggcatatgcttaccaggacacatgtcagggcatactccaatgataagagagggctgctccgagttttcataatcaggcaaggcatctcccttcagggcatccctacttgattcaagcgaattgaatgtttgtttgttgtccagaggcttcatagttttatttacaggtgatttagtaagttgaatatcaacaggtcggtctgcaataggctccagttcacccttgaagcgggccagtctctttgccctggcttgctcttctctataagaaatccacaccgtttagaaaactttaagaactggtccacagattaatgcaaagagtcaatactgcgtgattaaatattgtacccttctgtacaatcttgagaagggaaagagtttcgcgggatatcctcttcaattggatatacaggtggagatctcgtcctttttgttgcaggtgaactgtttgtcttacgcgcattattgaaactatttacagaggagggctgtccaggaaattgagaatctgaacttcttgaaagtgtatatgactttgtgcctgacgtaggtggagatgtcgaaaacctatcacagaaacagcatgcttaactaggaggaagctcaaaggcacatcaaaccagatagagaaaagtagatttgttgcaatagcattaagataaagctgcaggagaagtaagcatgacttcaaaggctagtagcagaaaaatttccaagcaaccatctaagtttaaggtgaatacgctcataagccgatttgctaaagataaagtttcttaagccgatttgctaacgataaagtttcttaggattgtaactctattctataatcgtgatttctcctgccattcatacgtacacgtatggcacagagtgggtgaataaaacataataagctttagaatgtacgatgagattcatgctgtctacctttgagagtcatgttgagacaatatggggtcatctccaaggggtttatc

SEQ ID NO: 37736 - DNA, 3334 bp, Arabidopsis thaliana landsberg
tcctccttccagccaataagtttttgaaaaaattcacaaagaacttatcactttctacagatggcgctggcataacttcgaggaacaatatcagtgcaggataagaaacctgtggggatccatagcacccgttcctcagaaactgccataaatgatttagaacagatttatgaacatttaagtagacccaactctgaggaaattttttagagaacagcaagacagcctcccacattgatgagtggcaggttggattattttctcgaaaaacaccaagcagagctggtgcaagacttcggacgtcgccttcgccaaagacttcaggaacatttttaatgaagctgcttaacaaagaataagtcgctgaccgaatactagggctttcagattttagaaagttcagaaagcatttatgggaagagaacatcttctcagctgaggaggttgctactgccctagcctttgaggcaagttttgattcagaattaatgtttgcagagccagtattatcgggttcgcggagcaaaatatctagaagtgtagccaaccccaccagagatgacgatatcatctgaaaacaatggaaataagacatggtaaacgaaaacccaaagaaggaaaaacttcaccatagcaagaagaatcaccgagatgaagtacctgctggtacatttcttctaattcatctgaagcaagtgatttatcagataaattttgaggtgtaagtttgagattttcctccagataagcaaaaatctcagctgaacataaattcaaggcgtgcaatctcttttcctgggcagggaatgctgcctgtttaaacaatagacagctaattgaaattctgaatattgatgctataacaaagtgccccctgagcagaactaaaaggttactggtctaataaaacgacaatagagtttataatagaaagcggggcattcaaacataaagtaaaataacctccaccaagaaaactgaattaccaaacgaggagccaacctggaaagacgactttgctgcttgagaaacttcagatgccaaatcaaattgcgaaaaccaccagggccccattatagactttagatgaggagctatatctctcctgagtaacacaaagaaacaaagaattaatacagaatcagataatagtgggagaaaacatagaatagaagtatggcatacatgctaagacaatatcatcaagacatagttcctacatgacacgctcaatatagacaagcttctacagcacttagcaaacgaatcattccaacaaaatattgatgataattttgatattgatgttaggataacctcaaagctaaatcatatcactcatgacacaagaaaactacatatatccaggtgaatgatactaaaagaagaagaagtaaatgaggcactgcatcacggcaagaaaaagggcatgcattagaaaattgagagtcaaacccggcaccagtgacaacattagtcatgacgtcatgagtagctcgccgaacatctcgactgtagtccagtatcagcctcatgtactcccatgtctggacaagtaagaaaatgaaaaatatagtcaaccatatgtggaaaatgagcaaccaaatgcactgaaaacgtaggaaatatagtgatcaacattctgcaagacaaagattaattaaaggtaattctatcagtgagagtcatattcccaatgctgattagcctatcttcaacatctaatctaatacaacttctgaagctacagtttttcttctgtctaaacatctaattagaggtaattctatcagtgagagtcatattcccaatgctgattagcctatcttcaacatctaatctaatacagcttctgaagctacagtttttcttctgtctaaacattacccattgtgggattattggcaaaagttccttcccttgcttctgcttaaccagttctgatagggaagcaagagctttaatctgtaaaagggttgaaacaaacaaatcacaatcaagaacagctcttgtagtcgattggataatcagagaagccattacctttgttgtaggatccttccttgaaagcctttgcaagtgttgggcaacctcactatccaaatcctacaatccattaaaaaagatgagagattggcaaacacacaagtaagcagacgggagaaacataccaagaaggaagcagagtcttcgtttgacagagaagtttggaatctagagctaccgacatagcccccaaaacctacggcggctgcagagccagacggcaacagagaagctgccaagctgttcagaagaagctcaattcagtaccgaaccaacgaagcatagactcaaaaaacaaaagataaagtcggaagaaattaaacgttaagaagagattaaaggaacaaatatgacctgctgctagatgaacgtgttttgcttcttgcagcatctcctttgggtttgcccatctccttctctactctagacagaaaagcttcagatgggtctgatcggtctagcaaaggagtaaacaggtggaagtcaagagtcggagcgggaaggcggtggcgattcagtcgtcgccgtcgtagaaagaggtaaagagaatttgtcggatattacccaccaataatgggccattagtattggatttgcttaatttaggcccaattatttatggcccaactaagaggaaggtcgcgtttataaatattcacaaaagttcctctatattttagtttgttccttatcagacccagattttcaaatatcaataatttgagtggatgagggtgtgaattattccgtagtcactaattctgtttcttatttaaatatgaaatcatgtcaaaatataacatcaattcgattatgtacattttgaatttagtagtatatatcatcatttgtactattcatgatgaaagtttcacaaagtgagaaattcccaaatataaaaggtttacagagtctctatataccaaaagaactctataatctaatctgttgagcctactacactatcctataaaaggtttacaaatttcataaatatcttttatgatccgaaaaaacaaaattactcattataccaacgctagaaaagaaaatgtcaattctacataccaactctaaaaaaaacccatattaaaggttcacaaacaatatagaattattttcttgaagaactgtcgtatagttatcatctttctttcttttttggtatcaactataattattatctttcatcaacaacaacaacaaaaactctatatagagaggttcacgaaaagaaaaagttattcctaaaaagcggacatagcaaaattacaagatttaacaaaaa

SEQ ID NO: 37737 - DNA, 3722 bp, Arabidopsis thaliana landsberg
aagatattcaccacatttgctcaatgaaaatggagaagagctatagtggtttctccaaaaaacctattacaactttctttgacgacaagttaggttatctctacttgaataaacaagaagatatggaaaaacctagttcttaaacttcttccaagaacatcgtcattaagagatcattttctgatctaaaacaatcaatcgatctgaatgaaaaacaaatgcatgagtttcagatttgttatcctaaaagagatgctgaattcttctccagcaagcaaaaatacaaatacagtaagaagagagggagcttgtgacgaggaggaattaagaagtgaagatcttgtttttatttgatgatttgaaatcactagaatccactaatacaataattaaataaataaatacatacataccgaagcacaattatttgattgcactcaaatgaatcattgtcttcaagactccttcatccatttttctttaacgttccattctaaactcgactctttgaatgttgatgtatttgttttaagtaattcattttgattattccatcattaattaccactttttctaataacttggaaattgatgttgatgtgctttgtcttccagttttgaactaattaattttgaggaaatagttcaagtattgtcaaataaaacagatgtattatgctcttttttgtttaaactcgagaccattaagtggattttaaccacctaataaatctaattatatcataaaattcaacaattaagtggcatttggtaacccaaaatagaattctactttatgatctcatttcttcatttaatatacaaatttaaactctattctaattaattattgtgagatggagttctgtaactgatgattagcacaaacctaaaccatatctctgatacatctacatcgcctaaaccggaattctttgtcacaacaaacatattataaagttcataaatctcaaatcaaaacttagactaattccaagattcatataaaacaagttttcatgctacttaacacatttataatggcaaagggaaagagaatgcaaataaaaatttacatttaatctgatctgtgacctatatctacttaacgaatcatcaaccaccaaaacacaatattttcccaaggatatttaataattctatcatcattatttcagttattatcaaatgtgagtggcctgatcattttctgtattttttctttccttattcaatatgtaattttatatgtcaatgtcatatgtcggccgacccattcagcaaaaatagacaataatatatctaataatttttgttgttttgctttctacacattcaatacaaagaaaattccacaagtcacaagcacaacaccttaggaactatacggcgctagttacacgagcgagaggcctatatgtcccacatgtacgtgtgtttgtcgtgtctattcatacgcattacgtctgatatactaagttataaccgaaagtattccacaatgccgacctcctagtgaatgtttttcttttcttggtttggtatggtttcagttaataatctaattcatgttttcatcgttttattattattattaattaggttttgtatcggttataatcatattttgtcgatctaatatatttgtatgtcttcattaagttttagatcaattttttttattaggttcattcgaattcaagttttttcggatatagacatagtgaaaccatttgaacaatattaaagcatagctcagttcatatcggtttatccaaattgaacacccttaagcaaaactttgtaattaaggttcattgtatttgtggatctgccgtctactcttttgcctttttgttttgttgtgtgtcatgttatttttttcacaaaaagtacgataacaagattgattttacaaaatgtcttttatacgtgcagaaagatacaacacatgcaaacagtgaaaaccaatcattttcatgagtcatcaaatatgagaaaatatcattttcagaagcaaacagtcgattccccattacttaattaaaatcacttactagccttggttaaaatgtgattttataaaagatcccatagcctacctaattgaccaaattgcgggattaatttaattgaagagtggtgacagtgattgcttattagtaatataccacgtataacgaattaacgatacatatggcgttatataaacacaagcctcacgtttgagaaagaacaaaacacatttgtttgtgtagccatcacaaaatctctccctccctacataaacacaagcctcacgcctgagaaagaacaaaacacatttgtttgttttgccatcacaaaatttatctctctctttctctctttcgccagttataatcagagtcatgataagagttacggtgtcgcggtcaaacacagttgcgtcttactgtctggtggcactgctgatcctaacacttgcgggatcggttaaaaacagcaacggaggaggtagcggagaatattatcgaggaagaaactgtgaggtttggagagggaagcaaatgatggagaggccatgtgaggagctatacgtagtaggtgaaggagacacgcttcacagcatcagcgaaaaatgcggcgacccgtttatcgtggagcgtaacccgcatatccatgacccggatgatgtcttccctggtctcctcatcaaacttcacattaacctccctgaataagtcataacaagttcaagacatgtcgttttatgtacattatggttacatagttatctccctttctttttctttattttcttgtttggattttgaatgaatttaacttttaacatttctttgttttggtacaaacaaagatccgatacattgccattggacaactactctcttggatttgttcttgttagaaactttatattgtcatttgtgtaaaaagcggataaagccaaagagactaagaacagagtaccgaaatttaaaaacagagtcggacaaggcaattgaaaacagagccaaacatgacaactaaaaaccaaccgtcgtctcagcatggaatctattgtgcagccaagctggaccacccatatatagctaggtaagagtgaaaatgacgtttttggcaagtaaattggatttgcttggcacccttacaatccgaggctactaccacttcgatctataagatgaagatttcttaaactttagacaaaccaaagaatatttcgagctatacaataatttgattttccgatgacctcgtgaaggcatggctgtgccaagctattcgggggatgagaccggtccgtcccgtctcaatatatagtggggtctctaggaaaaaaaaaaaaactaaaaccccttgataaatttttttttttttgtaaacattgggccttatcattaagaaagtttttgaaattaatattgggcccatgacatatttgaaattaatattggacccagtaagattatctctatgactctatgcatatttgaaaaataaagagtgtacaagaattctctacaatatttaatcttttctttcttcttctgaaaagattattttactatttttatacattgtggaatgtttgagtattcttttcataataatgatatagtcaaactttgtaacatcattgatatcatggatttaactccacacgcgaaatttacgtacgaatgtacctttgggctattaattcatgcatttatatg

SEQ ID NO: 37738 - DNA, 3160 bp, Arabidopsis thaliana landsberg
  unsure (1)..(3160): unsure at all n locations
tctagaaaaatcatgtaaattattcgaatctggtggccaatgctaatagttaacctttgactttatatttataaatttgtatctagatctagatgactaataaagacttaaaagttaaagctcatatccaaatctaaatcaaaaccatctaacaaatcaattcttttgatattgatttgatcaatatcagaaaaaaaaatgttatacgttatttttttctatattgaattattgacaataaattggttcagaaagttataaaaaaaaaaagaagacaaagtaccataaatattttccatctaccgaaattttttaaaagtaatgtacttgtcttgtcttcttctaaggttgaagagcttaacataaacacaaatcatacaaaccaataaagtacaacacgttgaacagtttttaaacgttaatgggaagggaaaaggcacctttttcttaaccctaaacacaggaaaaggtgactaacaaacccttccttaattgattcctaaggtacacattacacatttgcctcgagagagttctcagagacagctactacagttacctagctcatgaactacagcttccacggatggtctttcaatgggagattcatgagtgcatagccacgcgattctagctagctttgtggcttcatattcaaagaatcttccttgaagatttggatctatgtaatcattgaacctacaagcttcagttccaagcttaacaagatgcctaaccttctgtttcccggagattatctgaaacacaagaatcccgaaagcgtagacatcggttttctcggtgaattttccggttgtgacgtattccggagctaaatatcccattgctgcacttgttttgagtgctgagaagaccatatcgtctgctagaaggttgtgaagacccgaatcagcgattaacgggttaaattgttcatcaagtaggattttttcgacagagatgtttcgatgaactattgtaggcttcttctgttgatcacttccatgtaagtaagcaatacctgcaagaaatttgtgtattaaatacattttgttccttgaactcaaagaagtgatatttcaaatacttaaccttttgcaatccctttgatgatggagattcttgcagaccaagcaaggaccagattagtttcgcgttcttgtaagtcaagaaaatttgaaagctttccttttgaagcaaaatcatagatgaggaaacactctcctctgcctcaagaacagcagaatccacgtagcttcactaagttttcgtgtgacaacgaagataaaagctttaaaccgttcatgaattcgacttcttcgttcttgcaactgcttatgttgatgcttctgatagctaccggagaaccatctctgaggactcctttgaacactgaggtgaagctgtttctgctcaatagattagcttctgagaagcattgggttgctgattcaatgtcttctaagttaaacctgaagctactatttacaacaaagagatgaggctcttgtgaaaactcagctccgtttctgctatcacctagcggatcccattctttagtgtaggcaagactcactaaaggcgatgcacggaactctttttgttgatctgtgcttagtcttccctcggaaaactcaggtgtgttactgatcttttgcttccttcttctgtagcgaaagaaggtcaatataccagcaccaatcaatgttatagtgacggtaatcacgcttgaaatcaaagcaacttgtgggagtttcgatgaggatttcttgcaatgtgtttggttgcaatgcttttggagatatacagactcgggaatgttgtgaagagctgatttatcagtgtctatttcaccaggaggctgcttaaattgttcgatattattcgcattatcgaaagcagaacaagctctcaaagaaggaaaatcgataccacataacccggtgttgttctcaaactggaagctcccattcaacttcttaagacctttgaagaaacataacgaagaaaaaaccgagtcaagaaacagaaagataagctctacaaagacgtttcaagaatcattaactcgccaggaggaacaaagccagacagagtattgttgcgcaagtcaagagtgtccaactgaggaatgttggctagggtttttgggattaannnnnnnnnnnnnnnnnnnnnnnnnnnnnnnnnnnnnaacatactcaagtttcctaaagtccaaggaacctctccggttagtttgttgtgttgcagagacaacacattaagtttcttcaaggatccaatgttctttggtatcttccctgttaaactgttgcaacaaagatccataactgcaacaaaagacaccacaaaacattcaaatggaagatcgagtaaacattcaagtgaaagatctgtgaaacattataagatgctaaccttgcaagccagccatggagccgatatctgccggaatctcaccagagaagttattaacattgagataaagatctgataattcagtaagatttgtgatctcttgaggtatctctccagagagactattgtaatgtaagtaaagacctgacaaacatttgagctctgcaaccgccggagacaattttccgaccaaacgtttcccttgtaatgatatgtttgcgacttttagatgctggttacatgcaattccttcgaaagatccgtcgcatggatcgccgttaaacgtccatgaacggagaagcttgttttcagggtcaagcgacgatttcagctccattaaagccttcagctctgcatttcctcgaacattcgacggagttgcaagaaagattgagagaaggatcagtaacgtggcacataaggtaaccattcttgaattttcttgtctctctgtttagaaattactgagctttagctcatttatctatctctcttatagagcagaataatctgttttatagagcagagtaataaaggaacgaaatttatagagcagagtactctgttttgtactggattgggagctatctctttgttaaacgaagatagtaacttttagagagggaccaattttgtgtctgtttctcggatttggaaaactgtaaccctccactctcgtgaatgaaaagttattcaaaaaattttcttgttttggagagaagaagagaaagaagcagaa

SEQ ID NO: 37739 - DNA, 2551 bp, Arabidopsis thaliana landsberg
  unsure (1)..(2551): unsure at all n locations
gcggtatgagtccacgagctgcttgcgcgtccgctcaacttctgagcgcgtagaggcctcggcctctccatgcgggcctgcagagcgttgaaccgtgccttccattcctcggcgcgctggctggcgagactcccctccgcccgcgccaatttggcctccgcctgcgccgcctgcgccttagtgatggcctggttggcctccctcctttcctccaccagctggcgccggaggtccgtcctctcgccctccagggcggccaccttctccgccagcttgcggcttttgctctccgcagccgacttctcccgcacggcgtccgcgtgctacgcccgaagtctctcgacttcggcagccatgtctgcagtaagggcacccgacgccacgcggtcggcgaagttggccgcctaacagacacacatgagaccacaatcaccatgaaagcggcaacaccgaagtccagctcaacttacttgactcagctgctgcgcactgctgcgacgcctccctcagccggcgggacacagtgcccgcttcgtccttgacggcagtgagtgccgaaatctcaccgccagcgctgagagcgctacccttcgccccaggcactgcggcagacaccgtggtcgccaccgcaggcggaacaacaagttacccctcgcccgatcctgcaacgtatcaatagtcaaaaaaaactcaggccaacgaatcaccaacgagataatcctccacatcaatctcggtgccgaagtcggcaacgcgtttgccgggcggcggtacgnatcgggccgccttcgcagcctccgccactccgctggcggacggcaccaccttcgacagcttggggcctccggcgcccaccgtcgcctccggcgccttgccaggcgcggaggcgcngcctttcgccggcaatggcggcttgcctccgccggaggccgcagccttcggagccccccgctgcctcttcggcctagcttcatgcagcctgacagtcgcctggcgtttttgcgccgcaccttggcgatccttgtccatcactgcccacacaacagcaccgatatttcgcccataaggaaaaactttccaccgatgaaccatacgagatgtaaaacagtcctcctcatccgcgcgggggataggaacgtccttggaccatcgacccccggtaaccctcatcatccgagccgaagactcccggagctcgagcgaagacatcctctcccccgggggccgcacacgtcctcattaactctctagcgaaactatcagacaccccaagtccccccatcgcagtacctaattttctcttttttgaggaggtggtggccgccagcgcagggtcgcctccagtctccaccgccggtttcttcccacggcggtccgcttcgtcttgaccagggtagccgtcgtacggcaattgatttaattcgaagaccctgttcaagcgctcatttgacccgcggatatcaaacgtgcgctggccttcagtcctcggcacgtaacgtcccacgagccgcaccgctaggtcctccgcatcacgcacaaaggcggccgggtcacgatttcgcaagttcagtgcgaaggcaggacttcgcaccacccttccaccgtgaaaaggcatctggcgagggcacacttcgcccaacgcccagccgtgcggcaagggccagaccccgtatgccacgaactcttcaactaaatcacgcccactgctctgaccggcggcgcatcggagggccccttcgtctgcatcctcttctgccacttcaaaaggcagatacacagaataataatgagagcacatctcagacacggggagtccttcatggccttcgacagtagcctcggcaacgtaaaaccaaaattcattccaattgccccacttgttgcgggcgcacggaaccaactccactactggcattgtggacttgccggtcttcggcgtgaatgtgcatgacccgaactgggcaactccgtcctcaaccatcctcttctgccaatgcaaacaataattcttcgcaaaaacttcaactgacggctgtccgccgtacgaagtcgtcgcccagacatacttcgccagcgccaccatggcgttcggtgtcagctgatgtatttgaacgttgaatctgcgcaggacttcgctgacaaaccggtgcgcaggcaggcggagtccggcgacgaagaacgcctcgaaaacaaccaactcgccctccggctcggggacctcctccgtccccggagcacgagcgactccgccgccaaagtagcccaaccgctgcatatcttcaatacggcctgacgtcatccgtgacacaccgaattcaacagagtcgccggcgcgcaactcttccaccatcgcgttactcaacgtctcctcagacgaggcggcggtcggcggcgtggcggttgctgaagaagaagaggatggcatggctacgtaccgacggcggcggcgggcggtttgcttcactccagccagaacgacggcgagcaaagggagcagcggaggaaaacgagcaccaagacggcgggcggctacggttttacngagcgcgga

SEQ ID NO: 37740 - DNA, 2083 bp, Arabidopsis thaliana landsberg
  unsure (1)..(2083): unsure at all n locations
acacatcacatatccatgtcagagctttccatcaattcgaggaagcgaaatcatgaccaacataaggtaaagacaaacctagacttcggagcagttaactagacaaaaaaaaacctccacaaaccaatctatagtcatagtctaaaaacaaacacacaactttctccgattaaaaagggacgagctattctgttaggcgcgaagatttggaattagggtttggtgagtcggcttcattctcgatcatctcagaatcagccaagatttcatcgacgagtatagttaaagaagctggcgggttttgtggggtttgcgtcacgggatcagcgccaatgtcaaggagcgataaggaagtagaaacctcattaagattttgtgtcatggtcgaaggcgttgttcccatctttgcacgatcttctacagcttcttcatcaaactccgtactcatgatatgcgtgaagtcaaagagtttcgccgctgtctcatcatcatacaacatagcggcgactttcgccaatgcatagagattcgaccacatcttgtcctcgttgtatgtagtcattgtgatcggacctaaactcgagttctgaaagcgtgggtaagaaggcaatatcagagagataaaaaaaaagtgaatgagaatgagaaagagaagagcctttgtttatatacctttttgttctgatacacaatcaggtgtctacaccctaaaacctagccaaatatttactcttcttttcctttattcctttttcctttttccttttagttaccttagtacaaaagtttaactattgtaattagacactaatttataaatgtaccaaaagtccaaagcaaacaacaaaaattgcaaatagaaaattgaaaataatcttatgcattttctaataaatcatacgggagaggaaattaataattaattagattggagagtcagtcctcggtatgtatctgtttcgtgaaacgtgcaccgttacgcataggatcctgcattttccttttacaagtagtaaagtacggtttaaatcggtttagtcattacacgttaatcaaaacatactgtataatataaaagggtttcgcggagtccaaccgatttttatatatttaatagatggatattcttcgttttcatcttcgtcttctctgaatcaatctctaacgcttcgtctgggataggtcccccgccaaaaattccatttttcagatcatagatttgcgtctgatctatataacaagcagaaaaaaaaaaactaatttattattctagcttttatacctgattcgatcaatttcaaaagttttttaagataaatttcgtgtacatgaagaaggtgcttcaaagaggttttaagcctgcaaaatggtaataaattcaattctggggtttttcttttttcctatcttctgtatgtcttgaagttatgtcaaaatctccagattctatttatgttcgaacctttttttttgggtnnnnnnnnnnnnnnnnnnnnnnnnnnnnnnnnnnnntttcttgaggttttattgaatttatataatgcagcaaaacagctttgcaaatggcgaattcacgcctgaagatactcaagaacaagaaggagattcagattaaacagctgaggagagaattagctcaattgctcgaatctggacaaacccctactgctaggattcgggtaaccaatactctgtttctgtgacagatttttttttttttgcaaattttgggaatgtggaatcttagtttcagagaatctgagtttcacttgtttttttttgctaaaattgggaatgtggttatgtttttatctcaggtggaacatgttgttagggaagagaagacagtggcggcttatgagctcattggaatatactgtgaacttcttgttgttcgtttaggtgttattgaatcacagaagtaagaaagatttgccctttatacaatgttgacactccttattgctgttgttcttgttgttatgttctaatgtataatggattgaatgctgtgatgttattgcagaaattgccccaaaaatctgaaagaagctgtcacaagtgtcttgtttgcttcccagag

SEQ ID NO: 37741 - DNA, 2514 bp, Arabidopsis thaliana landsberg
agtggtatacaaagtaatgtattgatttgaagaagatgtgggtgacgaaaatgaattagagcttatctaacgcaatgaagtgacaaaagaagaagtggtcctttggggaccccattcgaagaagaaccattgattgccttctttgacaaggtccttaattcttcctctttcatgaagtcttcgttcctaaattcaaatcatttttttggatcactaggttttcggttagaccgatcatataataatttgttcaaatactgaatagtaaaatttgagtcggttacatatttatttctttatacctatctaggtaaaacgtgattccttggttaactataaaagaaacagataatatatctgacacaatcggaattcagaaccataacccaataaaaacgcaattaatgataccatactaaaccaaaccgacatatcctcagtttcaactttcaataatatttgtagagagtgagcaaggctaacactcataaaatgctatgttgtatcctatataatgcaacatgcactgatgcacatgatgataatgtaccataacatgaaaccatggtagagccaaccaaactcgaactgacattacaagacaaagctgcgtaagataattcagacaaatttagctgactcaatcaaattattcagtaaaagaaatgaggccaaaaacagacatctcaaatttatagaacaaaaaagggagaaagatattcacaaacggaagcaaagctgttcctggatttacatgcttcgttgcagacaaatcaaactcaaataagtcatataacattcattaaaggaactctcagatttccagcacacacttaagctcatctcttcccaatactgacatgatcttacccttgagatcaggattggtctgatgaagtttggcctagagagacagatgccagcgatgaagcccaagcttgtgcgttctttgccctttcatggaagtttcttgttttgacgagacttagtttcaaccataacctcctcacatcgaccatgtgaataccacggttgaacagttggcttatctctccaaatcttcccaagttcagattgggaacgtaagaagcccataacgctctcatgcgcgattcagctatggggaagacaaggattgccatttgtaaacagataaacagcagagatagtaccaagaacggatcttgtttgaatatttctctaatagatgtcccgttgcccaaccatgtgatcaagttaccatcgccggcatctaagcctattggttccccttcagccacatactggacaggttggagacctggaaagccagaagaacagccaggtatatctaaatcgatccatccaaaatgtgctagtcataggttggacataaaacaagagactactcaggtagactgaaagaaattataagcagacaatgtggtttggtgtatcacctgttgcctcttcataaaactcaatcagggatataagatcctttcgaccatggtaccgagcatttaaagtttgatttaccatcaggattgaaggtaagctatggataccatacctagaaaagacactgcaacaaagcaattaatgaaaccagttagtaagacaaaagaaacagccagacacatgaagaaacctaaaagcacttgggagaggaacctactagtaacttagtatacacaaggcagataaggtaatgctgaactaactagttaatgatagatcaaatgaatatttgctaatgaaatgtaagataacgtaacagcaaacacacatgaccttctactaaaatgaaaagaagaaccaccttatatggatcaagttattcattaattgatatgcaatttaagtttttttttactctcaaactaaactatcagtacccaaattcttgatgtgaattccttgctaatatactaagtagtatggaataataatagactacgtagtcttagacaaacaatactaagtagacttcttacgatggcagtgcttgagaatgctccacagttaggtgctgtatttgaggaaacatggaactcaacatatcaaacttagggcgcacagtacgtgagaatgggcaccaggaagcataaaagagtacagacatataagcatttccatgttgtgaagccattagcctgtctagtgagtctccatctacctgcatagtgcaaatgttagacactgctttagttaagaataaagcttcagatccccttagaagaaacaaagaacacctattcaaaatttgctatatcatatttgcggacagagcagctactacacaatctgcattacaagagcattaaactatgaacctaaacagagtttcaagtcacagtagtaggtaagatgataatccaaacttgaagaacaagaggacgaatctgagcttcaacttcaatgcttaatagttatcaaaatccatcaatgtttcctaattcaatatttgcattggaagaagaggctaattcgcatagataataagtacataaccttacgcttattttaacaaac

SEQ ID NO: 37742 - DNA, 7116 bp, Arabidopsis thaliana landsberg
aagaggatgtgtcgtcacaagcttgtcgggcattacagggaacccccacatcgcaacaaacaaggcactgttctgtaatatgctccaggattttcctcctaacggtctccacgattgcaggaagtgctgccattcaagggtaaggaaatagataaattgtttaacatcaaacaagtagcagcgtggaaatgacttgtaaatcagttgctattgagatttggaatctaattctaacttcattaactttgaagagcaattcatcatcggtaaagtcagcatgtgcaagcatgagggaaagtatgcatgatctttaaatcttggttcaagaaaagaaattcacctgcaaatggccctttggagagatcaattagatctctcaaagcaaaaaattcagagctctcaagaaggtatctgcgagaactgagtcctttgtagagtgtcttttggaatgggcagcgtacatatggaagcataatggttattcttttccggatgctcataatatggttgagtgcagggacttttgaggacaaaaaagggttgaccgcactgacacaaagcataggctgccaaacaagatttgtcagacatcaaccaaatcaaggcgaagtaaagttattgcaaggaaagtgttctatctcagcactcagtatccaaaaacgacaataaattacaccaaatatcactagacccaaatttacctgctcgtgtatggagtctagatatgattttgccaattgagaaactggataacgattaaaatcccaatgatgtaacactgttgctggcagtactgccatgtcatttgtatggcaggaagaacaaaacaaatgaccagtatattcgcaaagccgaggcttaccccatccaagagctttcacaaagtctcgcacaagagtggctccatcatcaaagtatctgtggcatccagcgcaaatgtaatgctgagcctctagcaactgctttactgttttgtgaggtcgaatatcaacaatgaacgagatggtatttccatacgaagaactggttgtagcagcatcgatggcagcagagcctgttggagatactatagaatccaaccccgaagaattagcatatgcatcttgaggggataaaaacctaagtaacgcatttggaagtgtgggaaaaaaacgggactggagaactgaatttaaacaatcttgaatcaggacagtcctttcagcaacagcattgggcgatgttccaaatattttcctggattctctttctacagaggtccaaggtgtaggaagcgtccagccttgatcagcaaataaagatgtcaaacgacggtagagactataaaaatcacgatatcttctttcaatttcccacttgtctttcccactccaaacccttatgacatacactgtgtattccttcaccccaaccaatctttcactcagcgaaacatcaccttttttttgctttacaccgacaacttcaaccctatcaatcctaaatcgctgggaaactgttggagatgaatcatctagaccagacgttgtagcagtttgccccccatccctgttaggcagagagagctgtagttggaacatcttgtcattcttagaaaaccttaccccagatgattcaccagagtcgagcagtatttcttccatatcatgaacaaaatcatcatagaagtcattcagcatattcgttgccttctgcaagatgagtaatccagggccattgtacttcattcaaaaataaaagaatcaaaacgagatatagtagaatccactaagtttacagattgcaggaaccgtttttcttaatgaacaattgacttataatggtgatagtaacacaacagtagtagaacagttaaaccctcagatttccactgtttagatgtgagaggagcatcataaattgaaatgcactgttttcccagagaagcatggaaatctaacagacttggacataacccaaggacaatacaagcagagttgacaggcagaaaaaaataacgttaataatgtttcatatattaagtagctgaccttaggttgtgtgtaagtgacttttgaggcatttgttacaggatgagaatctctagatgatggcatatcagagttctgagatgccaacaacggttctgaggtgcattccccaaatggatttgactgttttccatcctcagatgattcatgaagtagtccagaagaaacatcgtcatcaaggtcgcaaaccccacctgaagaatcttcaatacctaactcagttggtgtaatatctaggacatcatcagcgctacaagattgaaggtaattcatgactacaggtctatcttcagtttgactgttgccaagacaactgccccgaagaggctcatctgttaccagtgattgacgaaccaccaaggttttaacttcagcgctcaggtcaccaaaatctctagatctaatatcttcaacatttgcactgaagtcacctacatctggagcatgtctagtgctcacagttacattttcatgttcttcccctttttctgcttgaactacatctggaagcttttgtaaagctacagagaataaatctgtggatgtcccttcactttcagtacaccctttatcacgcttctcaaacccgctgaagtcaaattgagtgtcaacaagttcagtggcttcaagctcaaactcatcccaatcatttgtaccaaaggcagtggaagaattgatgagaaatggattatcgttctcatctttagcctccttttgaaactgtaaattccgtgaaacataattacgagaatgatcacctgaatcactaagcgagtcatcaccatcagaatgttcatcatcatctatggaacttccatcttctctatctataccactatctttttcaattgtagctccaccatccatcaaatcaccacacatatcgatgttcacattcccggtgtttaacccgggcgcactactacttctaccattacaagagccgccctcatcgaagaaatggatacctcgatcacctaatcgtgacatatccaaagaagagagcttaactagacttggtcccaagctaaaattctcaaattcggaatcctgaaacggtccagtagagctacacatactcggcgttcccaaagccgaattcgcactacaataccgctcaaactctgattcaccacaagacgagtaatgtaacgacgaacctggcgaatcaactctcgatgattcctcctctccattgatcatttgaaaccaaaaccaaaaccgaatcaaccggaaataaaacagtaaattatacaaaaccgatcgatggataacgaacggagacggattctcacaccaattgatgaagatccaagcacgccaaaatccccaatcgggttttgaaaattgaaattgatcgagccaagtacttgagaaagaagaagcaacttggagaacaactgagatttaggtgcacgataagagctggacgatgcgtagattagcttcgtctatatgcttggagcttcttcgtctccttcgaattgaattttctcggagccaaacaagaccaggcttaggaatcatgtaagcaggattgacacaagacagtttctgaaaatttcaactatttctttaatcaattttagaggaaatatgtaaatatattacttttaatagatgataatgtaaattacaatttacttatcaagccctcatacttcatatcaataccttctaaaccccattatttattaaatatcacaaagtagtccttacgtcgaatagagagtaaatacagagagcatgatgaccattttttcttactttgaagcaaaaatggcctctaaatctttgtaaagtcccttaggtctggatttgtaatctgcagatgattccttagaagagcttccacttgtctttgttccccaaatactactgctccaaccgcttttgctacacgaaggatcactaggaaccttactattgctcctatctcttgtgaagctagactttgccatttctctaatctgtttcaaccatggcttgtccaagctacccgagcttcggcttccggaagaatttctatacctgaattctggggttgtgcctccattgctgctgcttcgtgcttctagttgagccacggggatcttgttcttgatcattttctgaggtaggattaacgcggcaagtccaatgataaacatcttaagaccactcaagaaagatctgttgatttggtctaaccgctttgtttgtttgtacaatgagtaccattcgttgcacatcagcataatgaatccaatcaagaacaatacgaccatgaatatcccgagtttctttccgcttgcctcgggaaagtctttcgccaagagcattagacatgaggcgaatacgccgacttgacatgctatagagatgatctctacaagctgtacctttttcttgatgaatggcttcttcagaagaaggaaaaacagctgaaaggaagtgatgctcaacaagaccactatcggagttttcgcagtttcattgtcaaggaaagcaccagcaataatccccaaacacaccctcttcacagtttcgagaaatgtgtagtaaattctaaggattccaaagagtttctgtatgcaaggagcttcagcatcttcgttttcatcatctgatgcgatgatccgatcatcttgttgcttgagtggattgcttcctgaaatctgtgtgagcatgtactttggtggaccccttaaatcttcgaaaactggacctaacctagttagatagacagagttctctgttttccatgtccattggcctcttttaccaggaccaagggtcactcggatgagttcttggtaccagtggaaagtttggccttcttgatgaatctctttatactgtaacaacttcccaaacgttatcccgaccgagaggaagagaaacaatgccagaagcagaatagctaccacgcaaagcacaaggataccaacaatgacactggcttctgcagctccttggtgtttaaaatagcctgacaaagagagaatttagcgtatgtgttcaaatttaaagatattctcaaggctggtaataagaataccttgtataaggctccttgcagctttgcagattgacggtaaggcgagaatgagaagaaacagctcgaatcttgggaagacaaacgcaccaaaactcctcttcttctcactgtgtgctttcttgaacttcagtatcagagagaggactatatgcagtagtaccaaacttcctccaattatagctatccaaaacatgatcctattgaaatctctccacctacaggaaagcgaaaaactcgaatatttatggcttcttcttaattagattaaaagtaagcaacaaatgctgcaataaaatcttcacaaaattttctatagaaagaagtatagacttggattatagtgacttacactgttgaatgtggtaggccaagaacgtgttctgcttctggcttaagatttgaagtctgtaaacactcatacagtattaaaacatgatcaaaagaatacaaaatacagggaagaaaaaaacgtttcttttgacctcaaagaataatctgtactccattgcggtgagtggcaatccgaatactgactccgcgttggttgatgtcttaagattaatcatgttgttatgagttttagaaatgaaggagtgtggaccaatgtaaggacttgtggccaccatgatctgttccttgatcttagtttcccatgggagtggaaaataagggattatccactgaatccctctcacaagttcatagtaatcaacaggcaatgtcaccggtagccatctcgtgagtgcaaaaaactgaatgtgacaggcagttctctgcattagaaccacaaagcacacaataccatttgattaattatgtaacttgcaggaaaaacaaaggcaatatatatgtagctttataaaggagtaaaaactcatacaaaaaggttcctcgtggggtctgatatcagataaggagatggtcttgggaatgcgccaagagaataaaggcttgtggttgaaagagtgaggagtcccgcaacgaaagacgtcaccaagaaaatgtaagttgttacccaagaaatcacagaagatatcataggcacagaatctgcaattaagtacaagatatgaaaaacattagaagaagcagagaaacagaattacagtacttgataacacatataatttggttgaaacacttacaatgtttcacttttaggatattggatgcaagatttttgtttcccgcgacatcctgagtaacattttcaggaatcttaatagaaagtgtactggtgttggcttttacatatacaatgtatatgcttccactcagttcctcaaagctggcaatttgtggaaaacaaaagaagcaaaaagtcttatgtaaatcacttagcatcaaaatcaagaagttagaagacacacaagaccactaacctatcaagatatccacctgagattgatacaaatgaggagttaaacccaaacactggcttcatgaatttgatccagacagggatggtgtgctttcttgtcctcataccagatgttgtgttcaatataacatgaggtctctcggtatctaagatcatgcggatacatgtttcattcaaagagagaaccaaaacaagaatctagaaacaaaaatgtgtaacttactcaccataaagaaaagtgagtggtgcagttggagatgcaggtgtcccatgtctgcttctaattgaattcgagtcaagggtcaccgtgactattgcacgccgtgatgtatttgtgacctgagaacaaaagagtttgaatattacattcaaagattaacatgaaacgaaatataacgatagcacaaaacatccttaataacagcagcagaagcacaaaccataaacgcgaaacggcgattcccgttggtatttccgtcgataggaagcaaatcaccttggtttgtgtttagtcgtctgagaatttcagccgaagaattcagtaccggttcagagaaatacaagtaaacattcaacttgttgttatcattggttgcctgcaccgtcctagtttggttgtttagtttaagtaacttctctggtacatgagttcgtagattgactaa

SEQ ID NO: 37743 - DNA, 8382 bp, Arabidopsis thaliana landsberg
gttatctattttaaaccaaatctctctcacatttatctatttcactgtaacaattaagaaaatacacacagacacggacattattaaaatgatgtaaaaatgtgtttaggtgtgtgtgactatatatagggtatgatgtagggaacacaaaacacaccaaaatcttaaaaataaattataaaccaaaaacaatgaatctcgccacaaagtttcatgtgatggtacttttgctcattgtaattggagatgtttgtgccaatgtaggcgcaaggccgctagaagaagtttccaaagaacttatggataagaagaccgcttcggttcctaagacactgttaccgttcgcaccaatatcattaccaacattaccgccagcgcagttaccaggtttacccactccgccaaagatgtctaatggtgacactggaggagttgatgagaacgcagatggtagactacccaaagatgcttcagcgggttcccatggtgccacagccagaggatatcgttccggaggtggcaggagtgatgtgtctggcagcactgacccttggccttgagcgtgaggtgatgatgttcaattgttcattgctcaaattgtcaagagggaccaatacaaacctatatattaatatattactctacaaacgcacagtctcttttatgttcataaataaaactagagattgtcccctttaataataatcgtgaaatgctactttttatgtgtaatgtctcttgctatataaaataatcatttacgacggctttatcttagattcttattgaataatatatgtatgagtaatcatggtgaccgatcgataaccaaataatatacaaccctgtttcaactatccaatgttctaagattagtgttcgttataaggaagtgaagtgatgaagtgtgtgcttgtatagtgatacacatctgtaaactaagattacatttttgtttaatatattaggatttcataacataccatcatttatattggacatggcgatgtagattgactctatatctgaaagacaatagattagcaatcacgttttacataaacatatagattacaatagttaattaattcttaaacgcagcgttctggtgagttaactcacataacggatgttataagcattccaataactacataggtatcaaaatctacatttcatattaattcaaatatcttattctatctactaccaaaaatcatttgtgcaggtgtgtcaagtcatctgagtaagataatatttagcaattaaaggttaaattgtgatttttggcatactgtgagattgagagaaaaggttgagtgattaaccgcaatacaacgtatttatacgaatgagagaagatatcccaaaaccctacactaactggccggagaagtacaatattgcccaacccaatatatacggcctaatgctccctctcaagatattgcgtgtatgtccgatcccgaacgcccactttcccaataggtaacaaaactgatcacgtcccaaagctttaatcaaaagatcccctagttgttttgttgttcttaaattacgtgatgtgttgaaatgaatatcccagctttttatcatatttcctacatagtgaaagtcaaacttcaatgtgtttagtacgtttgtgaaacaccggattgtttgatagatgaatacccgcttgactgccacagtatataaaggtatcggcttatgttgcacaactccgagacttcgtaataaagcgataacccatgtgagttcgcattgaataatccatggccctatactcagctatgcggacgaacaagatataccgttttttggttctttgtcttcaaagatacaagcgacccaccaagtataatcatcaaaccggtcaatgatttctgagtcaccgtgcatgaagcataatcggaaacacaataagccgataaggaaagatcactcgtagaactaaacaaaacccattgtctaggtgaacctttgatatatcgcctaaacaacctgtgatgaaaaatcttctttcttacttgcttaattacttgggaagaatcctattaccagacaacaaaaccctgttgtttctgagcgagagtcatcatgttgttcacaagaatattaattattcaaaattcaagagattgatcgttagcaatactttcgaaacctttttaacaaaaatcaactctctcttctgtgtcctctgtttttgtctcctctcatcgagtaataaggcagcttcattggtaatggcttctctaagatgtcaataaaatctggaggaatcacatgtgaaatgtataaaatgtgaaatgtatttttgatgtgaatagaagaaacagagataacgaaacattaccatttcatgacaactatattcaggaagaaatactttaaaaaatcccaagtctttacgtgcatacgaagatgaagaagaaaccttagcttgttaccagtttcaaccatttttctctttggtagtgaatgattaaatttaaaccaaaggttaaagactaaagaatcaagtagattttagaaacagtggatcttatgagaaattactagaaagtctgacaatgtttaaacaagaactttttgagagcaaggaaaattaattgttgaaccgaatactgaaacatattcacattcacatcaaccctgttgttcatgagagtcaccatattcacatgttcgtgaagtttctcttccacaagaatattaagtgttataaacatttttttaccattactgaagaagattatactataagatcatatttattttattttaaaaaagccattacatgagaaagagtagcatttcataataatatatagaggtgacaatctctggttttatttatgaacaagatagagattgtgagtttgtagtttttaagatatcattaatatataggtttgaggaatacgcatgcatgagaatatgagatcacctcacgctcaatccttttttcctttgcggtccttcttcttcttctcagaggaacccttcacccttgatgcggaagctaccttaccctttgcacgtgcagcagcagctttgcgagtcactgcagctgcagcatcgccttcagcggcagaagcacttgtagaagaaactcttgccttgcgacccttggcagtgacttgtccgctggtaaatgtgttggcactttcgaatgcattggcccctggacctttcggattgttaaaaccactagcatagctaacgacattgctatcgctgaaagttgtgccagttgcagaaagctgagctccaatgcctttggtagtagtttttggaagagaggtgccaaatttggtctccgtggacacatcttcgacctgccttgcggtgacaatggcacacaaaacgccaatcacgagaagcacaagaaactttgtggcattcatcttttgattttgtggattagattgtgtttgtggtgagttgtgttgtgttcttcttcccaaatcatagacctctatatatacacaaactcgatacacttgtatttattatgatacatgaacatttcttacaagaaatatacataagcttaaattacgactaaaaagtcataccaacatgatactattttaacacctcttgccaagatcaaacacaattttatctaactagctaatattatgaatagattgtgatatccaattaatactatactataactgtgatctcttattcgaaaacctcttaatacaaatgaattgaattcatttttccaacttctgactctcaatccagaagttaagaacatatcaattttgttacaatccaccaactacaagaaaggttctaacaacgatcattgaaatcctcaatcagagtcatccactttgattccaactaaagcttcctaagtgaaaatatgaatctgaaaatataaatcataacttccgcacaatagaatccaaacagacaagcaattatggaaatgacaaggaaaagtattgaacctgacacgactctcttagcagttcaacaatattaaaaaggtctcaagcttcttccgtttccactatgatagctatattccagattttacgaccatcgattagacgacaataatatcagatagctttcaagtgtctcagtgatatccaatcaagtaaagaccaatattaccaatatgacataaacgaacatttcacaaatcagatgagtcatatgatccaggaacttatgacagagacgaagcaaatcacttgcaaaagaatctctctgtagcaagattttgaagtatcataagagaatttggctcaaatcccaaaactaagaattgttgtgaaattaaagcttcccaagaccaaatatcaaacattaataaagaaacgaaaaaggcttacatgaccaatccaagagctaaggagctgcattgcatcattctactccatatctgcagttccaaaaaccatgatccaatacatgatacagaaatcagacaaaacatgatccaaactcaagacgtatagagacagtcaagaaaccttgtgtgcaatgcagctcctgaacaaggtcagtaaaaattcaagagtcaagacgaacaaggtcagcaaaaagtgagaagaaaaattatttagaaaactaaagtcagcaaacatatagtttggattcacatgtctactaattggctgcattgccgtttctaagctaccaatcttggtaatatatcataaaagattcaacattacattaaaagttacatttccaagttggatagcttttgaagtctaaaatcaaggtttcagaaattcaaaaataaaagcaaaatccttgacaagacttctgatctatgaaacacgatctccggtgaaaatagccatcaactcaggtactatctccttgtcatcatggttcttcacatacctgtttaagaattcttcattagtacataccaaaacagaagacattccagggagttcacttccaagcgatcctttggacatgagggctttaattacattacaccttgggatagtcctcttctccaggctgtatccaagtaccgcaggggttgaaaccactgcctttagtggccaattcatcttcttcaccagaaactcagtctttttcttcaccgtctctgcagataaaataaggcattgaggaaagcgcttggctatcattgcaaactcatctctgctaaatcctaggcctagaaatgtttcaatggagttcaatatcttctgctctaaagcattaataaattgtggaaacttcttcaacactgagaggacatcgtcttcgagtagtccacacttcttcagggtttcccaagtttgaactatcttgttctcagagaaattcagaaaggaaggacacttcttaaacattgcccatacatctccaacagaaaagcctaaacttttacagacattaacttttgcttctatagttttgtcgcggaatctgtaaacaaccctaagagctttgacaaactttgaggtggttggatcaaaacccatctcaacaactttcttgagtgattcttcaaaattttcttttccacagacaggttggtgatcagatataagcaatgggaacaacaacctttgaggaacacccaattctctcaaaaccaaaacatttctgattttgttctcctgcttactaccctctggcaaagaatgacataacttttcgaacttggaactcttatccgcttctataatctctttaacaaaatcatagtatatgctgatagttttgtcccctctcttccccaagatttcaggaactgtagatacaatatgagtgagctcagaccttgaagctcctctggactgcagaaactgaagcttgggaccaagtgatttctcagcatctgctacaagcaattgtggataatccgtaacgatgtttgagatctgagaatcagtgaacccatgacttctcaaaagattcagagcagagtcagggttgtccttgtcctcgaagctaaccttccttgagaccgattcagcgagctttttgggtaaacccaatgaatcaacgaggtaagagactgtaaagctcttaccttttcgaccaactctaggactcaaacgcgcagcagaagcagaggagaaggaattggacaaaggagacgccttttgcactaaaactctcaaatgacgccatttctgtaactcgaccaaacttcttccatggcgaatcagagaatacatggcgagacaaggctcggaaacaagctatctcaaaattcaaaacttacagtgccgccaaagatcgatgggtggtcgactattcaagagttcgcttctctcttcactcacaaaatccaaaatcaataagaagctaaattgggaattgggaggaggctataaaaaaaagagggtttaggaagttaaacccttattttgctaatgattcttcattgtagaatttagtcatattggagatgcagtttttcaggcgagagaagtttgttttactttcaactaattggatagctgtagagttagatgcatcatatggacattacaaagacataacatgtgccttccattcttggggtaaacagtgagcttgtgacagatacgaagcaaatcacttggaaaagaacctgaacgtagcaaggttttgaagtatcataaattgattttggctcgaattcaaaatctttttttaaggaatttagtgaaattaaaagctctcaagaccagagatcaaacactaataaagaaacgaaaagagcttacatgattaatccaagagctaaggagctgcattggatcacagggttttctaaaaatgaaaagtttggtaaaaaagagcagagatccagaaacagaaccttgactgtctcttctatgtctttagtttaaacttcaagagtttagacgagcaaggtcaccaaaaattgcagaagattaaaatcagcaaatacatagtttggattcacaagtctgtgattttgctacattgctgtttctaggatgcaaaccttagtaatatatcagaaaatagattcaaaattacaagccggattgcttttgaagtccaaaaacaaaagcaaaatccttctgatctatgatgatacacgacctctggtgtaaatagtcatcaactcaaggaccagctccttgttatcaaggttcctcacatacctttttaagaacaactcatcggtacataccaaaacagacgacattggagggagttcacttcctgtgtctcccagaagtccttttgacatgagagcttcaataacattacaccttgggacagtcctcttctccaggttgtatccaagtaccgtagggtttgaaaccacatccttcagtggccaattcatcttcttcaccacaaactcaatcttcttcttcaccgtctctgcagataaaataagacactgaggaaagcgcttaaccattgttatgaactcatctctgctgaagcctaggcctagaaatatttcaatggagttcaatatcttctgctctgaagtaccaatgcactgcggatactttttcaacactgagatgacctcgtctttgagtagtccacacttcttcagggtttcaattgtctgacctatcttcttctccgaactattcaaaaagtaaggacacttcttgaacattgcccatacatcttccacagcaaagccgaaccctttatacacattaactctttcttctactgttttgtcggtgaatctgaaacagctctaagagcttggacaaactttgaggtggttgtgttcaaatcccatctcaacaaccttcttgagtgattcttcaaaattttcttttccacaaacaggttgggcatcagagatgagcaaggagaatagcaacctctgaggcacacccaagtctctaagaaccgaaacatttctgattttattcccctgcctattagcctctggcaaaggttgacataaagtttcgtacttggaactcttatctgcttctataatctctttgacgaaatcatagtatctgcctagagactttccctctttcattcccaatattttaggaacagtagaaacaatctgagtgagctcagggtttgaagctcctctagactccaaaaactgaagcttgatatcaagtgatttctcagcatctattagaagcaatcttggataatccgtaatgatgctggagatctgagaatttgtgaacccataacttctaaaaagactcagaactaaatcaggattgcccttgttcacgaaactgactttctttgagatggattcagcgagctttttagataaacccaatgaaccaacgaggtaagagactgtaaagttcttcacttttcgagcatctcttgagctcaaatcagtagcactagcagaagaataggaattagaaaaagctgatccattttgcacaacaaatctca

SEQ ID NO: 37744 - DNA, 5964 bp, Arabidopsis thaliana landsberg
tttaaaaatgttctttttaataccactttttaaaaatatctctttctaaaaccttataaaaaagtcctaaaaaatctaaatgatatcctaatatatccaaatatacgcgtaaccttataaacgcaaacacaacctatctttagacgtgtataaacatcttgtaaaaccttataaatcttataatcctataaaagtttaaaccttctaaatttaatgagagacgttttttttaaatggaaaactaaaggtacacacgaaaatagacattcataaaacatcaatatctttatatataaattatatataataaatcttatggaaaaaaataattctaaaatcttagtggaaatgataaattatatgaaaaaataatttctaagattttttatagtactatatatttttttatatttaaacttcttatgtatttaattggttaaatattgagatattagtgtatatattaaatgtcatagtaatgaaattttgtagagaataaacatctaagtattttatatgccacatgccgtaaaaagagagtgttaaatgtcatataatcttatggaaaaaatctaattctaaaatcttagtgtaaatgataaattatatgaaaaaaaaattctaagattttttatagtactatatatatttttgtatttaaaattcttatgtatttaattggttaaatattgagatattagtgcatatattaaatgtcatactaatgaagttttatagagaataaacattgaagtattgtatatgtcacatgtcgtaaaaaaaagtgtcaaatgtcatgataatagaactccttagaaaaaaccttgtcttattatataagatttaagtagtgtttgtttgataatgaatgcttgtcatatgtagtatttaagtagtgcttgtcatgtgttcatataacgtcaagacatacatcttgaatctcatttgtttactcaagaccaaaatgtacaactggatttttttccctgttttcctctgtttctactaaacattacaactggattaacaaaactcaagtcataatgaattagtcatatataatataacactcgcgcatacctttaaagatccccaaaagttctaaggaatatactcaatggatctatctttctttagccattcgaatttactctagttttccgagtggggactcaagagcatgatcatcgactagccatagactaaagtcttgaaaacgtttcatcttcttgtcgtaaccgataatgtagttattgtggactatgacatgtttcccccttgtctcgttaacccatgtctcattcctgaagtacaatccttctgatgggaaagctgattgcggaagcaagtagacttttacctgctcaatagaagatcacaatccaacattcataagtatattagaagattctatgcgtcgatattgaaagaaacaaaaactaacttgatgggctgttttgttaagtgccaagttaaaagcaggctgatcatttgctttaaaacggatggactcagaccaagcttgggactgaagttcttcgctccatttcttcattagaagctttgcaccattcgtaggtcgcaagaaaatcatgcagctacatacataagtaactccgtttttacttagaggtggtaaatcatgggagggaggaaaggcttaatctggcagcacaaaaatcaaaccaagaataaaattacataaacactagaattaagatgcaaaagatgcaaatatgttacgtaccgcaatcatgtcatccatgaagtatgcatcgtagcttccttgtaaatagtcaaatggatcttgtagccagaccatatcaacatcattgtacataacattgtaacctagctccaaaatgtttaagagatgttgtggcctccgagatgtcagattgaagaaaccctagtcggatatgatgagtaaattagtgaaaacataagttttcttcacacacagaaacagggaatacataaccattcaaattcgatcaagatccggaagaaaaatggctgctactaatacatccacaagttgaccatctttttttataggatcaactgtactatatattgggaataatgtcccacatcggaacttgggcaaatatcttaaatggtataaaatatctatggacaaattcatttattgtcaattgggtttgagttggaacctcataatgtaacactaaacacatctagagtaatatatgcaagtcacatgagccaatctactcattgcgagtatataagccatttccagctagatcttgtgatctgaaagctaaagatatctcataggagaaaactttacctgagaaccgaaactgtatgcggttttagaatcgagtgccggaggaataagaacggagtggccaggccacttttcgctgactctatacagagtaatgtaatcctcagcgatcacaaggactttttcttgatgcttctgtcatgaaacactaatcaaccagttgttgagaaaaggcgagaatggtgagctcacggcgcagacgatcacagtgccgttcgtggcgacaaacttagcggcctgagcaagggtatagttacgccattcagatttggcatgcggagacaaagaagaagcataagaaggagaagagactttgttcggaaatagcaataaaggagatcctggccaaggtaagaatacagcgaggagaaggaagagagcgagaaggacaaggaggagaccgttgcggctaaggagaaagatgggacggtttgagattgaagaataagaacgaggagaggaagagaatggtcgttgttggtgaagggtctgttgtttctgcgccattgttgtagcagcagagcaacaagatttgcagagagactttcacaagcttgaatcggatttaagatagagaaatatatattagaaaagtcaaagtttcttcgtagcactttaagtagcacacacgaaattaattaaacttgtataatacctagctatcgtgaacttcttcattactttacacttatgataatgaatcttaaataaaacagaagttgccagtcctaatcaacttattaagatcacaacttgcacaattctttgacaaaaaaaaaagaacaacttgcacaatgaagccaattttgacgccaagtatattaaggtcaacttggagtattacttttcaatgattttaagatgagttaacacgcaagaaaaattcacgttatttttaaaaaaaaaaaaaattagaatgtggagtcaactcaacaaaattaagtttttcctaccaaaaattcaaaaattgtattggaactaaatttaaagttgattaataattttcattcgtgtcttttagttttaaacgatgagaatgagttttgttatttagaagtttttaaagaaaaatggctactactactacaacatctacaatgtgaccatctattgttatttgtaagatcaaccgtggatttactaaacacagctcaaaaccgaaaccttaaggtctacataaacttatgatccgagtcaacggtcagagctaatcaacgaacatccaaaatcgaagtttgttctaggatattgcttctagatggacaataaaatgaagaaggatattgcttccttttatatagatagattgctgctccagcttttatgaagcaatatccttcttcatttatgcacaatgtaacttaaatataccttatgaacagacaagaccgatagtattgtgttcttcattttctaaggtgatgttttataatagaaaacgaaaggcataacacgtttgaaacagctagatcatatcgaactaaaactgcaagattcttagataaataatacattaaggaaatcaacttataatggtacaagaaatctaaaagagaaccccattccctagacatcttgctttcagatgcatagaatagagcaaaagtattcatctgaggttccaagtcttttcaagatgataggaaaaatgcaatgcaacttacaccatctgcaaaatggacgagatgtacttttattgagcaccacctcaaatgatttgcttaaaacctccactgtgcttcttggcatgacccctgaaaagtctccaaccacacaatttgtatgcaaactatcctcctcatctttacatgtgtagaaccatctctttatattggattgttttcctcaaatgtcacaccagtgtttaccacttgtatttttgccaaagcgtagtgagaaaggatgatcgtcatcaatgctatgcattaccacaagtggtaaagtggcgcatttgaaatccaagacaaatttacagtcactttcaatgcacgcgagcacaagagatgccaactcgttgcaaccattgcattgtcttctttcatcgtgtgggatgtaatacaagggatgatcatgacttggatggtgaaatggctccgaaattgttccgcataggacatcgaataccttatcgtcacgctggtacctgaaaccattgggcattcgatgataagcataacactcaaaaatactggcctcgcttgtaactaaagttagccgttcattgtacaacacatgccaaatacttgtaggaaatccagcgcaggtttggtgtagaatgaaatcacaatcaatacagctgtagaaagattggagaccgatgcaatgggcgcatgctctacatcgcttgttctcctcccacagaacaccattaacatggtgtcttaagtaatgctctatgtggctgaaatgctgtattgtgttatcatctattaccacatatggcgcctctacatcttttgtttcttcatgtactccttcaagttctttcccgttccacacatctcttctagtagcacatttagaatgaacaaaatagctaggacacctctgacaagaataacccccatacatccaatccatcttatcgcggcaaattccacataatacggaattcacaacattaagataagaagggcgtgaaatattgtgatcatggcgattaatgcttatgaggcatggaaggtcaagacagtcttggtggatcatgaagtcacatatactgctactgcatgcgtaaaggcttcgatatccactcaacccacaagcacaacatgtaaaattaatgagtcttgggataagggtgagttggtgatcatgagctttcaaattcagcaaagatataggtggtgggtttaaaacacaacgcatatccaagctgatgttacaagacgaacaatgataaaacaacctatcttcaatctctcttccacaaagactgcattttatatcgcaacggtccagtgatagacctgtgatgagcttaagagggtgtaagtggtgggagtggtttacctctaacagatgttttacctccgatggattccaaacgcaatccacatggaatgatacttcacattcatggcatttgtaacgaaacccataaccatcattgccacatttagcatcacaatcaaactcgatctgcttcttgataagggtgagcttgtggttatgcgtctcggaaatgtcaataacctctggtggtgggtacttggcacaatataggtccacgtcgaagtcacagatcttgcagctataatatagattcacgtttatactctttccacatgaatcactgcgaagaatcactgcgaagaagaagaagaagaagaagatggaccccttaattattgaatatgggatttgattcggggcggtcgcaccgctcaccctcccatctcagccggctctgaatgtaggttgataagagaaaattaactagattgttgttctattgacaactagatgatttaaatagttttagttagttttatgcaagatgttttgctccgactcacttaaccgtaaatattagttatcagttaacccgtctcatacatgagtcctaatctagtttcaggaaaaaaagagaaatagactactacaagataccagctcaaaaaatagcggtcattttcgtttgttgg

SEQ ID NO: 37745 - DNA, 1740 bp, Arabidopsis thaliana landsberg
gaactttctgtttttgagaattattggtgttgtgtgcatatatcatcttcagcaacgtgcattgtcagttgttacagatgcctgaaataaattttctttttcacaccagagacactggccggaaagtggaagatcctgacttgttggaacaaatccgattaacaatcatcaacaatctcttgaaataccatccggtctgcctacagttttctttatctctttaccttaatcacattcacattcaaagaggcttgcatgcagctgtttttttttttttgaacattgcctttggttgttttgcaggaatgcagtgagcaacttgcaatgggtgagacttttggaataaaggctcccgaaaagaaggtaatgtttactctgcttattggatgattacttttgtgtcctgtgttttatacaaactcttttctaatgtcttagtcgagttttataaagaagcttgcagtcattaaaagctagctctaggttactgatgtctcatttctgctttggatttatttggtacagattgatgtcgatatcgcaactcatatacatgtgaaagaagatggaccaaagaggaggtattcaccatatttattagcattattaatgacaccacaaaatcatatataaagaatagccctgttgaaatagtttacataattctcgcctgtttcctgttttctctagcctgcttgtcatagagacagcggacaggccaggtcttgtcgtagagatgatcaaagtgatggctgatgtcaacatagacgtggaatccgcagagatagatacagaggtagtcaaaacctacataagtacatacactgtgattccatttctatgctatgcattataatagtacgtctccattgtctctctcagggactggttgcgaaaaacaagtttcacgtaagctaccaagggcaagctctaaacagatctttgtcacaggtaagtttttgtttctgttagtcttgtattttgcacctttaaaagaagagagagaggtaaaaagaatcaactatctcctgcaggttttggtgaactgtctgcgttacttcctgagaaggcctgaaactgacattgacagctactaaatgagcttttgtttgctctaaaacaaaactgctctttatcctttaaagcaatcatatctgtgcttgcgaaactttcagacttctgtatggaagattatgtggaaattcgtgatactataattgaaccactgtggctaaaaaataaatgggttcttgacacttgatttgggtgcgtttagaaaattcgtagaagactcaatttttacaaatctgaaacctcccttaccttaattagtctgtggttaacctgaaaaatggacgcaaaatttaatggtaattcgaagcggtctaatttattagaaagaagtataggacacgggcaagcttgcggacttatgtattcgaccgtagcacacactcaatggacatgcttatatgtcaaaaacaatagtctgaggtgattatgacattaattacatcatcctataagtggcgatgatgtgtatgttgatacatcttacttaatatctaacgtatagtagtatatattctaaatatgggatccaacatgctttttcgtgataacgactcttaataatcgctctatctcaaaccgcattttaccctacaaccaacaatgaattctacttggactgtctttttgatcattaaaaattatgaactgtcaataaactaattagcg

SEQ ID NO: 37746 - DNA, 2813 bp, Arabidopsis thaliana landsberg
acctagtaacacaagtttagttagttcaagaaaatgaaaatagaagacgattaagaaaagttctttagtgatcttcactagaagcaagaaactgtaccttgcagcggaaggagcaaaaccgatagtataatacgtaagaccaatccatattcctgattcgataagagataatggaatcttcagaagccaagcaggtaaggcaaaagcccatggagggtagaacaagaagtccctctgcttgtagaacaccgggagcctcatcactgtgaatgctagttcagctagtccattaaacataacattgatcaagctgaaaaacatagcaccataaaacttttgaccatctcgcacggtaccaacatgcatttctgtcctaagatagaccgtcatggtaatcaaagacatgattgttatctggacggtcttgaacacatacacaaaggagttgcgtttcataagcaaccattccctatcaaagcatgctttgaagagctcccagtttgatataccatacttttgtgtgactagtgcagcagaatgagttttagctttgtcataaggaaccctgaattctgaagcaagttgttgccctgcgtgaaaagaattgaagccgcttgagaagtcatgcactgatacatagctgtaaggatgttctctcctgttccaatactgttcttggtccttcttagacgtaacttcttgcagaaaatctgcaatacctttcctttcaggacatttgaaacccatgtactcaaagaactcaagaacgttgtctcgtgacccctggtagacaatttggccctctgagagtaggataatgtcgtcgaaaagctcaaatgtctctggcgcaggttgtagaagcgaaatgaccattgtgacatccgcgatatgaactagttgcctcatgaacttgcaaatttggaatgttgtggaactgtctaaccctgttgatatttcatccatgaaaagagctgttgctggtccaaccaacatctctcctgctagttaaaacaagagacatgatcatatagtgtaacgaatcatctagaaaagtgaagatatgtattacatacactaatactcaaagtcttacctgttgttagacgcttcttctgtcccccagaaatacctcttctcattacgtctccagcaagtatgtcagcacaaatgtctagaccaagtatctgtcaagtgaaattaaccagggataagctcaaaacattgttctttcactttgttagaaaaagcacaagtaaagtaaagtaccttaagtacataatctgtaaccaagctagtttcttgccctgatatagcaatggatttcatgaatgcatcaattttagggtctggctttattccctcttctttctccctccttgaaagctcagacatcaactggtaccgacttccaacacctagacatcgtcccgaaaaatccagtatctctctcaccgtcatttctccaaagtgaaggtcatgttgactgatgtatgcacacgtcttttgaggtacaaactcgcgaaactcatgaccgcaatatgttatcctccccgacatctgttttccattatcgggttagataatgaatgattattcttacttgttactctaataaaaaaacaaacctggagagtgtcatcgagcttcccagccaaagcttgtaacaaagttgtttttcctgagcttggtggaccaagtaataaagtcatcctggaaatgctcaacaacaatgtaactaaactcaaatatattctcctttcatctaaaagtttccatgttgagatataatatagcaaagacaccgttgtctcattagctttaattaccttgatggtttgacaatgccgctgatatcttttagtatctgaatctttttccttttagatggaaggaggtggaagaatccaagaatgctctatatacaaataacagaaagactcttaagtaaagcttcatcattgtttatttaaataagagcttaatatgcttcaaaatcaacaacaacaaaagaatatttacaaagttaggttttatcttctttacttagatcttattttgtcgacgatattgaacaaaagaaagctaccaaaaataaacaaaacaagatcaaaataatgaaaaaaaaaattcaacctccatagtattcaaggtgacgttgaagagagtaggaagcgctctacttgcactacgcacatctccttccactgaaatattctcataccttacttcaatttttggaacttcaattcccactctgttctcgcaaaataaattgcaaaattgtcggaacaacaaaattaagaaaaataaagatttaaagggattttttttcttcttttttggaaattttggaaaacaatttaataaatttttgtttgctttttatcttacctatctgttctttctctcaaatcacgtagaaacttttcattgtcttcttcaacgaaactcaaaatcatttccataaggtgtttcttatccttaggttcgagccttgttaggtcaatatcctcaagctcaatcttcccgttagccgacgtttgcggcaacatccctttacgtagccgatcaaacgtcggcaatctctcaatcgccgcccatcggagctccatgtcatcttcctcccgacgttcgctcctcccaaacacctcgtcagtttgaggcatgaacacatctcgaaagcttttggaagctccgaccaaactcctgtgactggtggaggccaaactcactctcccactcaatgctccgaccggatcttcatctcgtcctagcattgcggccattgccgacgactacgagtcctctggttt

SEQ ID NO: 37747 - DNA, 2155 bp, Arabidopsis thaliana landsberg
ttttgtgtgtgtctagctgatctgttctccgatcaaatccaattctacaaccaagaaagacagtccctgaaacaacaaaaagtagaagtgaagaccgtgcgccgatagaaagctccttgcagctgcggttagcagcaagaacgcaagcccgagctctttcttgaacaccatgttcgtcttcttcttgttcttcggcctcattagccctccaaggctcttcttcacggtttcttgccctacaagatttgtctcttgctccttaagtttgctcagaagctccaaacctgactccgagtttctcctatgcaacttctcttccttttcagcaaacgctagcaaatcggactccgatgatctcccggttttcttcgtcacaacccactcgtaagccgatccaaactgaaacagcccggagatcatggcgttgaacttggtgacagacattgtgttttcgaaaagaaggtaagggactaagaaagggaaagactttggagcaggaagaatgttgaggaaagacatgaaaactggtacatagcagatgacccaaataggaagctcagcttctggaacaaacatggtgattggaaggattatgcagaacaatgtgaaggagtagaaaggaagtatgagtttccttaaaaggaagaatagtagtatcatatttgctttcttccacattgcaatctacgggaaaaccaaaagagccattaaaatcattggaatgatcaaatgattgcaaaaccatagcttttatataccttaaaggtcaagattgatcgcaaacaccagcgaaatagctgcattggtcccgaatgccaacggtgttgctgcttcttatatgcctcgtaggactcaggaacttcgcaaaggacctatagatttgtttctatccagtttaattcattttgttactaaataaggctttttttagaaacaatcgataaaaagtagtaccttgacgtcattaagatatatgaacttccatccatgaagatgagcgcggactgctatgtccatatcctccacagtagtcctttcaagccaaccaccagattcctcaagggctttgattctccatactccagctgttccattgaaaccaaagaagttcaagaacacgccgttcacttgctgctccacctcaaagtgaaaacacagattgatgttctgaagacgggtcaacaagttctcgtctttgttcacaaatgtccatctagcttgaactagacctaactctgggttatcctgaagattaaatcacatttttaacatgttagcaatctctctctccacttttcaatgatagaaaattgaaaccaatgttaataccaaccttgaaatgtggaactgttagtttaaggaaatccggagtaggctggaaatcggcatcaaagattgcgacatactcgtatgcttcaacgtaatcacagctcattgccgatttgaggttaccagctttatatccagttctaaccaagcgatgcctgtagattatgttgactcccttttggctccatttggcaacctcagctttaattaactgttggatgctttcatcgttcgaatcatcgagaacctgaaccagtattcgatctttcggccagtcaagttgacacacggcagatatagattgttcatacacctgaacaagaagaagactaaagctcattacactgataccaaaaaggttatataaagcaggagaaagatgaatactttcttggatataccaaagttgaatgagcatacctctctctcattgcacattggaatctgaacaagaaccattggatactcagatccagatccctcagcatcatcattacggaaaggttcctcatcaaatctcggcttaattttcttatacttgatccaaaaacaacccaagcaaagtaccaaacgatctactgactgtataaggaacagcacaatacaaaacttggagagagctttgatgggaggagcaatataatcagctctaagggttaaccaaccaacatacacaagatgaaacaggctctggatctcaagtgtgctagtggggatgtgaagactagggctttgaaagtaatgccatcctctaaaataagcaacaatctcaaagccgagaatcactaaggaaacagctaagaagagcttaatggcagtgaaaagc

SEQ ID NO: 37748 - DNA, 1538 bp, Arabidopsis thaliana landsberg
aaattttgaatgacaaatgtaaacatctgatcgtttgacttgacacgtggttcgatcctatgatttagtaacttaattagcatatgtaaatttgtttactttttaagattttctatttttttaagagaataaaaaagttaaattttaaatgacacatgtaaacatctgatcgtttgacttgacacgtggtacgatcctatgagttagaaactttgaaaaccatattttatataataagattctattttttttaagagaataaaaaagttaaattttgaatgacacatgtcaaaatcggatcgatagagttgacacgtgtcatgatcttatgagttagtaactttgaaaaccatactttatataataagatttatttctatttctttttagtgttttgttttcctaccatgtttgaaatgtgatgtgggtgaaggtgtagaaaagtaaaactgtattgagagaagtcgtgtacgtggatctcactcgcggtgatttttctctcaactttgttcttcttctgatcacaattttctacacctgtggtcggattctccatcgattccagcaatgatgagggcccaaaggctcatggttcttcatccgtaacttgcaacatctctccggcaaagcaatctgaccataatcaagggagttgtggatggagaagtgtctgcccgactccgacgctaagagctccaccaccgatgtagcgatgcggagtgggagacagaaatctaagtgagatctgagagaggcaaacagttagaattaggaccataaattctgaaggtttcacgggatctctgtggatgggggaggtatattcagatctggtgaagctatgtcaacgtcgaaggtctttttttctactccctactgtttctctctctcacggccgagcattaatctcctcgtcaaaggcaagatcggatctcttcctccttcttaaaacgactctacggtggcgagatgacaacagatcttggatcaccatcttgttcggctcgcgtcgtccagactcaccaaatatcttgttctggcgagaatctacagtattggacggcggcttcgttcaagttctatgagtgaaaatgtggtgtgggtgtaaatgaatattctcccatgacaagcaaaataaatttaaagataagagtaccatttaaaaaaaaaaattagagaaggtaatagtgtttttatttttgattacccccacatatataagtagctacatccattttcgcaaaacgaaacgaaaacaatttatactcaagatctacgtaggcttcaagttatgaaacatagcatcccatcgtgtgtcatcatcccttttattgtactccacatacacacttgggcttggtggtcttcctttcaacggccctgataatctcaatcgttcgtttaagttttccatctaactgtcccgacacaatagggcttgtatgagctacactgagtctttattaaacccttctatccaacggtccagataggttcatgaaacgattgcttactaacgtcattttctcctgtattcc

SEQ ID NO: 37749 - DNA, 2998 bp, Arabidopsis thaliana landsberg
ttgcatgatcggttcatgtttttagccgaatgcaattacattatttgttttcttctaaacatatgctctgacgcacttgtagatgattcaccttaattgcgattgcaaattagtaggcaacaaagtcatcttctaaaccaagttttctctgcaccggtctaacatctttgtgtttactttaataatctgtggacaacaaagtcttttattattcgttccaaacaaaggagcacacgttaaccactttagataaataatcttctaatctattgttgtgcatcttgaccgagtcaaactttagagtcttgaatctctctctagctcatcgagtcttctctgactgctccaacattcacttcttatatgattttcatttgtggaaaaaaagtcacaattccaaaaagatcataaaataatgtattgtaaatttgtaataaagaaggcatggtgaagaatcggatgatctatctaacttttttttttttcttatctattaaactccgtgttgatttgttctaccattagaagaaaagaaatcttcaataattttttctccaactaaacctctggcggccatgaacgaagaggaggcaccatctgagcagaagaagacgttatcattggtaccctcaccgaccacgaatctgtttcttcctgatgacatacttttgagctctctaagccgcatttcaagattgtattacccaactttctctcttgtctccaagagtttccgctctctaattgcttcaccagagctttatcagactcgctccatcctcggccgcaccgagagttgtctttatgtgtccttacggttacttaacgactctaacctccgatggtacactctctgtcgagttccggatcgaaaactaacaaatttctcaggtggtcatttattggttccgatcttatctcgctatgctcctcctgctcattggtcgagtgtggtcgctgttgattataatatctacgctattggagggcctatcaatgatgcaccatcctctagcgtctcggtcttggattgtcagtgtgagaaatggcgtgaagctccgtccatgcgggtggcacgaaactaccccactgcgaccgttcttgatgggaagatatatgtagcaggaggctgtgaagattgcacttcattggattgtatagaagtgtttgatcctaagactcaaacttgggactctgtggcaagtcctggcaccgagagatgcgagagacttgtatacaagagcgtagggatcgaaggaaagtatcacttgtttggcggtgcgggtcatgtggcttacgacccgaaagaaggtagatgggactcagttggaatggatatggagatgggtcggacatgggtttcatattgtgtgataaacaatatattgttctattataatgatagagagtttaaatggtatgactataaaggaagattttggagaaagttgatggggttggaacggctaatcaagtttctatgctatagccgtcttaacttggcggcttacggtgagaagatggcggttttatgggatacttttgtgccttctagctctaagaacaagatgatttggtgtgcggagattacgattgaaaggcacgacatatacgagatttgcggtaagactgaatggtttgatgttgtgcttagagttcccaaatcatatgaattggtacatgttcttgctgctactgtttgattcatgatgatttggagagtttgtgtagtattgggctatttaatttgatggatgattgtttattgtttctatattgaggcccattaaaaaatgatttatatattaagcccacaattgaattatcacacactcgcaatctgaacgagtaaagcaaacgcgttcgagaactctcatagcagtgaagtgaagtcaaatccctagattgacttgctcaacggccctttcatctcgataattagccaatgtcttcaccggagaggaagtggattagggtgacgtcgacgaagaatccatcgggtaagaggaagaagaagatttcaccggtgccgacgccgataccgtcacttcctgatgatttgcttgtaagtatcttcgcacgagtctccagattgtattatccgattctctctcttgtctccaagagctttagatctctcctccgttcaccggagctttacgagacacggtcactattaggccgaaccgagagttgtctgtatttgtgtttacaggagggaaatcctgatccgaaccctctctggttcactctctgcatgaaacctgacagaaccctaaaaaatggcaagaagaagaagaagaagaagatgtcaagtggtaatcttttgatcccaattccagttcctaatccccctcttgagcactggtcaggtcacgcgtctgttggttccgatatctacttctttggcggatacatggaggagaatgtgcgttcctctagagtcgtgatcctagactgccggtctcacacgttgcgtgaggctccaagcctgcagatggaaaggtcggaccctgctgctagtgttattgatggaaagatttatgtagctggaggtgtcgacggtgatgatgcagattccttgtacccgatagaagtgttcgacataaagacccaaatttgggatcataggcccatcccttactgggagaaagactggggcgctctatcaagaagcgcgtatgttgatggaaagttctacttgacgattgggatgaaggttatggcttatgatctagaggaaagtagatgggactttgctggatatcagatgggtcagagttggttttggtcttgtaattgtgttatagagaatgttttgtactgttatggtgatgctttccgatggtttgacactaagctgagattgtggaaagttatgaaggtgaaaggactacctaagttgtcccgtaatgtcgatgttaagatagcagattatggtggaaagatggcgattttttgggacaatccttccccttctgcttccgatacgaaccaa

SEQ ID NO: 37750 - DNA, 1495 bp, Arabidopsis thaliana landsberg
taatgacttcttataatggcgagaaaaatggaggtccgagatgaagtgattcagatttttaagcctttaatgagacgattaaaggctgtgaccttgtggaaatgcctgctcatggtaatggctttacttgggctggaaggagaggagatcactggatccaatgcagattagatcgggcttctggccacaaggagtggttctgtttcttcccggtctctaatcaaacctttttagattttcgaggttcacatcatagaccggctttgataaagctgatgtcgcctcaagattcttatagagggcatgattcgttttgataagaggtttctgcttaaagaagatgttaaagaagctattatcagaacttggagtagaggcaaacacggaaccaacatatcagcggcagatagattgcgcgctagcagaaagcccctgatttatgggaagaaacaaaataacctaaattcccttgataaaatcaatcaacttgaggctgctctggaaaaagaacagtctttggtctggccgatttttcaaagagtttctgttttaaagaaggacctagcaaaagcctatagagaagaggaggcttattggaagcaaaagagtagacagaaatggctcagaagtgggaatagaaactctaaatattttcatgctgctgtgaaacagaataggcaaaggaaaagaattgaaaagctgaaagatgtgaatggtaacatgcaaacttcagaggcagcaaaaggggaagtggctgctgcttattttgggaatctgtttaagtcctcaaacccttcaggctttacggattggttctcaggtttggtgccgagagtatctgaagttatgaatgagagtcttgttggagaagttagtgctcaggaaatcaaagaggctgttttctctatcaagccagctagtgcccctggtccagacggtatgtctgctttgttttttcaacactactggtccactgttggaaatcaggttacatcagaggttaaaaagttttttgctgatggtattatgcctgctgagtggaattatacccacctttgtttaataccaaagactcaacacccaacagaaatggtggacttgcggccgatcagtctttgttcggtcctgtacaaaataatctcaaagattatggcaaagagacttcaaccatggctccctgagattgtttctgatactcaatctgcttttgtttctgaaagattgattactgataatattttggtggctcatgagttggttcacagtttgaaggttcacccgcgtatctcttcagagtttatggctgtaaaatcggatatgtctaaagcatatgaccgtgtggagtggagctatttgagatcccttttgctgtctttgggttttcatctgaaatgggttaactggatcatggtttgtgtttcaaatgtcaaattactctgttttgattaatgactgtccctttgggttgattatccttcaaacaggattgagacag

SEQ ID NO: 37751 - DNA, 1779 bp, Arabidopsis thaliana landsberg
aataactgatggcaccattgctggaagccatctgaagatagaaaagcttactcattacattaagcatcctcgtcccatagagccacctgcagagacagcacctccgccaccccaacctcttatactgacaaagaaggaacagaagaagctgcgaacccagaggcgtctagcaaaagaaaaggagaatcaggagatgatcagacaagggttgctggaaccaccaaaagcaaaggtgaagatgagcaacttaatgaaggttcttggttctgaagcgacccaagacccaacaaagcttgaaaaagagatccgcacagcagctgctgagcgtgaacaggctcatacggataggaatgctgcccggaagctaactcctgcagagaaacgtgagaagaaagagaggaagcttttcgatgatccaacaacggttgagacgattgtgtcggtgtacaagatcaaaaagttatcgcatcctaaaacaagattcaaagtggagatgaatgcaacagagatcagattaacagggtgtagtgtgatcacggatgaaatgagtgtggctctggttgagggcaagagcaaagcgatataaagatgcgggaaagctgatgatgaagcgaatactctgggaagagtcagagatgaaggaagggaatgaacacgagtaagaagaagtgaatggcggaaacaagtgttggttggtttggcaaggaagtattgggaaaccgagttttcataggtttcatgtacacgaatgcgtgacggaatccactgccaagaaagttttcatggatgctggtgttgttcactactgggatctcgctgtcaattactcagacgactaaatcatctcccttatatcatcatcatcatcaccttgaaatgcgttaactatttggacatgttattgcgcttctatgaacatatattcccctggtgtctggtattttagtttttgaacaagaatgatctgttttttactaggtaaactgtttaaggttgatgatgcaacatgaattatctgagtcacagccgataagtaccactggttaactatgattatgacattagcaaaaatataaatgtttatagatatagaagccactaatcgataacatgattatgtgtatagtctgaagcatgagccgcgcgtgtagaagtttagtcgaaacgtgcgacaaaatgcgagcctgagtgctaaatatgtacctgacagctacacctcctccagctttctctttacccaacaattctccaccaacacgggcgcgtgacctcaaggaaatccccaaactaccctcaaactctgttgtttttccttgattaaagagtcttccttcttgtttttattccttccaaatatctcttttgtttcttcttcttcttctcctctgcttttggaatcgttatagtgataagaggagatggctgatataacagaatatctggagagatcgatgcagaattgttcacttattgatcggagaagtagtatgggagatggatttggtatgagcgatgaacatatcccgatctcagatagattcttggagctcagtactcacttatctgttccctctcatttggaacagtgtcttgatcttaaggtaaaagaaaactcacacaaaaagaaacagattcctcccatgtttccttataattgatcagtcaattttattttgttatgtctcaaaatgctcaaagggttttggtttcaaaaatgattaataattgtatggctaaagtaaacgccttaactgataattctaggattctctttcgttt

SEQ ID NO: 37752 - DNA, 6768 bp, Arabidopsis thaliana landsberg
tcaaaagaacgaaattgagagagaatgggattgagacctttaatggcgagaagcgtacgaagacggtttagagcagaagcacggttcttgtgctgtgaacgatcttcgacggcttgagctacgattccggtggggagatgtttcagacgcacggcggagtcacgcttgttccggtgttgtcctccaggtcctgaaactctaaatgtctctaatctacattgcttcatcaattcttcatcggtgaattttaagtaattaggactctgaacatccgaaacaacactaacggaatcgttatcgttaccgaaatcaccaccgctacttccgccgttgacgccgtcagacgatgaataacggagaatcgagcataatcgagtactgagtccatcggatagaagagttctgtgattgtaaataacagaagtaggagccgacagtaacgggatactgcgacggaggagaagagggaagcgggcgtgaaagagagcggcaacggccatgatcgccatggcagaagaaccaccgcgacgggattggtttcgaggtgatgacgtatcgttggcccagcccagaccagcccattagaaactatccatacactgggcttggcccatttaagtgacttcattttttcagttgagtttttcttttgttttgggttaccgatgctacttgtcgattttattggaaatgtttttttttatgaataacgaaattttttttttggcgataacaaacttttattgcatctcaaaattcatttatctatttacattgggtacaatagtattcattttgcatctagtataaaatgcatcccataaaacatgcatgtcattattaatgttaccaatttatcataaagtacaaaaaaaaccatattatgtaaacaaaaaaaaatataagaaaaagaaaagactaagttaaaattactaaattaagaaaggttaggtagcaaacatgtaagttgtaatacacgaaaatttctagtcattatcaagtaatgactattgataaaaaaattttaaataaaataagaaaagtaaaatgaaagtagtgtttaatacattaacatgattttttgtatttttttcttttaaatgaagatattttgttaagagtaaagattaatggagaatttaacacaacaaaagacttttgattttttctcaattagttttgctaattttttaatttaattaatgtagaatgacacatgtcatttttttgtgtaatgatgtgtcactcatatggaaagagttgcctaactttcatatatatgattattagaagcataaaagaattaatcaaaataagaattagaaaaaagtaattctaaagtgtaaatacacataaaaaaaacttttgacacataaggtattggaacattaaatcaactggactaaagcacttattagtaaagaccggacattaaaattaatataaacgaaagaaataaaggcaaatgaatcattaatacaacaaacacaaaatttagaaagtgtttttgagcttggagattttgggagagaatttaaagattttcttttaaggattttttggtgtgtttaaggtaaagagattctcagatttactctttggtatgcgagaacgatcgcggagagcttgagtgggaaatctggctcgtcggaaagatgatggtgggtgatatagtaagtggacatcactttgtcaacaaggccaatgcaatcaaggagccgtacggtgattcatacggttatctgtaacccatcaatcacagtttcaaatcggaccttgataatgagtaagaggatgttttttgtataaattttggacagttaaatcatcaactcaaaatgtcatttacaactagactatgtactagcctagcacatgctaattattatttttattgattaaagtttgtagagtttgacctggaaagtaatggagaatcattagtataaaagttaaattgtatctttttattttttgaaggaaaaaataaattgtgttcattaaagtatctaatattggtatggggtgtagaggtgaacatatttatcgttgttacattataaatttgttccgaaattgtcgatataaacaatttttggatttcaaattgagaacggacatgacgagacaaaaccgaattagatgaattgttatattgtgtatatgtcgtaattaatatattagttgtatatgttatatattagtgtatgtagttaacttagtaaatttgttaattaactaatgtgtttataagtgaatagtttaccagaaagtgcacgacaaaacacataatttggataaaaacttaaccaaaacacagactattgttgttttaatggctcatgtgtattttgagtgttgttaacttcttatctatctcttctcggcaaagtgttacaataatatctcaactagttgaaaaaacagatatgatacacatacctttttaatagatagaaaaatagtgataaaaacaatagaaaagagatactagatatctcttctttggagcaagagagccaataataccatgtaattatcattaaattcttgttttttattgttattatcaactaattgaaaatttatttcagcaaaaaataaagtggataataatatgctatatctttagaaaatcttaagactttaaactaatgattttgtgtcaaatgatttgaatatccaaattttagatacacaaaaaactttatcttactcatcatcaaggtacgatttgaaaccaaaacatcaccttcagataacaaaaaaaaaacgaaaaattatcacatatcacacttaccaataaactttgtttcttattatttgtcaatatccattttacaagttagtcactcttatcaataatgtccatcaagaatcataatccattagaggatatataatttagtaattttcgctccacaagaaaagaacaataatataaaagatactaaaacgaaaaacataaagttacactcacacatatgaaacaattacatataaggctgagttaaatatctatgctcagaaaaagaggaaattaaaaaagtatgcttgataattctgtatttaaatttctctcttcctctacaacaatctctgatgcttttatccctatcaacatcaaatattattaaatatgtaatgatgcggcaacatttaatgcttctgaaaatatctgcataaaatcttggtgccggcattgggaagggaaaatagaaaaactaattatttacatgatagttatttattgggttgcgagatatcatttatacactttggactatttagtagcacaatattgcagttggaggaacaaaacagatctagtaaactaaaaagcttagcttcagagaagttattacagtttctggggaaacaccaaaaatcagtcaacccgaaaaggtatgagttaaagctctaacgattacatccataaatgtacttcccccgaaaagtcattacatgtcaccagtttcaaatctaaccatgctaacgactatattatcggcgaatatatttgcaggtgcactatggctttcgttgttaggttgatcctaggagaatggaaacaagatgaaaatgggtttttcgaacacgtcggcgagttggaagggtttagcgtgggcgtacgactgagggagcaggatgggtacgcaagcttggtgaatgttgtgaaagaaaaatccagggctggtcgagaagataaagtcgaactgagttatcagtggccacactggatgatggggccagattggaaacaagctaacccgatctacataacaatcgacgaagatatgacattgagcagggcaattagggcggatccgaaggaaggtcatctaaaggtgaagattatatgggacgagactgagcacaactttaattcctatcggagtaacatggatttgggagcgttaacatcagagaaattatccatcttcttgcgcattcccaagcttgaaagggacagactctcgggtggccacttcaacatcgtcttcggcaccttcagaatcagactcaatagtctcgtcgataacaagaccttcttgaatagacggagctgcctataatacgaccaattgcaaagcgtacaacaaaccctgaacaacaaaacacgtgctggctaattgatcaatttccctctctttaatcgacttcatcatcatatcgaaagtgaaacggcccatggataagctaaaaatgcgctaaggtcctcagccatttcagcgtgagccttaacaattttaggatagtgagaggtatggacaaggaaaccgtcgacgatagctaagcaagcacatcagatcctcatactgggatccgagacaacccttctcttcaacatcgtaataaccctgtccacgatgacatcatgttcaagcccaaacaacttgctgtaaactgggatcgtcttccccgtcgtgcctttcttcttcttcaacttcaaactcggatacttcccacacggtaaatcagtaacgatcttaaactctcgcaaagaaaaacgaataggggtacccgcgaatagaacccaaatctcgttaggcttcacgacatacaactgcctatcccatatgaatatcccaaaactcgcggacaaggagggtagtttaggaaactccaacaggcgaccgaaagaagtccgagctatgaactcccgttcaccatcgtcgagtgcgttgaggttaccacacaacgttttcatcttctgatatacattgaccctctcgccgccagattcttccccaaaggcaatcagacgttgaggtagaggaatcagagacatcgttgctgtaaaaaatcgtaaaccctaatgagactactaaaaatgtgaagccaaaatcataaacaaaaaaaaaacattgtcattgcataccagggaaaaaacggcgaaaaaaacccagatctgtagatgaactactgctcgaaaacagaaggaaaaaaggtattttggagaagacggtacttcttttcttccacttgagaacgccgtctctcaccatcttatatccacggaaaaagacgattgttcgataactgagtaatgcaaaaaaaaccgtaaacaaaaaaacacaactccccaagcataatatatacataaaatctattcctatgctatagccataatatcgccctagaccctataacactcgatatcaatattgtaggggtacatgagtaaatatttttgcaatagtagttatcgaacattgtaaaaggaaggcagtgaattaacgagtatttttagtatatggatttataatatcccattttttagtcgcttaaatcttaaaatatttagggaccgctctgaatccttctaccactgagtcaccattaattaatatttttacgatcgttttcattaggaactttttcactaattttctactagtttggattttcgtcaaaaaatataggttgaaggaagaaaatatttcttacaaaacttttgtagaaatattcatagtaattcatgttattttcttgtaataaatataactgaaaattacccatattgactcaaaactggggaataataactaaaatgactctcattagtgatggataactagactaacacaaaatttgtgtaaaaagaccaattgaccctagatgttgacatttaatgttttagtggtaaatatcgcaactgctctaataaatctgttattacaagaaaaaaaaactgccaccactttaaataatattatagcaaaaaaatatgcaaaacaaaaccataattgatttttgaagttatagaattttttatatatttgggttgacaatgtatatttacggtatagtttttaggtgtacggtttagtgtttaagatgtagaaattagttttgaatattaaatttagttttagatttgtggtatttttgaaaaataaaattcattatagtatttgttttttgtaaaaactcattttagtggtatttaaaagaatttctaaaaacattttgacaaaaaaaaaatcaaatctgtcataatattattttctaaataaaaaaactgttacaatagttagtattattcaattaaaaaaatcatggaaaaagaaaactataaatcggtcaccataaggatttcaaattacaaatctggcataacataaaatatttttaaggtcattccaacaatttattttattctttattaaacctgtcatcaaacgacagatttatggtaatataaatttatctgtcacagcataaaacaactctgtcataacacaaaacattatattttagaaaataaacttgccatcaaacggtagatattttgtaaaattacaaaaatctgtgataacataaaacaagtctgtcataacattattttgaatttggtaaaaacatcattttctctctcttaaagtgcgacaaaaaagccgattgctctgtcctcttaacctagccgccgccgctggctggcctctcgccagctgatgctggttccggtatgccgaagaagaagaagtctgtgcggccctcttggcctccaattccctcgaagttcttccgtgtgctagctgtttcctctgctccgggttcctctgtttcctctgttccagtgggctctcttccagtttcctctgtttcctctactccggtgacctttcaacaagattcctctgggtgctcgcctgttgctttaggattccgttcttttttgcgttggcgctgatgcgtcttctactttggttgagatgaatcgagtgcgtccttcatctcctaaagttctgggttcaatgcttg

SEQ ID NO: 37753 - DNA, 1628 bp, Arabidopsis thaliana landsberg
atagacacattacacttaaactacttattagacatgaaggtaaaatcaaattttgtcacatacaccaacattaggggtacaatagtcatttaaacaggtgaaaagaaggcggcttggggagtgaatgggcctcacgaattatatacagctttgactgtgacataagttaaatgacagacgaataaacaaaaaagccctttaatcagaaaaaaaatgtaaagcgtgacctaacgaacatcaacgacaagtgacattatcattactctcatcgagagcgttggtctctcttctccttcacctttgagtttctcgaggctcttttcttaattttactgctaaatagtagtgtttactgtcttcagccgccgtggccggattcaattatcgaaggcgacggaagcagtatcgtagttttcgtcggaggaacctccgtttgattgtcagcgctgccgtagtattcgacgatctcccatcgtcataaggattcctcctctttttgtcgtcagatcttggtgcttcttcttcggggctcagataggatattgtgattcatgtggactagtttttgaattagtctggagatttggctttttcgatcgattcgatctgtttctcgccatttgtgtttgcttcgattctatagatagattgacatagttttggtttggaattagagaactgtagctataagcaattgaagctttggattgatatcaatacaacttcaagcatctgattggtagattaatgcagagcatttctgaatagtcgtgatttgtttttgatattagtgtgtatttgctttactttgtaggcatttgttttctatatccgaagatgggaagcagtccagctccgtttgccgatattggcaagaaagccaaaggtaactcaacattgctttggtgttggtttctgtgattgttgtggttcccatttattgaatatttgtatttcaaaacctgcagatctcctaaacaaggattacatttttgaccacaagtttactctcacaatgctgagtgctacaggaacggtaagtgtgatataacttggatccttttacttgaatggagttaatccatcttataagaaaacataatttgcttatatgaaccgttgaagattacttgaatagactatgctcaacttaccagggaagtgcttatgaatactggtattacatgctttttgaatcccaagtggttgcagtagttcgtagaagcatgctctttgactgctttatacctatttaacttaatgttcttaaactgctttatacctatttaactttatactgcacaatgttattttctttcctacaggaatttgtggctactggtttgaagaaggatgatttcttttttggcgatataagcacactatataaaggtcaaaacaccattgttgatctgaaaatcgacagccactctagtgtaagcaaatttctctagtgattttttttgcaccttaactgtcctaaaccatattactgaacatatatatcttacgcaggtgtcgacgaaagtaactctcaaaaatctcttgccatccgctaaagctgtaattagtttcaaaatacctgatcacaagtctggcaaggtcagtgcatagcccatataaaaatg

SEQ ID NO: 37754 - DNA, 2406 bp, Arabidopsis thaliana landsberg
taaaacttccctcatgagaatcaatccatttttttcaatcttggaaaagatttaattggggtttctcttgcttatttttgacaggtacaatatacggtaaagaataagatgttcataaacatgtttgtcagtataaagtggagccgctatacgtagattcagaacgcttgtgcaaacaaaagaagccgaagagtacagaagaatacgaaagatgtagccgcgcacaagcaaggattgggtcgaaagtgacattggaccagatgtttaagccttcttttatttttaatctgccaccgatttcttggtacgttcgtcggataaccatcaagaccatgaaaactctgatcgaagatcttcaaattacaagtgccatgatccgaggtatttgaaacgtcccaaatccgctacaaattgatagaacatcaaataaagttataaaatcactttttataaatttaaatagcagaatattacatatgactttagaagtgtatgttcttatggtcactttataacatcaaattaaatgtatagaaaatgtttctaaccaatagttcttaattagacgattatacatagtcaatttgtgtcttttcatattttttaatatcatatattttcatatggtgtgtagtatacactttttttttgttttaatactttttcttaataaatatgaaaacagaacatttaaaacaaaacaaaaaatgaaaatagaacattgtgtaaaatatgtctaacgaagttaaaacatagaggaaacgatcatgcaagattcttcttgattccttctataatctttggcgcaatcgtcatatatgacttctcgctcgggtgggcaaaatcccaaaacacatactgagatgcatcagggcacggaaccggcgatgtcggcatacaacaacatccatcagccacatcaatgaaccctataatagccatcaacgaagaagaataacatattatatttttgacgtatatatctaatttttcattgagttaggccattacctgaagcccgaggattgttgatgagattaaggagaggattatacatgtctacatagacaaatttggcgccgggaagtattgtgtgaagattgttaagttttgcagataatttttggttgaatatagcagccacttgatttatagggactaagcatatattcccaaaatttccacctgtatgtcttgctcctggcaagcaacctaacggaagtgttccaagaaccgcaaactttcttgcacccattgcatatagactcttcaaataaccaaaaaacaaaattaatagatttcgaaaaagaccaatcatacaattatgttttatcacaagtattttaaaatagtgtacctttaaaagattatcagtccaagtgaccaaaagatcagtgtaggttgaaacagtatattgtgccattagagtaggataggtgattgcaagatcgttatttccagctgagattagataaacagcgtttgatataatcgcgtttacttttcttttatctcgtacgacgccgtttagtttcatgatatattctttgaaatctttcacctgatcaggcacccatataactccctatacatcaacaagagaacatattataaaagataatcaagaatgattacaatgtaaactctaagcaacacaagtaatttttacttgtgatctggcagtgcgttcatcaagtccagatccaccggatgcaaaacaaacaccggttggaagatcattcttcgaaaggttgggatcgcggtaagcgggtaagagtttttttacattcaaaccttcggctgcacaaaaaagactaatatcaaatcataaatattaggtaaaatgaaacattatatagttgtgtcgaggtgtataaagatatagtagatgttaacgttgatagatataccaatcatatccgagaaaactcttccatttccaaatcttccagtagcttttccgcctataaaatttctaccatacggaaagaaattgcatttggaaagagtgtttagattgttgttattgccggtatcgattatcgagtctccgaaagcgaaaagtgctgaaactgctacacttcctgaaaattgctgcgcataaccaacaaaaaacaagcaaacagaagccaatgccattagcattgtagaaagtaaagaaaaattcatggtttttggtgtctatgtatatattgatgaatatttgtatatcaaatgaaaagctgctatagtcgacgtcaaagaagctagtatttatatacgactagttcggaaaagttgtacatccaaaatcaacgggatctttattttttaataattggtatcttgtttaattttggaaaacaaatcaaatccaatgaattaatctttgataatttgaagtgatttgagtgactttaggtgaga

SEQ ID NO: 37755 - DNA, 3234 bp, Arabidopsis thaliana landsberg
gcccaaatactcctccaggtctaagaacacgttttatcttttcaacctagaagatccaagggaaaataaacacaatgtatcattgtatgtgttgtttttgtaaaatgttgaattaggagaaaagctttacggttgaggatggtgaaggccagcaatgcatagcagcaccagcatggacagcgtcaactgaacccgaaaggaaagggagtctagcaatgtcagctcggactagaacaagtttcctggaaacgagacagcaggagtaaaaataacacatctggtaacccaagatctaaagacaataaagaaagcaaaaggtgaaagtacaaactctttgttgggaaagttttcttctttatttaagagttcatagcattgtcgcagcatattctctgagtaatctagagcaataaccagagaaaatagatcacttctagtgaataacctcgagaacatcccacttccacagctagcatcaatgatattgcctcccaaaacaggcttcagataggccttagccatttcaaactgtggaatgcaactttatcagtgttcttaaatttttggttcaaaaattgaaaatcaatgtaagcttcattatgttaagtgaaatatactaattgggacaaacaatcagaaatttgacgcatttcctgaaagataattgccgccaaagaagaggcctttgaatattgagatagtttttttttgtctcacctctttctctggtcctggaaaacctccccatatgaaattctgacgccaacccctctcatagagaaacgagaccagtggagtcctataaaaaaacaattccaaaaaaatctcagtttccacatagaagacaggacattgacaaagaatccaataaagcatatcatctacctaaataactcagtggaaagaggcattggttcactgtatctcttgcttccactagcaacagccaaatcaagatgcgtctcattacccgagtaactccttttacatgtattgcattgtacttgaataccagaggcagcagattctctgtaaaatacaaaacttctataacttgcctctcaagaaaattggaacattcacttattctctcaatccaatttctgaacaaacgataaaaattagtgaaaagtaaaactcacattaatccattaggttgactaatccatgctaaggagttataacagatgggacaagctagaatcttcttctctcctctgttcttatccttcttctcgataacaaaatccacctgcacaccaatcaaattgaatcatctgatattcgagatcatcaaacaaaatcaaattcacaacaaagtagtatcaaatacacgtaaaactcaaacaaaaatctaattatgatttctttcgggaatatcatgataacatatacaagtagaatctgttcctacaaaaagttggagaagaactaaggcacgtacattcgaattcgaatttgtctcaacggagacggaggctgaagaggcgtgagtgatctggaaacgaaaacaacccgtctttgagcggcgtacttgacggaatgcaaccgcgacaaggaaaagcaagtagggagcaacgccgttgagaatcgaccggaaacaaccgtcatcggcatttttcaggctcgcctccgtggcagcctattgagcacgaagctttattaaaggcaaagaaagaaatcacacaaaatgcgtggaaacaagttttaaaatggtaaaacttacaattttggaatttgtgaaagagaagcctttattatggtctttgatgatggatcctcaaataaaggcccaaacattgttcaatataattggtttgggtctaggttttgggcctagtggtttcttcattttcttgtcaacaacaacataaagcttcgaattaaacgttttgggcttagtagattacatgttttttaatctagattaactaattaatcaaattactgtgtatattcctgtctaaccacaatttatttggacgcatgttcttttaaggatccgtgtaaaaaactgcatatctccgtgacaatttgaatttactaatttagttttcgttacgaagaatcaggattaaagattgcggaaaataattaagtttagttatgaaggcctaattgagaggataaaatcacggcttttgaaataattacacttttaatcaaattacatgttgtatgctaaatggctaataaaaggttggcatcacgtgatcacactgcttaaataaaacgttggtaaaagtctttattagttttgatggcttcacatggtcttgtgtcagaaaaaaaaagagaagaatatgattgaccataattctatctaatactcttcaattattattttttccctaataacaactttttttacattctaaaatattaatcccaattccttactagaagaaaagtattcgaatattcccgttaaacgccaacaaattatactaatcacaacaattttctgattagaaaatctgattttgaatttaatgatcatgaccacttgttaatcacacgtggcagcgtagagaagaagcttccagatcaaaatgagatttacgaacaaagtaaagggtaatagagtcaattaacacaatcgattaatcttaaaccaagtgggaagaagaagctgaaaagaaaagagagagactaatcttcttcttcttcttcctctctgtatttttctcattctcttcgatttgtttgcttgctagtgactagtgagtgagagagtatggagagaagtactccggtgagaaagccacacacatccaccgcagatctacttacttggtcgcaagttccaccgccggattctccttcatccgcttctcgctccgccgttcgttcccaccaggtacttgcaccgtttcgaaattcatgaaatttcactctgattttgatccatctggtaatagtatttgtttcaattttggtttaatgtgtttgtagccatcggatgggattagcaaagtggtgtttggtggtcaagtcaccgatgaagaagttgagagcttgacccgcaggttaaacttacttccttatcactatttcatttccaattcgatttctttgaaaattagtttccaattttgtccatagatctgaaagttgaaaactttttgtgaattgaattcatactctgtttatgccatcaccagttagaccatagagagtaatcttcaagaatgacttgaatttaaggattcttgatgatgcatttgacagctt

SEQ ID NO: 37756 - DNA, 2448 bp, Arabidopsis thaliana landsberg
caattaggttgaagaaggggaaacaacaaggaatcgagattgggttaagtcgattggattgggtcgattgggttgagtcgaggaatcatacatgcatgaaatggtaacaagattctggccgaggcgatcgaattttctgacgatcgtcaaagtggagatcgagaatcgtcgagtcgaagaagaattagaattagggtttctattttctagttttcattttaattatttattaatatccaattaaaaactctggggtgatatttatagaagtttcaaaatatggggctatttttcgaaaaaacattttgtttatctgtgtcaatatccctacattgatcaagattaatatttgggagtaaatcattgtattcacctcctttagtttaagcgtcatgtcatacaataataaaataaacaaaatatgtatatttttaattaaacgaggttaactctaaaatgaaagatcaacatgtgaacatttataatgctttggtggataaaactcaacctttgatcagatattttaattgtaaagctcttgaataaataaaactcaactgatacatcaacttaccattggggattttaacaagagtcatgagagatataaatatgtatgaataatataccactatatgaaggagtaatttaacaagatacgcgatattttcagtttttgtatgggtattttgtagtgtgctactttgtatccctttttattattttgtaatttttactactttatctatcctctaaaaaacttagaactgtcttacgttgggactcactatatgagggagtaagttaacattattgaactagttatattgataggtttattcaacgaggcacaaaatctttgatattcttcataatcttgaatggaagttatatacacattattcatacatacacaactaacgtgtttttttttacgtgatagactagttattaaagtaatgagaatctcatactcttctctcttttcatgtcgtcgagaatatcatacttacgtaaaataagcgtaattgtcgctctctaatctcatactcatcgttttcgtatgaattgtttttagctcaaacaagcttccttgaaaatgtaatctctttatataacccgtctctctaaatcccgaaatgtcactctccgttaattctaacggtcatgtcagacgccgtaaccaaaaccgtcgcccctctccgtcgtaaagctaatcctattaacggaaaacacactaacggcgtcaccatcgacggaatcttcgacgaccacaatcgccaaataggaccaataaatagccaaatggaagatattgctcagaaaactgatgacggtggaggaggagaatggacaagcaaagcgtcgtttatgacgtggacgatgcatgacataatttacgtggcgagacaccattggataccgtgtttattcgcggccggagttatgttttttacggttgtggagtacacgttccagatgactcctgcgagttctcagccgtttgatctaggatttgtggccacacgttatctgcataacatcttggcatcttcacccaatcttaacaccgttttagccgctttaaacacggtaaacacatcttttatgacactatcctcaaattcctcgcattatgatattcacatgcaacaaagagagactagttaaattcgacttaattttgcattttttttaatcaattgttttggttgggggtggggacaggtgttcgtagggatgcaaacaacgtatattgtatggacatggttagtggaaggacgagcacgagccaccatcgcggctttattcatgttcacttgtcgcggcattctcggctactctactcagcttcctctccctcaggttccaatccacatctaaatctttctctctgttttcttattgatcgataccttgtcgtggacgtgtgattcccttggcaactaccgtataaaaaagcagtttatattagtgtctccaaataatttgacaatatggactctttcttatatgcaaaaagaatgttctcaaagggctactaatttgtactcccttgattttagcataaatcttgtttcatttacttttacttttgtgttgtaacatgggtttatgttcgtcttgtctatattaatatgttcaatatttttttaaaagaacgatttaaggtacttatttaaccctttttacaggaatttttaggatcaggagtagattatccggtcggaaacgtgtcgttcttcctcttctactcaggtcacgtcgccggatcgatgatcgcatcgttggacatgaagagaatgcagaggtttaggctggcgatgttttttgacattctcaatgtattgcaatccatcaggctgcttggtacgagaggacactacacgattgatattgcggttggagttggcgctgggattctctttgactcattggccgggaggt

SEQ ID NO: 37757 - DNA, 1138 bp, Arabidopsis thaliana landsberg
gcgggtgagtgaccataagaataaactcgttttacttaagctctgacacgaaagagtacaagactcctgagggcatcattattggtggtattttagccaaatcttaggctaaaatttgtgaagaaagagcttttatataagaacttttagacttatataacagcttttttcacaaatcttagcctaagattttgctaatatatttcatataggattttttgtggacacaattcactacactaacgaaattataggacatttcttggaagaggaaaaatattcaaaatccctttaatgggtcttactcacttctgtatattaacatacagagtgcttagtctatctttattttttacatagtttttttaacttgcttacgtcggtttataggtataccgatcttagttttatttaaatccaaaaacaaaatctctacttagctactaaatataatatttttgggcggtactagtttgtctttcttgctggtttatggctcattgatgtagctttggctttgtactcagtttttcatggccatctttgcacttccctgagaggaagatgaagaagaagacgaagatgcagatgactcgctctgagctgcaacctcaacgaattgggtcgtcacttgttcccatgtggtgattgtctgcttaatctgtacttgttgtgcgggtgtgcatgtcaaagaagccttgcctttgttctgactcacaatttgagcgtggatggtatctaactcttcgagagtcttcatcacttgttcttggtaagcttccatattcttctttacctatgaatataccacaaacaaacaaacaaagaattatggaaatgaattataataagagttgcatcgatttttataataaagttgaattattataaagttacctctgctgatttgcttccaattcttgacctcataacttgcatggcaccagatattttcccagcagcagttttaatcctagagaacaaaccttttctttcttttcggggagcaatcatcgtacctttgagttgctcgaagaagaccttgaattcctccttttgtggacacttttttcgaggttcattatgaatgtcgaaacattctttgacggctttttctcacttgtgtcactgttaaact

SEQ ID NO: 37758 - DNA, 1812 bp, Arabidopsis thaliana landsberg
  unsure (1)..(1812): unsure at all n locations
aacttttagaatgaacataagtataaccttaacacatcaaatgatgcaagcttctccatcacatgttacattaaaattctttgaatataacttaaatattcaaaactttattcctataatctcattaattttttaaaattttgtgtttttatttaacgaatgaaaacacaatagtacaataataaatactattttatccaattaaattagtgttaactaaattctatagttattttaaacttcaatggatttttaattagtattattatctttactaaattattttttaaaaattaatacatgctaaatttaagtgacgaataacacatgtaaaaacaaatttgttaattttacttttgattaagaaaaaaatataaagtatggttttcatagttagtaactcatacgattgtgacacgtgttaggtatatcgatcagatgttgacatttgtccaaaatgtttttaacttttgtttcctttaaaagaaatagaaaaaataaaaaagtaaacaatattacatatactaatttatatttatatcttaaaaagttgaatttaattttcttcaccgaaaggaaaattaacaaatttgtgtttacatgcgttattggtcaattaaatttagcctgtattaactttgtaagagttctattagtatggataataactaactaaagtttaaaataacaatgtaatttatttaacattaattaagttgaataaaattgtatttatcattgtaatatagtgttttcattcgttaaactaaaacacacatttaaaaaaaaaaaaataagcttataaaaattaagaaaaattctttctaatgcccttttcatgatgccccttttcaactctacctttttttaattatttttatttctaccctatttaattttttaatgaccattttactcctatttggaaatttttttaggttaacaaaatgaaattttaatattgttcgcctaaaatattctaaaattaatttcccgctaaatagttttttcgcaaaactttttttttggtgggaaatagatnnacaagggattttaaaagggttttaaaagatttacaatggattttaaaagggttttaaaagatttataagggattttaaaaggggtttaaaagatttacaagagattttaaaagggatttaaaagatttacaagggatttaaaagatttacaaaggattttaaaagagttttaaaagatttacaagggattttaaaaggttttaaaaagatttaccagagtttttaaaggtcttgttgaaattctttaaaaatctttaaaaatccttgtacatcttttaaaacccatttaaacactttaaaaatcccttttaaatcttccacccttttaaaaagaacaaaaacgagcaaacttctaaaaagtgaaaagaataaggaagcttataataaacattccaaaaaaaggaaaatatgatatattagtaggtcttgtatcatcaactttattagattagtcaactagttgaactttagatcttactggaagaaggtaaagtatatattatacaatcatgtagaagtaggcaaagattttaaggtgattgatcttccaactccatttgctcatatccaatgattacatagccctcttgagatcttcataggaatcatcttttatcctctgctctcaacatcttcgtgcatcaaactcttatgtgaaaaccgcccctccaacttcctcactccttagcatgctcaaagattcaaaacgaacaaaagaacatcatcagctcaagaatcgaagagctttaagttcaagattgaattcaaa

SEQ ID NO: 37759 - DNA, 2489 bp, Arabidopsis thaliana landsberg
aggaaaggtactacttgcaaatacatggtaacacgaaagtgaatctgcagaattatatagactcaaggtgccaataacaaaaaaagacaaattaatattgttaccaaggcaattaaacgagattcattagtcaggcaatacgaaatcagggtttatgttcgtcacaaaattgagcaaagaaagacgcgatttaccaaatagggcacttgagttctcttcccatcctctccaggtgactagtgtccgccattttcgatcttcactcagagaaaacgaaacgaatcaatctgatgaatcaggaacaaagcgactctttgggtatatagatagatagatgacgaagcgtgtccttcaaagaggcttcccttgaaagctttacagactaaataaaaagcgccaaattttcatctacttcaaaatatttccaatcccgccatgaaaacacgcggtataatcattacactcaattttcgttttgcccctataagttttttagttgcaagatttgaacccattacttttatctatgcaaaatttacccacatatactttaaaattttacaaatttcccctagaagactttaattaacgaagattgtccgtagaatttgaacgatctgcgatgaaacaataattttattttctgcctcaccagactaccagtaatcttggcaagaacaagaaccatttttaaaatggtgaaacctgctacgatctctgactacaatctctcggttataaacctttgacacaagtttgattgctaagtgacaatctgcacatactctaagattcttcacgactgtaatcggtgatctttctggtgtactaattaacataaatgcaatagcaatcttctcactgtgataaaccacagcattctccttctcttcctcttcaacatctacatagacattagaaatttgtggaacgtaaccttctgatctcaatctaccagtcatttctttcagcttagcgtaaatagcatcgctttgtgggtgagacttatcacccataagaaactcatgaactctgtttcctacttctactaagctgtgaccggggacttttttcacaccgtctcttaacatttgtttccgtatcttttgcacatcggaccaacgctgctcggatgcgtacatattcgacaagagaacataatcgccgctgtggtttggttctagttgtaagatctggattctagcaaactctgctaaatctgaatcaccatgaacagtacaagctcctaacaatgttctccagattacaacattaggctgcatcggcatactcttgatgtattcatatgctttcttcacttgtccagctctagctaacaaatcgaccatacaaccaaaatgctcgatcctaggttcaatcttatactcctctctcattctcctgaaatactcaaaaccttccttcaccatcccgcaatggctacaagcgtataatatcccaacaaacgtgatctcacatggtaacaatccctccgttgattccatatacttgaaaagctcaatggcttctttcccaaaaccattaacagctaaaccgactatcaacgaagtccacgagacactgttcttgtccaccatttcatcgaaaagtgttttggcttcttccactcttccacatctcgcatacaagtccaagagcacattgctggaatgcaagtttcgtgtcaaacctactttgatcatatagacatgaactctcttacccaatgtcaaagcaccaatctttgcacaagcagacaacaagctaacaattgtgaacccatcaggcttgatacccttggaattcatctcagtataaagcgctaaagcttcttctggtttaccgttttccgcaaacccattaatcacagagttccaagccactaaatctttctcaggcattttatcaaacaccttgtacgcactagctacatctccacaatttgcgtataaatgaagcagagagttctgaacatagatcaacgaaccaaagccacttcttataacaaccgaatgaatcgtctctcctaatctaacatccgccattgtcgtcacagccttaataagaaacggataagtatgagtatctggctcgaccaaaccagagactctcatctcacggtatagagaaaaagcagagatggaattaccaatctcggcgtagcctctgatcaatgtgttccaaataaagacattgatgggtttctcaatcttggagaagactttgtgagcgtaagacatgggaggtggagaaggaagagaaacaaggtagaagatgaggtgtttccccagctcggcgtctgagattgagactccatggcggattgaaaaagcgtggatttgtctgagtttcgttatcgatgaaacgccgtaggtttgcaagaggtttatgcatttctcgaccatgggaagtagcagaacagaggtttctgagaatggagacattttgctctgttcttgtgggcaatgtcgtcaattgcattagaatcg

SEQ ID NO: 37760 - DNA, 3521 bp, Arabidopsis thaliana landsberg
tgcggtgcaccaaccatctcttcatactctgaagaatctaaaacttggagatgagatggatcaaaaagtctctggttgatgtattgtcgtaacgcaatgaggatgaagaatggcaaagggaacaatattcctcctacaggtatccatgtcactccatagcatatcagaaaatatagaagctggaagagtgtgaacataacaatcgacttgtatggtactatctccacaaatgatgcatgtaaaccttcaagaaccctgttcacacacacaaaacaaagcaaaacatatcagaaagtttataaacatgttaaaagaggttgggatgtataagaagagagtttcagtacttgaatcgacgtccaggagtgatgaatagtaactgaagtctttcccagaattgattcccagggagactatcaacagccatgtaagtgaagtaaccccatagaactgaagttggtatcattctgagaactggtaccgctagtatcaacaatccaacaaggactgattgcaatagattgctcactctctgctcgttaactctaaccggcaaatggtcttcgatatgtacctctggatcaaacttcttcccctttgtttctccacctccatcgtctgctttcatcactgcttctttcaagttttctaactctttcaccactgaagtagcctgaaaagtttcagtatgataagattgatgagaaattaacttcttggtaactaaaaagaaagagagggagtgaatttatgagacagatatggttagatgccttaggggatgtttccatttctataaacacatcttgcatcctcccatagatctctgagttacttgctttttccctcatgcattcttttgctttctggaccattttctttctcatttgctgcaattgatacaaaaaacgtttcagatttcaaacaatgtaaaaactaagggaaaaattattcgattttctctaacctgcttcttaagaactgcaagactctttgtgtgcataggggattgtggaatgaccccattcgaaggaggaagtccaagtagaccacacattaaggtctgaaaatggcggagtaagtagtagatcaaggtcaagcagaagaagaaattactagttcctgtagattcttaccagaaatccaagaagaagcagatcatagtggtaagaagatggttttctcaaattgaattctttctgctgcgcaagctgtgatgctacactatgatcgaagtagtaaagaactgcaatcattgttgctggaatgaatgctccaattatgtagacaattggaacttgaagcatctcctgagaaatcaaagtcactgttcattagtcatatgttcttgttggggtgtgtttgaatttcaagataaagacacacctttacaacagtccaattctcataagcaccaggggaccaaggatttgggctaaaaagtcgccgaggaattccttttggaacatctcctgttgggatgtaggagacaccggtccacaccagaaccatgagtggcacaccatagtcagctactaaacttctaagccagcctggtccaagaataatgttttttttaaaaggaattaagttcttccataacaaggaatatttgactgagatctccccacttgtaagcaatgactgcttaattgattattgatttctctcaagatccatagaataaggagattccagatcatgagaattaaagaaaagttgactaagtgcctcgttacctgttccatatctccatgatcttgcttttctgcttctaagtgcagttatcagaagaccaaaggaaagaaccaaagcaaacatcccatttgcaaatctccaggaaggtaaaaactccacaagtttcagatcctctctcgcaggagcgcgaaattcatcgactaatccctggatatataatcaaagcattagaggcaatcaaaatacaatttattggtaccttaaaaaattgcaaattcttttactttgatggcttgttgcatgaagagcatagctataagaaggccaaacaattctccagctactctggtgaatctgttgataaatgaacaagctccacatatagccaacacaaacagtatcaacgaagtccagacacaaaccctacacatatttaacaagattttaacaccttattcctcacattttaacaagattaacaatcaagttaggagaaaacattaccatccagaccaagccaagaataaattgcgtcccagttcaggtctccctttagcaaagttaaacatgaatgtgtacataataacagttggctctgcaactccgagtataagcagaggctggcctccgatgatcgagtgaatgattccacaaatggctgtagaggccagtgtctgaacagcggtaagaactccatctacaaaattacagaatcttattcaagttgcgatcttttgctactaacattcacaaagctgataactttttttctattcagaggagaagattaaataccagtgcttcgttccaactgttcgccgaatgaaataacaggaatcgcagacgcgaagaatatgtatgtggtaggagccagaatcctatagaaatgagaagtcatataggtgaaaaattcattaaaacatataaattttgaaaaaaaagtaaacaaattgagtacctaaacccagctttgattcctccggtccaatcttgtttgtagcacattaaccttcctttaagatcattcttgataccttcaaacggaacaaaagtctcttccatggtggcttctctctgtaaattactctgtttttaagttactctgtttttcgttttctatcagacaaatcgtcgaacacttggagagcttctttggttagacactcgcgaagaagagttagaagatgagtttaaacccgatatgagggagacttgtgatggttactacttgaaacccatatcagagaacattctcaatactacaagtttaggggatagaagaaaaatgcacaaaaatccagacaataagagctaaaagcaaaaaaccaaatattaaggagctcgtaataacaatgaatctcgttgaagaagattgggaatgattcatggaacaaatttacatgattttttttgagaagcaataatggagaaaaaggggactgtgtattgtttggatgacaagaaagtgacgaagagtggtttcagctgtgcaaattgcaaagtatatgtctttggtggcaagaaagatgaagccgaagcatccctatatataatactaataatgacggacattattaacaaatcattaggaaggattaacgaagcgcgtcaaggttttcgacggtaagcttataaaaaaaatactataatcatttataatgtagccagccaccaccgttacctttgaccttttattgtaaaaatcattattcatcacatagttacatgatttataatgagagaaaaactaaaaaattaaagttatagattgtgtattcaaatctctatctttgaaaagtttaattcaatttacgttattaaaa

SEQ ID NO: 37761 - DNA, 4489 bp, Arabidopsis thaliana landsberg
cggatggatgatctatccactccttatattctcgaagccaaagaatacatcgctctttcttcaactgttcaacttgacgtgattagaccaaagacatcagcttcatgatcagacttgatattctcctctttgctttgagtctcgggttcacatgaagcagactcttgatcagaattcacataggtgctctcttcctcactatcaatagacgcgagccggtagattttcgtctgtggaaggaaacaagagaacaataataagcttccagtaagtatttataccacaaaagaaacaagatactgaaaagcacaaatagagaagctgaacgcagcattgtgcagggctcacacagttctccataaagtcataccacattaccatttatcacacaggaaaaaaaggatcgctacataatatatgagtgtataagtacagtatattgtaaatggacttgcggctgtttaccttttttctattgcagcttccttcttcattatcttcctctctagctggagaatagaatccgtaacttgcaggttcactttgcctatgggctacaatgatttgcctcttccaaaattctctagttcctatctgtttgccatctagcttcagctgaaaactcatataatacaaagcattacaaatcaagctcaaaccgacatggtgaaatatctgtcttcacgacaagatcccagggtctccaaatcaagaataataaaagcttacttcatctgggagagcaacgtagctgaagacatgtgccctgtaccatcgagcacaacacactgggtttccttccagccacaattctttcagttgtgaaagactccaaaggaactccaattctgaaaagttggaaataatattgtaggaaacatcaaggccttggagtgacttcaagttctcaatcccacgcaacgtagtaagagcgttgttcctcaaaacaagttttacaagatgacaggatacctgcactgtccaaaaacatccatatattggtcccaaggatgaaaccagaataaaagcttcagcacagatacatgtttttcaaaataaaactatcatcttattcaaactagggagggaagctagacaattcaaatgactataagaataccaacttcaaggccaaaagcggttactacaatatcaaatgtaagctatgcatggatatggtgaagtctgaactctgaagtctcccacctggctcaagtaagacaccgttctaagatgattgaatcccagatcaaggtgcttcaatttggtgcatctccgaagattatccactttgacaaacttgtttcgactgagatcaagagactcagcagctggaagaagctgcaaggactcatccatgagcacaagacggttacaagcacaagatatgaccgccaacttattccactcgggcgaattcgttatctcagcaatcctactagcgaagacatgcctcagagcatcctatatcaaaatcgaaatccacaacatgcaaaaccttgaatcactacattatatactagcgttgaatttctctatacaagctaaaggaagcaaaactgacagtggaattatggcagatgatcttttccaaagtgtgacggagctcgatcaagcctttagccggagaagtagacaaatcacagcgacggagttccaaaaccttaaggctaccaaagggaaaaagagagagaggcgtgggatcacgagccggagaaggaagagtggaaacgaccttaagagaagtgaggattctgagaatacgacggagctgttcgagtgcgcggtaatcgccgaggtcggaaacgtaggcgcgaaggtaatcaacaggagcattggagagcatgcgttcgagttcacggagagagtcaagacggagatgaagatagtgaagaccagcaggattaagcttgagaatcatggtttcttctagaagagactcagcttcgtcttctaaaaacttttgtagcttctcaacatagcgatctcctgtcacaattgccatttgaaatcggggaaattcaaggggtttggcttcgactgaaagagatacgaagaaaggaatcaagagagaggaaggtctagagagggtagaagaaaggaggttttggagggataaacatagaaaccgccatggctgatgcgagagagagcagcagcaacaaggagaggaatacgaatgattggagaaagaaaacaaaatgattaaaaaaataaaatggtttaaagggtatatttgtctttttgtcacatgcgcgagatttcaataaaaacacacctggctgacatgcctcctttcaagaatcaaccctgatgtctttctttgtttgtttgtgcgacgtttttataggagtattgctgtttgtaaatatctttccgtgaatgattgaccgtcaaaaatgcatatctctacaaatcacattccaatgctacatattaaacatatccaaacaaaaacttatatccatcttacgatgttaatgtggatgcaagatttacacttgaattccgtatactggtttcaaaggattgccggtctagatatctggccagattgttttgtgaattttagcaccacaatcgatgaggccttcataaagtcatggcagggagatatggctgcaaattcttggtttaggcaaaaccaatcggttccgattatcgaaccgacccgaaccgaaatcagatttcccaaattaatttcatcgatcggatagaaggaatatcttcggtttatgccgataaccaaaaaattttgtttgatcgggtcgatttaacggtttccaccgaaatcctagggctagaaaattcccaatcccatacatcatgataaaaagacgtccaaacgtccaactttcaagggatcccggacttcaacaataagtaatttagttttctttttttcatctatatagagcacaacggactaatcattataggagagaacttgatcccggattaagtggtttccggttctcggtagacttatcagtgtcactacattgcgaccacatctcaataatgaagtaataacaagtcgtttaaccgtatgttgcagcaatgacacaagttcaatacaaaagtacagaaggttttgaaaaaggcattttccttttatcataaaaatatttccttttatcgtgttatgggtataattatgccaattattttatttcttttcatgtatacacaatctccttatcaattcgtttttgtttacataacaaatacccgaaaagaaaacgacgaaaaaaaaaaatacccgacctttatggtgagaggattacaacttcgatattactctttactctaaagggataacatatgaacttgacgagaactcctcaaacagaatcaatggcgactactcatgcagtgatgggtgtgatcaggtcagttatgcctgcttttcgcaataaaaacgacaaaatcgctttcgtagttcacgcttctttagccgtttcgggtttcattctcacttcaaccggacgtcctgccttcgcccacgacgctctgtcctcatcgaccactcagtgttagtattggcttcgttttagggtttattttttattttttacaagtttttctagggtttaattagggttcggatttgatcgatttttttatttttaggtttggttgggattgaagggtggaacgaattcgacgaggagtatgcgtttgtttataaatgtccggtgaagagatatctggttaagtgcttggcaatgaatgataaacttcttgttgatgcaatagctgaagatggaaaagaatttggccatctccaaattgagtatgtcatggtttctctttatctctttacttttgcttgaatctcaaggtactgaagctttctatctcttttctttttttatattagagttgggaattatattgatgaatccggcgaggaaggcgattacgatacacaattcaagaattttgacaagttagtgactgagttgaagagtgagattttgtgtaagctaaatactgtttccactacaaccaagtccagctctgagattaaatgaagagcctagacattatgttggaataactacatggtcttcctagaacatatagtgttttcgtgttccagtcgacctggtggatgaattgtgttaaggagtataagtgaatctcttataacagggctttgaattcttcgaataaaggaaaaatgttcaatgttaagatttatcgttgagtctttgtttagctttcgcttccaaacgatataacaacagtaactaaatcttttaccttgtacatttttatacaattactgtatgcttactagttgtattgttcagttcaatagttcagaagtagaattgatagagtaatgtaatatgtaagacaaatgatgtgataacgagtcatctatggtgtagtctggaatctctcgcccctccccacatgaatgttttaaagtatgcataaagcaaatgagtcttgacctttgaagttagaagaattctgg

SEQ ID NO: 37762 - DNA, 4621 bp, Arabidopsis thaliana landsberg
gtttatgcgaagtgtaaaatgttagcaaaagcgagccctacatcacctaattatagtccacttcaaagcgaagctgttccatagataagacttcaccaatatctcacacaatatataagtatagcagtcttctaccaccagaaatgtcacacaactcctaagccaatcttttctttaatcaagtcaatcttttcttcaatggctttttcattaaccagagtaaaccgagttcttattcaagcatgtgaaacgaccccatcagtagtgttggatctgtccttaatcgataatattccggttctacgatgtttcgctagaacaatacatgtgtttactcatggacctgatgcagctagagccatacaagaggcattggctaaagcacttgtctcttactatcccttgtccggtagattgaaagagttaaaccaaggtaaacttcagatcgattgtaccgggaaaactggaatttggttcgttgatgcggttactgatgttaagctagagagtgttggttatttcgacaatctaatggaaataccttacgatgatctccttcctgatcaaatccctaaagatgatgatgcagaaccgcttgtccaaatgcaggtaagtatttaatctacaatccgctagaaccggtttgtttgacaattagtaccgatcttgaattatgaacggtagttttcaaaatccggttcaacggttaataaaaagcagttataaatcacctatatccaataactcaaacaagagagagtcttgatcaaacatgcaacaacttaaacagaaacaaactacttgcattcacacaatctctcatacccatcacattagatctacaactacatacactagtcatactcttaagaaaattaagctcagtttgaagcaagtagtacctctttgaccagaggctggagcttcagggagaccaagaacctgtaaccttgttttgatcacatctaatggacaaacaaaagtcgccgcgatagcccctgaaaaaaaatccccaaatcaaccaaacaaaacaaaaattcagctacccgaatcaaaagacgaacttgaaaacagataattgaaactaacctgcggtggctccggcgccggcgtttgcagcgacttctctaatactccggtaatcaaaggtagagttcccatgttcaatcatcttaaaaccctagaatctctcaattggggggaatctgactcaaaattgaaaacgagatccagcagtaaatgataaacccggccacgtgaatcgacgattatatacaattctcgtcgttcttgacattgacccgacccggagaaaaaattcgaacgtgtagacgggtaaaggaagagactttgtttgcgtatgatttaggcggtccctagtcgaaaggatcgattttttttcttacagattccgaagaagcacagttggtttgagatgacgtcacacatttaacaacaacaacacacaacccaagaagaaagaaagttgaacactttttgcctctatctgattatcaaattataatctgactgaatccggtataattcgatcaaaccaagctaaaccgtaacccaacggtttaaccgatttggtttgggtccgcttaaactttgaaaaacaaggaaaactttcatcggcgagcttcttcacacttgtgaattccgattctgcagaaatgggaaatctgaaacttgctttgatcatcaagagccctagagacgacgttgagttcctactcgagaagcaaaaacagccggcgaaatttggagatgaagcttacgattcctttgtcgattccgatctctgggacttaccgtcaacagatttacaggctctggaagacggagtgaggtccggatttagtatttctatacttgactcatgctcggaggaggttgatttgatgaatttcgacttcgaatccacactgattctggtaatttatgagtttagcactgtcctctttttctcattgtttccgcgaattaatgtttccgagtaaatgcagctgctggagaatttagggattgatattagcgatgtaggagagtggagattcgtcaggtctgtagaagagcctgagtttggacctgactcttgtgtccgtacttgttttatctccgggaagctcttaaatacagatcaaagtttacaaggtcgtccttaattcgatagtatacagtattaatctctcttgatttccacattttcagagcttatggaaatagcttcactcgattcgaaagaaacgttgagaattggaaactgaaacaaaaagttttgtttttgtgcagacaactgtaagtggatgtcaatggaatcatgcttcgactctcttatagatgtaaaattgggcagtgatcgcgttggaccattagtactacttggacttggggatggttcccgtcagtctatgaagcataagttgtcatcttctctggctatccaggtctcttgttgccatactatctaagtatctatacttgtcttcttcatcttacttcatcaaagcggttccatcttatgatgttgttctttactagaatcctactttttaatgtctttattatctcaggaatatccacctggtgttatgattgtgccgatgcatagcaaaacattgaaacctttcaggacaacaaatttggttgtgtttgctccagaaaatggtttgggggaccatcaaggggctgattttgtagctcatggggatgcgttgatagtggatcctggatgtctctctaaactccacgttgaggtttgtccctagctagtagctacgtgttgttttcgctcttcatactatattctttacttctttttcgaatggtacagaagatctggtctttacattttgcattttaaattattcacaactgcatttttttttgtcttaaccagctcaagaaaatcgttgatgctttacctagaaagctaattgtctttgttacacatcaccatcgtgatcacattgatggtaaagatttgttttttttttctcgttctgctttggtgtggcttcttttgtttttatttttactctcttgaaattctaaaacatttttatgccattgccaatgttattcatcttcatctctgcttcaggtctttctgctatacaagagagcaatcctgatgctattctagtggcacatgctaaaactaggcatcgcattggtatcattcttctatattgttttccattcataaaatccaccttctaatgttcggatactctctgagtccaggtggttggtctggtaactataccccagtttctggaggagaaaacatctatgtcaacggtcaaaaactgaccgtcatttttgctccggtaccatccagctctttaaatccttgatagctctcagattggctgcactgctgaaagtatacattttgataaactcttaactaagtaaaatactccagggacacacagatggtcatatgtcactacttcatacctccactcaatctctgattgttggtgatcattgtgttgggtaagacaagcaactaaaatttatgttgctataggctaattcaaatcagtcaaatttgattaactcaagaaatgttaactcaccattttgggttgtttcagtcaaggaagtgctttcttggacatcagggcaggtggtaacatgacagtaagtataagcatgctcagtctgttttctgttttgaatacttcaatgcaaacgtagtgtgagggtttacctgtggtagattgcgatgttttctagtagcgttttgtttccaaatttgttgtttcaatgttaggtgttgggtaagatagtaaatgcattttttattggagagttccttaatttccaattttccgttgcaggattactttcagtcgacatataaattcctggagctttctccaaatgtggtgattcccatgcatggaagggtcaatttgtggccgaaacacatgctttgtggatatctcaagtatgaataagaatatgctgtagtggataatctgatgtttaaaaccctgttactgttttgtctatcagtttgatcagataaaagtagagtgaacttattaagatatttgatacattaatatataaaggaattttgatgggaggggtgatcttgttttccagaaaccgcagaagcagagaaaaatcaatcctaaaggccactgtggatggagctcagacgttatatgacattgttgctaaggtgtactcaagtgtggatcgcaaattctggtgggctgcatcatcaaacgtaaggctgcatatcgagaagctggcagtagaaaacaaattaccagaggtaaaactcttctttaattccaaatgcacacaaaaacttacattcttaggaaacatatcacaaaaagacaagcttagaaagttcttagcaaatgttactagcactgcttcactactcattcttattgtattgatttgatccagggattctcaatccaaaagttcaaagcaagttgcggattacgttttgcgatacggtgtacagtgggttatatcattagcaagattccgttcaagatcaataagccaggtttcattatgtcagtgatggctgcagaagaaggatattttcttctgtacacatccaaaaagaagaaccaga

SEQ ID NO: 37763 - DNA, 1020 bp, Arabidopsis thaliana landsberg
ttttgaaatttcgttcgtccaaccatacatcccctactaagttatactaccgataatgaaacttatagaaatcatgaagtcgcgtaaaatgttgggcattaaatacggataaatggacttaagcaaattattgtggttgtggttgttaagaatctctttgaccgctcgaataattatacatccaaatgtaattaacctatgcaaactcatgcatgcacgtggaagcttctcattctcataaaccataaaattatgtacaaatgtaaatcaaatgttagtgatgttctaagcttttatttttcttttataatttttatttagttgatgttttaagagaatacacacttaataaattatttaatttttgtttactttaaactaaaatatcatttattatttaataaccaatagaaaaattatctgtggaataaaaatcatcaaaaccaatgaaaatataataaattttgcattgaaaatttaaaacatcatttatttaaaaaccaaaatgaaagcttaaaacatcatttataaaagaataaaggtagtattaatttttatttttagtcagtcaagtgaacattgtacctaactgaaacgccttactaagtcgtacacgagtaatttcgatagttacgaggtcaagggtattttcgtccaaatttggcataatggctaaacggtagaaactgaatttcactttgccaaaaccaacaattaaaacttggtcttcggacttaacccgtaatttaccctaaatagtatgttcttcaatttttttaaaaactaacctagttgcatggacactcaatggatgatcaagttgtcattggatcttactggatttcattgagttgtcatcgattcttcaccagatttctcgcattatcgccggatctgcatcagaccttttcaaattaatcaccagaacctagccagattcttcataacattaactttaatcgtgtaaagtttgttatattgttggttaactatattccgaaagtgtgttcgagtgttgca

SEQ ID NO: 37764 - DNA, 6011 bp, Arabidopsis thaliana landsberg
aacatgccttgacatcttccagaagtttctcaccctttctgtttcattcttcttatcatctgcatcctttaacaacgactgtaaccttcccagctgacgctttagtccatcaacttgctcatctataccattcaatcgcgcagattctcgactcagaagctcccagagcttctcaactccaaatgatacaactgcctcagccatactacaacaaactacaaaagacagatcaaagcaaaacaagcagaaagaaaaaaaaaaaatatatatatatatatatatatatatatatgaaactaagacaataacaacactcttccttctttggaggaagagagatcaaatttttcaaagtcaaagtcaaccttatccagctaccaattcattggctgagtgttgtccacagttttctcttttttgattcttcattttgataaaatcgaatatattctaaagggtacataaagtcaaaatcgaacagagtctaaaacaaaatcattggcaatgccgtaaaccaaaccggtcaaatagccattccatacaagagctaaatagcctgattcatacaacatctaatgtagtagaagagtttctatttcaccttccattgctcgaattccatggagtttaacaagaaggagcttgcgtttttatgaccaccacctccgaatcgctgtgaaaccggtgttgtgtcttcttccacaacactcctcaaacttattttcagtttattctcatccccaagctcaggaactctgtaaacaacagctccaacaccttgtaaactcagattcttgctcttctcagccaattgattccctaactcgcttctaagctctgcaatctcatcagcatttacagctaaacaccgtccaaactcctcatcacctccaagaacaatctcatatgactgttccaacacctcgtgaatcagtttatgtttcttggacaaactctgttttcctctgttgatcacactttcatgatccaatgagagtagctgatcaaacaaagattggttcttattgaagtcgtattcaatctttaagtccaatattccactgttgaaagctttgctctctggtaactcccacttccatatatccgcgtcttcaatatactcgaaaacacgtctcattctcttgaaatcattcatctctttgcaacttcctctactttcttcaaccaacttctgagtaaaatagtcaaacgcaatagtcgcaccacttctctctatatccaaaacactagtaacgttcttgcaagtcaaagagacatcacctaagctatcaatagcggttttatggtgatcgaggatcacgacattgtcgactttaggagagacttggtgaacgaaacctggaggtccagtgaaatcaagaagatagagatgactgatgtcttgaagtggaagttggttgattgtgattggagagtagactgtgttggggaagaacagtgaagggattgactttgctgagaagtagagatgagcagctaaagctgcgaaaacaccgtcatggcaaggataatggtaaagcacagccatcttcttcactccaagattcattcctgaaacctaaaagatcaatactttttaatacacagaacgattagccgaagaggaggaaaatttatcagacaactaagaaacactctggactttatttagggttctgatgaagtacaaatgacgaaaacacccttatatactcgttgaaaatcaggtagcatccgtcaaaaaaaaaaaaaaaaaaaaaatattagatagcgaaagaatgcaactttatatgaaaaaatatcaatcaaaaagtagtaataatcatatgcactttttctaataaaagagaaaaatatatatataacttgttatctatatcattatttttttcctaaataacaattaattttgattatttgttaaaatttcaaaggattgtctctttaatataacacaaaaaatgtttttttttttatcataatgctttgttgactatatttataattgtttaaaaatttgaaaattgagtctatactcattataactattcgtttactatattttaattatgatctcatattttcattacaatgttttttaataatagtataaatcttaataaatgcttatgagacttatgattttctattataaatttttgatttattgttaaattatcttaatctattgtgacttttcttttgatatttctttatttttatttttttcaaataaatttacgatgtaaaattgacagtaaggtagttgggtagtggttgtcaggttgatgaattaggagtgtctatggggaaaggatcatgtatcgtccttggaaattttaaataatggaaaactatttaattttagatttaaaaaaaatggaaaactatttaatatggtatatttttattctcactataacgttagtatgggtaaaattgtctataaaatactatattcttacgaaatgtgataaatatagaaagaacttttaattgtgttatatttgtaaaggttttgtcggtatcatcatgatatttatccaactagaagcaataataacgttgcaacttgtaaaaaaacgacaaaaggggatacttgtagaacgttgcccttttgatctctgtttttgattatcacgctcgcagcaaacactttgagtttgattatcactatgtccgtgaacgtgttaccttgggatcgttagttgtcaaacacattccggcaacagactgctgatatattcaccaaatcgttgccatatcaaactttttgtgatcaaaaatgtgacacgtcggatcaaacattggcgagccaaaaactgccgtttgcttcaaaacaatggtcgtcaactgcagtaaacgtcggtaaaagatcgcatgtgctccgagttccactatcttaccactatcattaatataacacgttaacacgacacgaacagtactgttattgaaggttttttaatttattttttaaatgtttctctatcaaactttctaataaaaaatagatgataaaaagactgtcagaccgaaaatgggaaaataataattaacgacttttctgtaaccaaattaaaaattataatacatctatcaagcttagctgtatacatgtatatgaaagagggagaggaaggagaagaagaatatcacaactatccaaatatcgtcttagtagcagccatgaattcaaattcagtcggtgaatttcgtgagggagaaatcgatggaaacccatttctcatatacactttgttatctcaaaccgagaacccttcttcccgtgaagcagctgttgattccgatggagggactggggacgacctctctgttgagcctctgatcctctgtcctactttacgtctcaaagttaaaaatttaaagccatacacgagtgattcagatcgtagctttttcccgttggttgtttcctctcacttccctaccatacaaagcggtcatcaacaacccgagtatatgcttcaatcctacagctgtaagctccctttactccctctcttttggtgcgacaataaaaaccctaatatttacgatttcatttgccgtgcgtgcacaaccatagagcaaggcacaagctattacgtttgtgtcacatgtggcgaccagtttcacaaagaatgtgtggagtctccacttgaaatcaaacacccttcctatccttttcaatctctccaactttatagtcctccctttgcccttgtgaattgcgtatgttgtgatataagtttccaagacatgatttatcattcttctacttacaacttcactctgcatatattgtgtgcattcaacccaataccctttgttatagatcacccaaaaaggcatccccatcctctcacctttttcccaaaacaatcttttttaccttgccatgtttgtagcctcattaaaggacttattcccacctatgtttgtgttcgatgtgtctttgtagttcatccagaatgtatctatttcccgtatgtcataaaaatatcccgtcaccaccactgtatatcttatacctcctctcttccatccggaacatggtcttgcggagtctgtcgtcaaatggttgacaacgactatggagcctactcttgcaacaagtgtgatgactattttgttcattcaagatgcgcgctacggagagacttatgggatgggatagaactcgagggagtatctgaagaacctgagattgttgttgagccatttatcacgatttctgatggtataatactccatttttctcatggccatcatctgaaactcaagatcagtagagtctacgacgaaaaaaaggtttgtcaagcgtgcatccttccgatctatgagggtagctattattcatgtatggatgaatgtgacttcatccttcacgaagcatgtgcaaatgcaccttgcaagaaacatcatgctttgcgtcctcacccacttacactaacggtcatcactagtgaatatgataacgaaggatatgataaccatttacgaggtatgttccgctgtgatgcttgtcagcgtaagagttgtggtttcgtctatgagagtcaagcaaaagatatgtttcaggttttcagactagatctacggtgtgcctcggtttctgaaccatttaaataccaagtccatgaacatcctttattcctagctttaacaccagaagaagaagaagtggcaatatgtcagatctgccatgaacagtggagttatagaaaactaaattgtatcaaatgtgattatatcatatgtttcaagtgtgctaccttgccatacaaggcaaggtataagcatgacaaacattacctcacattccaggaagggaaagatgccaatgatcattcaggctggtgtgaggtatgcgaaagcaagatagaatattcaagcgaaggtgggttctatgcgtgcgatgactgctgcaccactcttcatgtcgattgcttgcttggggaaaacatgtatatgctaaaacctggtcaaaccataatgtttcatgaggacgaggttcaaattcttcgcaacagtaccatgtctcgaccattatgccatgatgatcatgccggacaccgttgtcgatccagagtagtttatgaaaagagaaatatgacattttgttctttacgttgtttgcattgaatcttgtaaatgtcatccctagtggctttgtcattgtcgtctttgttagctgcttttctctgtttttttttcctttatttaaacggattgtaatcttctacatctcactagtaatttcttgtttcttatcttttccatatctgtaaattctatctttaatagctttaacggacctgcatcgtaaacgtctatccgcttccggtggctccataagcaagcacgatagcgttgaaaccatgaaagatccaaggaatcaaagggcttacttctctatcgaatatctgcttcacattatcactatctctcccgtaaaacgcatccagctaatagctttcgctacgactgctccaaatatcaccgaattaccagctatctggatctgatctttgaggtgagtgactgttgtttgtattcaacttttgagttcgtagtgatccgttagagacacctcctactccaaaaaggctttttattgggcccatccataataacgtttctccttttaggtctaccgtggggatccggtgaataaccaaattccaattgaccgtaggatgaattctcctcatgatctgacgatccagaatcattgagtatttttcgtgccccatgcaagcgttcaagagaattcacaaggaaaaaacgtggtctaatcaaattgttcaggttcctcaaggatcggttatcgaatgacattttgttttggtttaattagatcagtgtcggttaatatgatgtgatttatttttcaatggatccccactatttaaagagcttgcataaatggcaacgccaattgcgcaaacacgtgataaacctaatcattggcgttataaatagtaaaataaaataaacgaagggta

SEQ ID NO: 37765 - DNA, 4916 bp, Arabidopsis thaliana landsberg
gctcagcctctcgccatttcttctcccatcaagataaatattcgtgcttaacattttttgattgttgaagtcaagctctaaattgagtcccgactcaaaaagcttagttcacctagcatcgagctacattcaaaagataaaaataattcttgcagttaatccgagctcaacgctcgcagtcacacttataaattgagccgagctcaacgcttgctattatgtgaaaatgtttcacaaaaaccgagacctcgtcttgctttaagtcttcaaaacaggataagccgagagttcctcgcaccttaaaaaaaaaaaaagagctcaaaagcacacgtatcttgctaacccaaatgataatggcatgtctgcagctcatcgcaaatgtttttttcagctcatctgcccggctatctcgcagatcgcaagacaaaccattcagcaacctatatcccagatcgctcgtcagatcatctgatagcttgccttgcagcttgttagcaagatcatttggtaacctatctcactgctcggctcatcagtcaggtcatttctctgctaggcattcagatcatccaggagagcatcccacaactcaacaactcatgaggtccatcagactacctaactcacaagcttagccttgttttatatcatcgacgcgtgccaagctaaactgacatatcttggaggttcaacggatcaaattttaattcgcatcttcctaaagtataagccgaatattcacttcttttaattcggaaaaactccctctttaaattatacataggcctactgggcataagccgagagacgtctcgcgcccagtacacgccgaatacttttatttataaagccgagctcagtctcgcacttaacatctaacccgaacttagacacaaaaaatcggctgtgacgtcaggtgaaaaccagtccgcccgaaagccgagctcaaagcttgcagatggcttataatttagtcgatttaaaacctaatttcaagtttgggaatccgagattgttaatacgtaatcaaccgacgaaggttcacaaaaaaaaaaaaaaagaaaaacatgaacttgttcttaaggacaaaaacattttattcaaatataaaagtctgaaagataagagtggtcgacataagtcaaccgacctaaagccttcctagctcccagttcgtctgtagctttcctagcccgcagttcgtctagctagcaactcgtctgcacttcgcctagctaacagctcgtctgcagcctttctagctcccagttcgtctgtagctttcctagctagcagctcgtctgcacttcgcctagctaatagctcgtctgcagctttcctagctccctgttcgtctgtagctttcctagctcgcagttcgtctagctagcacctagtctgtacttttcctagctcacagttggtctgcagtttctctggctcgtagttcgcctagctaacagctcgccggcagccttcctagcttgctattgcccgcctaacagctcgtcaacagcttggagttcaacaagtcgactagcagctttcctagctcaacttgtcaacagctaacattttgagctttttctacaagacaagtcaacaatgtggagagctccaaagaagtttacaaagactccaaaattccagatctcaacttgagcagcatcgcatgtctccctccgttaaaagttctgaagcagcacaaagtaacctttgctttcgtcgtcatgaattctgatcgccaatggagcaacaaaacaactcggaaaattacgatattttctggaataatcagcaacagtcacacgaagccacagaaaaaagcggatcacgatttgaggttatggtttgagagttatgatcgtttttccaagacaattcagactgacaccacttgcaaacgaccaacttcgtgagcaattttccaacattgtacgacgaaccaagagacgggaaacatatccacagattgcccagacagacagctctccatatagtccaatattgttccaatcgaagcgctgtgccgaaagttacatgcgcttctctccagcagatacagcaagacgaaacactgatcaaaagttacaaaaccagtcgactttgaaatcaatttccaggaagattccgacgaactgcgtggcgtgtaacctatccacggaatgccccgaaaagtagctttcaaaagaagccaatctcgcctcaatcagaaatttacactgaaggttatgactctttctttgcaacagatgcaaccagcgaaacgcagatcctcactgcacgatcaaccaaattagaaagcaaatttctagcaatccaaaagaattttcatggcgatctgcatatcaattcgaagccccgaggctcagctttctagaaagaccaacctacaccttaacgtcgaattcgacaaagagttatcacagtatttctctctgctgcaaggtaatcactagttgataagaacgactcttcatagacgaacaatgcaactctacctttggaacagcaattctgagctcagcctctcgccatttcttctcccatcaagattaagtattcgtgctttacattttttgattgttgaagtcaagctctaaattgagtcccgactcaaaaagcttagttcacctagcatcgagctacattcaaaagataaaaataattcttgcagttaatccgagctcaacgctcgcagtcacacttataaattgagccgagctcaacgcttgctattatgtgaaaatgtttcacaaaaaccgagacctcgtcttgctttggatggaaaagagtcattaatttgtcgcttaagataattttgttagagtaagattatcaaaatggtattttggtagcaagtataaaagagataggaaatctcggttgaaatattcaagaaattgtgtttttagttattatagagagatttatcaaaatgtttttgagttgttaatattattgacaataaatttgtttatttctaaaaccgaatcgtaagatttttcgagtattaaatattcgtagagagatttgaggaaagttttgttaaatgctaaatcttttattttctatttttaaatcttttataatagtttgagacttgggttaattataaatagagttattagttacctaagaggggagaatctaaagaagatataaggagataaattcaatgataatcgtgactacaatattttaccaaaagaaataaaataataataagaaaaattgtgactagaaaaaccttcatcaagaaaaagaaaaacaatcgtaactcttcaatatattattctgacagaaaaaaagaaaacacacaactacataatatcaacgtatggttctagaggtagatgaagtggatttttttttttttcttttctttttttcttctgatatggttctaaacttccaaagatcgtggcatcgtggtttggtatgtgagaaaatttaggatttctatttttaagaatatcttttttttgtggattttttttaacattaccaaaacttctttaattaatctatgtggcagaatttgattagatatgtgatttgtgatttatataaaagataacagtagattccattaacatactagaatccataacggcaaaatttaagaatcctaacaataatatatttttatacgaaaataagaagatattaattacatattaaaaatcagttactttaaagtttaaacttatccctaatatttagctccaatcttttgaaggaaaacgtgggtataaatgctaacgaaaagcgagagcatcctcttctatttatttattaaactaacgagcattattgtcaggtgtgtcgaactatgtctagtgcatattcaactgccaaactactctttctcctgcttttggtggaggcttcattgggtcgatacctacctattatacctgggttagattgtaaagaaagcctcctaagattttgcaattccgtgactatccaagcctgcttcggtactcccaattgtaattctcgattctacctgaataatattgtaatagagaattgattccagtaccatgattttacttttacatgttttgattttttttgttttttattggatttctcttagattggtttccagacggaaatgtgacgataaggtgggatatcatgaatgaaactcgaggtggttacacggctaacgttacaatcttcaactacttgaagtatcacgacattgaaggaccatgggtgttagattggatatgggaagaccaaatcctattgagcactgtaggtgttcaaagtagtaattttacgatatacccggacgacagaaatagggttatgattgtggagttaccgccacaaactgatgataatgatgaccagctaatcataccaacttctagcaaggacggtgggattcctaggtttagagaagaacatgacgaccttgcaaaaagctcttttacgttccaaattgatgttggccgagctaatctaaaatatcatcttccggcaattgatcatgtagctctgaccacaccaagagggacatacatatgtgataaattgatgaaagttactcaaactccgggttatctgagtaagttcatccatgattgcttgccacatcatataacctagctcttatgtatatttacaattttacaatcactacattgattttgtagactcgtggagcacgagttgcggtcagtggcggcgctaggtagatgggagtggggtcacttgccccagtaagttttgtattttatctgatttgctattaagattaagttacaaaaatacttaaaagtttagaggttgacccagttaacatattttcaaatctctctttttctcttcatattacatattgacctcattagaatgtgggatcaatttttatttgcggagttttcatggggtat

SEQ ID NO: 37766 - DNA, 1182 bp, Arabidopsis thaliana landsberg
  unsure (1)..(1182): unsure at all n locations
tttttaaaaaatgtagattctacttcttattgagtttatgaatgaataacatttaattcagttttctaatacgacatccaaaagtaaaattcagagacctgaatcaaatcgacatgaggaagagtctgaaggaaatcttcaatgaacttcctactcaaaggagctgctccagaagaaacttgcttcaaacttttaaacacttcaccacaaactccttttgccttctttgtcaatgccatcaacataggtggaacaaccgggaaatgagtgatcttaaacctttcaattacattaacaacatcagaagcatcaaacctcttcataacaacnnnnnnnnnnnnnnnnnnnnnnnnnnnnnnnnnnnnnagtgataacccgtagatatggcacaaaggcaaagctgctagataaacattactcgatcccggatattcgtactgagaagcttcaaacctcacaaaaagctccattgatgctatcaaattcctatgagttaacaaaactcctttactagctccagttgttccagatgaatacataattgcagctacatcgtcttgcttaatcaacggttttggtacaaacccaaaactttctttcataatggagtaaaacttcgggttttcgatacgaatcgaatcaaaatcgtaactttcaggtacactaatcacactaacccccaaagaactcagcttctcaacgttttcagtagaagtaaaagctaatccaacactacactcactaacttgcttcttaatctctcctaaactactcgaaggattcatggtagtaacaatagcaccaagcgagatcaaagagaggaaaatcatcggaaaatagacggaattaggcaagacgagtgatacaacgtcaccttgacgaacacctaaaacgtgatagatcccagccgccattgattgaaccataatctgtagctcagtgtgagatattgagaacccggttaaggaatcgatgagcgctgtatcgccgtggtgtttgtgtgagaaaagagcggagacggcgtcgagatttgggtcgaacgggaggtgtagggaagggaatttgctggtgtagattcctgttttagaagagaccaaaagggagggttttggtgagacgtttgggttttaggatttggcggtatgtgaagatgtgtcgcgccattagagagaacagagttta

SEQ ID NO: 37767 - DNA, 3915 bp, Arabidopsis thaliana landsberg
tctgctggctcagtgtttacatacctgttcgcgtaatctaaatactcctgcaagtaacaaacaatcaaacataaaaattatcaagaaggaaatacaagagcagattccattggtctttaaatgaatattagtaaccttacctgaagtattactactgcggctaacttgtccaacattgtcttctcttgaacaggatgcaaattcaagggcttcaacatcagttcaacggtctgttgacagtattacatgagattcaagggatattaaacttaacacctatctttactgtgacttacaagatctttaaatctgaaaaatatatacctttgatgataatcgctcgtcccaatatgtgtatttcacatccttgagtttttcggtcttacgaagttcctcaatgaaaagattcacagtgacaacctgttccaagtttaaaaatccttttcggttatatgtgctaatgtagaggaaaagtacttcacaattcagtcgaaacaacaaaaaaaacttacatcctctacattgttcagtttgccaaatggataaccaacgactaatcccgacacagaaaatgctttgacctgcataagacaacaaaaggcaaatgattgatgtaatcaaacagagttcataagtctacttgttgatagatctctactacgtcaaggacttaacagtaaacactaaatgaataaaccttgatcctttaatcaccagtaaggcagtaatcacaaaaagccgagggtgaaagtagacactaatctactacactaacaaactttcttcttcattaccaaaacaaacgatagtttcttcattccttatcttagtaaacactaatctacactagcaaccttttttctttgttttaaaaaacactaagaaatgatagtttctccatttcttaacaagaactaaaatctgtgtatttggttaaggtctcctttatatctagagctaaaaagtaaaggaacgatcaaacttatagcactaaccaggttctggaaatctgtacccatcaggtcaatgtttgatttctttctgagcaaaacactgcaacagaagtaacaggttttcaatagcgatgatggtgacaaaattgatcagagaggatttgcatttttgaaaattactgttaaacaaatgttgtagtatgtagacactgaatcaaaggtacctcaatggagaagcaaccatatttgaaggatctgagatagctaatccaacatacttatcaccaacatctaaacccagaaaccgaccagggactgacactttggtcttcagcgcattacccaataagctcaatggcttcacatacttcatttcctgatcaaaagtaagtgaatcaaacttccaaaacacttgttcaaatcaagactaaaaattcacatatcaattgcataaatttgagaattattgtacaaaaaaaactttaatcagaccatcaaacaaacatttcgaaaaagggttttagaaattaatcagaaagtttaaatcttgacgtactttaaaggcggaaactttctggcgccggagcacggaatctggcgagaggaaacgacaaatggttctgctaaatgtcttcgcgattgaagcaagcaagcacaaaccccaagattgtgaattagagatggaccggaaaaggtttattccggttaagttcgagacttcaccgtctaatcaatctatacgatgccggtgattatcagggttttggttttacattataccgggaaccggttaattcgaggtggtttaactggtttcccaaaattgattcggtttagcttaagtgaaaagctcaagtaaccacctctcctgtacttacttgcaggcagaggatcatattagtttcattgcttatacaaaattgtcaagctttaaacataaatataatagcagagtaaggaacaaaacaattccaaaagcagaactcacaattccaaaagaagacaaattcaaagattattttctgcagaaaataaagattcaaagagcacaaaccaaaaagattacaaacacttttctttaatgaaaaacttgagtagagattcccatctgatgaagaacacttgacgtcgaagaagctgacctcaaagcctcagctaatggtcctcccatattgttgtggtgattccctccattgctccaccaattcatttgctccctctcattgttgttatttctcatgttctcttcttcttcttcattgcttgttgaaagttttagagaaacatctgaggaagcgttactattaccgggcacggagattgagatatgacaagtggatgagctcattggactggaggtagagcccgatgatgattcgcctagcccgcctaaacccgcctaatgaccgtgtaatccacttaatgtctgcatagtccgccaaatcttcctcaccgcctaattgaatcgattttaagaaagttgaagcggtacatgaacgcctagcgcctaggcgatgcctagacggctgcgtaacccgctttcttgaacaccgcctagttgtaattgcacatttttgggtgtatatcaatttttttccagcaaaattaggcagttgcacctatcacctatgtctcaccctactgggcggggcctgaataatttatgttacaaagattgcaatttgcaaacattaaaagaagaaaagcccaaaaaggacatctttgatcatcagattggctccactttaattacgaaattgatttctttatttttccttttttacttttccttttggcgggactgcttgctttgattttggaatgatgtaaaagcaaagcaattatgtttgggaaggtttaagcaaaagcaaaagacaagtgaaagtaaataaatagatattgagagagacatagagactgttgtaacaagaaaaaaaaatgagtagcaagaataactccggagctgctgcagtttctggagtcaacaccaacggtaagctaccaatggaggacaatgaagaagaagagatatggaaagttgcagtgacgaggtttcaagcccgagaagaagagatcgagaggaagaagatgactgttaaggaaaaagttcaacagcggctcggttttgcagaggaagctacaagatgcttaactcaaacattggaagtaagtttataaaaagccttttgtgtaacatggtagacaacaaagctaataatgttcttactaaaacaggagctagagattatgggagatcctatgagaaaagaagttggtatggtgaggaagaaaatcgacatggcgaatcgagatatcaaatctttggcacaaagctgtcagaaaaaggtattacacattttcattttcaggaaaagctggcagctttgttttaacacaagaggataatttgacaggagaaggaatacaaagacacattggaagctttcaatgaaaagaacaaagagaaagctcaccttgtttccatgttaatggaggtatttagtctaaaccacttaaaagctttgtaaaatttctactgaagatccaatgtgtgatttgtgacgatgattttcttttggcagctactggctgaaagtgaaagattaaggataaagaaactggaggaaatcaacaagactgttggaaccttgcaatgaggagaagcaatctacatggatcttaccttaaaagagagtgaaaatttgtttaagtttttggtattacactctatccaggtcctcctattaaaagtgagctacgatgtaacaggatgtacgataaatgaatggtgctaaggtttaaagatatgaatgcagcgaaaaacgaatttcttaaaagatgcaagatgtctttgtacacatagataatgtcaaaacaaatcaagcatcattatattcatatatccgaaactagcggcttccctattttgtcattacccgtttccttttactatgctggctca

SEQ ID NO: 37768 - DNA, 6033 bp, Arabidopsis thaliana landsberg
acttttcatcagctggaactgctgatgtctcgcatactgcggttgattccggtgatcagagtggccaaggaaagagcaatattgtagcgcctcagaaacatcctctaacaaatttgtgcaatgagttggctgatgagcagagtgagcacagcagagtaacctctggagggattatagcacctaaaaaaacctgcattgctctttcaaatgaatcctcaacagaaagaccaaaggataatgtagaagcaagtgaaagtgaacctttagcacctgatagtggagctgtaacggtgtcagagaaattatcagccgatgagccaactgaaaaaaacaatgaaggccttaaagatgttaaatttctctgggatttaaatattccttgtgatgtagaagatgaagcgtctcgaagagatgaagagggagaaatcacagagtctattgcccctaaagggagcgaaccttttgatggaagtaaacacagtatggatggggtaattgcatcagatgaacatacaaaattttcatcaccatctaagcctaatgatgaagcagctgctacaaatgacaaggattgccaatctggttatgactcccagtttgaggatggagagttgagggaaccatacccttgggaagaaaatgaagaggttgaacagttggattacggttctgagccagaggatgagagattctactctatgggttctgagaagggaatcttgacagatgagaatttcagtcatgttaagtgtgaatctggtgatgcactgagaattgggcaggctaatgaaggaagtgacatagagaagcaagctgttgtaaacatgagcgattcacatcctaagaagggctcttcttctccttcaaggagttttggttcaaaaccatacaaggaggtgccttcacatgatgcaatccagaggagaaggcaagtttgctttccctgagcctttttttttggtcaaacgcttattaataatttgttagtaactgagtcatggttctttatgattcaggcctgatacttatgaagaggtgagcacgggtccagataggtttgttgggagagacgacaggtcagggatgcgtatgcgtaataggagtcctcggagagggtatattagtggttgggattccaaacgacacttctccccacctaattacaaagatggttcttatagttccgggcgtccatggcataaaagaatggcagatgatcgaggtatggtgaacggctttgatgagtcagggtcaggacaaggaccaggaccagaaccagagggttatgtacgtaggcaattctcaaatggtggatacagaggtcggtttaagagattcccagatggtggggatcgtaaattcagggccccacacagtgatacaaaccaatttcctggtcggatgcacaaccggatgagtggtaataggagagagagaggtggctctccggttgtcaggagattgcccacccgcaatcagagtcaagatccagaagcagttctccagtctcgtggaatggcagtaacagatcatctcctcgtcatccaggtgggattagagcagatgagaggacgacgtgaagagtgaggctgcctttccagaaacggtttcctgcagatcaggagatgggttatatgtcacctccgagaaacagaatgtcgtcgccgaggttctttgaagggaggaataatggtgctggagagaattataatagcttcagagaaaggaagttccggcctggacagagattttatgtcggaaattccatgagaagaccgaattctgacaacaacaacttaagaccatttattccgaacagaagatttgacaatccggaagagagcactggtgggaacaggtttgagatgactcagcagcgaaggactcgacggtctgagaccacagaagatggaggtgatgttattcgacggttcaagtttaatgaagaacaacagtcagtggtggtagccaacgacaacaacaacaaagagtcatgataacagataacgtaagagactcgtttttggtattttccaatagaatctctcttatgttagtttagatttgtttgttatgtttgttctcctaattttattttaggaagaggtaagaaaaatgccatggcgtcatctgttacgtttatgactgctggtatttttgttttcttttaaattttctcattttctttctacagagtttttagggttttctaggcttaatttgatgctgttttccttttctggaaatgatttctatatttgtagaaaatcaacaaaatgaaatcaatatctttttttcttaccatatttgtagctcaaatgaattttgtcaataaaaaatgagaaaaatagcaccaatcttgagatggtacaaggacaaacttatacgtacttcctacattactatatggttcttagcagcttttagatattttgttgctttggttttggagagtagaaaagtatttacgaaaagaaaggaaaaagacttgcggcactgtctacactgagaagaggtcataacctgcaagtaaggcccaaaataatagaaagagatagtaatgagctacgtggtatgaaacaaattcattcgaaggtacaaagcctcaaaataaaacacagtaaggaaccctttggcaaattaagccaacttgaaattttgtggggtttacaatataaatcaatatatatatatatatatatatatatagagagagagagtgagcactgagcagagtcaggtccatagtttagttatactaccatcttcacatgaacttaagaactttaactccaaatgcaattcctatgaaagttgcaatggcgatcccaaatattccggccagaatcccgggaactatcaacgagttccatccctttgccgtcgccattccagctgcggtcgtgggtcctccgacattagcatttgatgctagaagcagtaaccttagctcgatgtttagcagctttcctatgcccaatatcacagccagatgtgtcccaatttgaaccaatgcaaacaagaatatgctcggcgccgtgttgatcacactccatatgtttccgcttgcacccaccactgtgaagaacacctgaaagaaaactagcttgattaatatcaagaaggttgcatcgttcttgaatttcttgtctcatacctgcatcaaaattagagccatggcttctccagatggagcaagacgaccaaactgggacggaaagacagttgctaaaataacaacaaccgctgttatagccggtaagctaccacccgaaaatccgaagtactttgttagcaaagccccagccttgcagatagctaatgacacagcaattccagtagctatcagtagcacaggaattttatttttagtttcagaagcttcgttcgtctctgcatctacaactgccataggagagtaatacctaagtcagagttcagaaactggctagaatcgacatgaaaaaggaatggaacagaacattttcctctggatatctaatccaatagaaatgactttctaactgaatatttacacaacctcaatgatcaattccaaaggaagccaaatcaaacgaaaccagacatcacagcaacattcagacttactagtagtcggtggcggtacagcttctgcaggtattttggagcccaaagcaaacaatgtcgtgaaatatacagcgcatataacattatcagcagccagtccagcagctaaaaccgatggtgtaactccaagagcatttgatatagctacgtagttgacggctggaaaaaaaataatcacaatgcaacttatacaccactatagaaataagtgaacaatattggcgcgtcaagaaaatggaagatacagatgcagatgttcaaagacatgaattttttgttacctccaccgatatgtcttcccatgagagcagctgcaatcttccaactatcagggccaagtgacttcattggcactaaatagtatgccagagctgtacccaccgttgtggcaactgttatgaaatagcaaaggctcaggtttttctgataattcaaagtcagaaatatcaagagcataaccataggaatagtgtgaatgttatgatccttatacctgatccaatcaaaaaggccaagagaagctttccagtggactgaaccacacgacgcaaatcagctctaaacaacaacagaggaacagctaatggaagcagaaaattcaacacaacagcaaaagcaggagcttgagaagaaatgatccctaaattactagctgcaagaccaactagagtgctgactaacgcaccactcatagcggctccgacctttgtcttctccgacctatacaatcaatcccacaccatttccgatttcaaacttcacaattggtatcacacaaaatcaacttcacttaagaatcaacacaacgtaaaattcaaatctccgatcagataaagtaacgatcgaagttctataaagagtgatgatcgtaccagagaccgagagcaccagtagcgaagagagcagtccaagttccccattcatcgttgggagaaatgagaggcgtactcaacgaactcacagtaaccgatcggatcggagatgatgattccggcgacagaaacctgtcggttccgttacgaaattgcgacaacgaagcaggagagaagctaagccttgaagaggttgatttagctgagaattcaggtagatcttggcgtgaaacaatgtacgaacgccgacgaaatagtctcgacgacgacggtaacgagtttccgatcacattgagtaatggcaagctcgtcgccatttgtcgcgtctgcttcacgacgaggaaaaggtggaaaagggaagtgattagtggaattgactcagtgtgcctattagtgcgtcaacttttgctttccattacaaattttatatatcacactgagccaaaccgaaatattaaatcaaaattggtttcgattaaaccggtaaaccaaatcaaatcaaaccaaaactgaaaaatggtcagagtcacagagtcacatagacccaaagttgtgtgtttgaaaaccgttttcttaaattttctgtttcttgggatcacgtttctcatcttctttcaaagctttgagtttgttcttaatggcagttactttttcgtctcggctcatttgtcctgagctgctcccgtttacaaatctggttctgtttccttctggtaatgatcttttggagtgatcatgagaggaatcttctagatgcttctcactagctagacgcaccactaaaggcctaccacaagctaatctcccatgcatcttctctttcgccaattcagcttcctgtatgctcactttagatgtagaaatcaggagattgctcaatcaaaatcaaaacatttttcatttcttgaaacaatttcatccaagtacaaatgcaaaaccaagagagccagattgttagttacctctttaaggctgtattgaatgaaagcataaccccgaggttctcctttctttggcccgcgtgtgtgccaaaggaagtcttctgatatgatcttcccatatggagaaaacatttttatcaacgaagccctgtgacgaagagaaacttataaggtattgagcaaagttttgatctatggtgtggaggtaatataacaagctgtgattcacttactcgtttattctaagatccaggtttccaacatataatctgttctcacctttttcatctacaaacccaccagtatcctgaagtatatatacaaaaatatttagaagatgacacaaattagtataaagaaagagtagtaaacaagatctgtcattgtaaaatgagttttgaatcgcgtgtttacaagtttgaacaagctagacaaaaattcaacttgaagaaattctttagagattgtagttaccatttagttgaagaaacaactagagtgaaaaaggtattgttccaagctcaagaacttaaaaaagaatgtatagtctgcaattctgcatccacctgaaaataacagctctcaagaattcagtaagagtacaaatgctt

SEQ ID NO: 37769 - DNA, 10232 bp, Arabidopsis thaliana landsberg
  unsure (1)..(10232): unsure at all n locations
ttgttgcacttattttcttatgctttgttgaaccttattgatgtgtgttatcgtgatttaacagtttcatctaaaggatccatgttaaaacactaagataagctcagcaatgctgagctgaaatcgcaaagcaacacagtaacgactagagtgtcgattgacaccaacttggtatcgatcgacactgcttaatggttaatgtggcaactttgtttctctaactttttaactcttaataaatttttcttttgatttctgtagcttaataactcttcggacaatgttatctaagtctagggagtctattgctaactttatcttatcttttcttaagagtcagttgcgttatttttaatagagtgtcgttttattgaatcaaaattttgtctgaaattatgatctttctctcgattttattgcatgtattgatgaagtactgcatattcgattcaacccgactaatggaaaatccagagggcaagccaacagaattaaggacatccatctttccaacataatccataaaggctggagctaatgtcactgctcttccttttacctcatcaaaaatgttaattgttcataggatttgactccttgttcatacctgataataagaccaatgtgaaaaagaataagtattactcttcccatataacanattacagaaaaagagagtgattgagttgattttctgtagtgtaaagggctagaaatatttcctttgatcccattattttatattctaaggaatgatcaattgcaaaggttggaaatatgcggaggatatctatccgatggagcgagtactactttgtcctatctccgaaaagaataagtctgggggagagaaagaataaaaaagagaatggtcgagttatcatggtatagtacatgaatgagtctagaaggttcttgaatattagcttgattgatgagacccagcgatgaaagcctaatggatatagttgtgaaacttaggtatagaatctagaatgttgtgtaagcttgcggagaattacattttggttaggaattgattagacttgctaagcatatggattttggtactagaattatgatggctgatataacccgattttcacttcttttagctatgattaaggtatagttgttccttttgttatttctagtgtattttctaatctttttcaggtctttacatattttggatgcatttggagattatggaacattcttgagtaaaagagagaaattatgctgcagaagcaatcaggagacaaaacttcacgtaggtgtcgattgacaccacccctggtatcgagcgacaccaatacctgacgacaattcaaagatgcagattattgaagttttgaagatttcaaaatttggctcagaactttcccttatttctaaagaaggcccataacgttttaggtcatatatatatatatatatatatatatatatatatatatataattttatggtcattgtttagacttatacttgcagaggctaatatccttttctcttttgaacttggagcaaaaccctttaaagaaaatatttctaaactctattctcttattgtttcttacattgatttcttattcaaacatgtttttttctttcataatcatgtctgagtagttctcttgttgtgtttagggattctcattagggatttagatgaataagtagatcaaaaaccctgttaggataatatatttaaaattcttcatctttgattatttttaatgctagttctagagtaattaactagaacttgattttaggataataggtatacccgccataggtatttattactgtaacgatcttagatgagcctagtatttagatgcggactagcgtctatttagatacttaggtgaacttatcaaacctgattacaatgcttgattagttctagagattttcaagagagttgggatcaatactattaagcatagtgagtaatacggcatgccaccggttactctataatagtgatttgagttctagaatggttcgataataatcctaatttactgctagatctactagtctgataattcctgagaatttccctaaacccgacgttttaatcatttgaatctacaaccaatctattttattgctttcttgtcttttacttttataatattttctgtttagctttattcgaaattgttattctattgtgtgatccgagaacttcgtggaattcgatcccttatgtgctataacaacatctttgtttgagagagtagtcattaggataatttgacacacatcaaatttggcgccgttgccgaagttctctttgattcaccattagataaggcgtacaatttagtctaaatttgtcttttactttgttactcatggttctttttcttcttattcttgtgactgcagctaataggaattcgaacgcagctaccggaaagctagcaatctgtggatatgttgagactgattatcagacctgatgttgctggagtgttaccagacagagatggtcatgcatacaatgaagagggtcagaaaatagatgaacagggaagcctgataccagaaatcgctgatggtgtcgatctacaccagctgggtgtcgctcgacaccaagaagaaatcaaagcagatggtcgtcggatgactcttggtgactacaacagaccggatctcttctattccaatcgatctgcaatccgaccacctacctttgaaagaagcgattttgagataaaccctgcattatatactcttgtgagtatgcatcctttccatggtctttcacaagaacatcctatggatcatattgagcggtttgaagacttggttttgagcattaaggcagagggtgtttcttatgactatcttccccacaagctcttcccatattctcttgttggggaagcatcttcttggcttaagcagttgaagcctggatctttgacaacttggaaagaaataaatgttacttttctcaacaacttttttaatgatgcaaggtctgaggagctgagaatgaagatctctaccttctctcaagaagcaactgaagcatttaaagccgtttggatcagattcagaggatatcagagagattgcccgcatcatggtttcagtgaggttcagctgttaggtatcttcttcagaggagttgattggcattatcagatggctttggatgcagctagtaatgggaatttcatgtcaagatatccagaagatgcaacaatgttgattgatagcttagcttccagcattagtaccaaaagcgttgacattgcaaggaaaacgcaagttcagtatgttgcacaagttgaaagtttagctacttcagagaagatggatcaacagagatacatgagcttcaatcaacaatctatacatcagaaaccggttcagcaaactaaaaacttcattcagaatcatgcttcttcaacccaaattcaccctccacccgagaccactaggaagattgaatctcttctcgaacagattctcaaaggtcaagagaagcaaacaacagattttgatcacaaactggttgcattatccgacgatatgaataggaagattcaaatattgaacaatcggatcaagcaattgactacaaacaaagaagatgttcgtgctattgagttaaggagtggaaaacagctaaatccagtgctgcaacgagaacttccttcaaccaaaatcgttaatttggaagaaaatgatgttgcagtttttgcagaccagacaccagtgtctactgacacagcagcgtgtcgatcgacaccagccatgacagacactacagaacgcgacagtgtcgaccgacaccaacaaggtgtcgatcgacaccaaccctgcccaaacctgggaattcgccaaaacccgatttcagctgcagcaaaggtaaccaaacccaaggttccttttcccaagagtcctaggaagtccaaacatgagcttgaggatgctagatgcaaagatatgatggataagttgattgtagagatgccacttatagatgttgtgaagtcttctcctatgatcagacagtttgtgaagaggatggttactaaggatatgcttactgagaaagctgtcatgacgatgtctacacaggttaacgacattattcagaacaagattccacagaaacttccagatccaggtagctttgttctcaattgtagtatctttaacgagagttttgattaatgcttctgtgatcttggttctagtgtccatttgatgccgcgatccgttgcgttatcccttggtttgacagattgtgagccaacgcaaatcactattgttcttgctgatcgatctgtccatatacctgatggtatcctatgcaatgtccctgtacaagtcggtaatagcatgattcctacagattttgtggttttatcttatgagaaaaaacctaaagatcctctaatcttggtaagatctttcttagccacaagtggtgccattattgacataagaaagggtagaataggcttgaatgtacgtgatctaaaaatgcagtttgacacgaataaggtggttaagaagcctaccatcgatgggcagactttctatgttgacactatctcgtctctagatgaagaattcctgacgggcagacctactgatcgatgggcagacctgctgatcctttagagcatgctctaataccttaaatagacaaagtttcccacgggtatagtaagctgctagatagaaatgagcatgtaatacaattggttgttcaagaggagttaattagcacatctactaaagcagcaacagttggcgactggagcaaaataggcttctaaagttgatctaaagccacttcttgtcattgttaatgcttatttaaacaacgcagagcttactttattgctaagcaagctctcttgatgatattacaggtatctctcccgacttgtgtatgcatagaatccacctcaaggatgagtctaagcccttagtagagcatcagaggagactaaacctgaatctgaaggatgttgttaaaaaggagatcatgaaattgttggaagctgggatcatctatcctatttcacatagtgattgggttagtctagtgcatgtggttcctaagaaaggagttgttacaatggttaagaatgacatgaacgagttgattcctacaaggaccgttaccggccacaggatatgtattgactacaggaagctgaacgctgcaacaaggaaggataattttcctctaccatgcattgatcaaatgatggaaaggttagcaaatcataagtactattgcttccttgatggatactcaagattctttcagatcccgaatcatccaaatgaccaggagaaaacgactttcacctgcccctatggtacatttgcttatcagagaatgcccttcggtctttgtaatgctcctgcgacatttcagagaggtatgatgtctatcttcacagatatgatcgaggatatcatggaggttttcatggatggcttttcagtttatggatcatcatttgaggattgtttagagaatctctgcaaagtgttagcatgatgtgaggagaaacatctagttttgaattgggagaaatgtcacttcatggtacaggatggaatagttttaggacacaggatttctgagcatggtatagaagtatatagagctaagatcgaagttatgacaagtcttcaagcgccagataatgtttaagtagtgaggagtttccttggacatgctggtttctataggagattcatcaaagactttagcaaaatcgcaacaccactgactgctctactctgtaaagaagtcacattcgagtttacactagagtgtcatgatgcctttcagcagataaaacaagccttgataagcgcaccaattgttcaaccaccagactgggatctatcttttgaggtaaggtgtgatgctagtgattgtgcagttggggctgttctaggacagaggaaggataagaaacttcatgccatctactatgcaagtaggacacttgatgatgctcaaagaagttatacaactacataaaggagttgttaactgtggtttgctttcgagaaattcagatcttatctcgttggatccaaagttattgttcacacagatcatgctgccttgaagtatttgatgcaaaagaaagatgcgaagccaagactgttgagatggattttagttcttcaggaatttaaatcgaggttagaaataagaaaggagttgagaatggtgtagcagatcctttgtcacgcattaggatcgatgatgttgtccctattaacgatattcttgcctgaggagaacatatacatgattgatacagctggagaagatgactgcaaatgtgataagttgcagaatcgaactttagtgtcgatcgacactccttctatgtcgatcgacactcacaattcagaggaagttgatattcgtagttgcgcaatggtgtcgatcgacaccactgaaaatgtcgatcgacaccctcctgaatcgacaagaaattggtcaccaactgagaattgcgccaccacaggggtcgagaaggactacccatggtatgctgacattgttaattacctagctgcaaatgtggaaccggataatttcacagattacaacaagaagagattcctaagagagattaggcgatattattgggatgaaccttatctctataagcattgttctgatggagtttataggagatgcgttactgcaacagaggttcctgatatactatcgcattatcacagctctagctatggtggtcattttgcaactttcaaaacagtatccaaaattcttcaagcagacttttggtggcctacaatcttttgggatactcagaagttcatatcgcagtgtgatccttgtcagagaaggggaaagatcagcaatcgtaatgagatgcctcagaaatttatcctcgaagttgaagtcttcgattgttggggtatagatttcatgggaccattcccaccatcaaacaagaatctctacatccttgtcgcagtcgattatgtctccaagtgggtagaggctatagctagcccgaagaacgattcagcagtgtcatgaaactcttcaagtctatcatatttcctcgtttttgagtgccacgcatagtcatcacggacggaggtaagcatttcattaacaagattcttgcaaaattgctttttcagtatggagttcagcatcgggttgctactccctaccatccacaaacgagtggtcaagttgaagtttctaacaggcaaatcaaagagattcttgagaaaacagtgggtaaagcgaaaaaagagtggtcctacaagttagatgattcactgtgggcctacaggacaactttcaaaactccgcttggtaccacaccttttcatcttctatatggtaaagcttgtcatcttccagtggaattaaaggcacaaagcagtttggacagtcaagatgatgaatttcgacatcaaatcggctggagaaaagagacttattcagttgaatgagcttgataaaatacgaattcacgcctatgacaactcgaagctctacaaggaacgcacaaaagcttaccacgacaagaagatcctcactcagacctttgagcctaatgaccaggtacttctttatgattctagattgataatatttcctggaaaattgtcttctcgttggacaggtctctacacattccactcggttaggccatatggaacagtcattctcaaaaacaacaatggaaaaccattttctgtgaatggacagagaatcaaacactattggctgaagccgagattccagtagaaaagcctttggatcttctggactcacctgttgattaagcaagtgcagagtcaagctattgactataaacaagcgcttagtgggaggcaacccactagtaagtatttctctttttcatcatttcattcatttgatttttaacttaggattttttattttataggatttttattgattaaaagaaaaaaaaaccagtgttaaccaaaaacgcgatggtgtcgatcgacaaggtaagtcattttaacctaaacttcatcttcttcatttcagatttttttcaaaaccgccgaaatcacacttttccctctagattcttcgattcttcactgtttcttgtgatttcaggctctaaactcatcaaaatttcatcctctatcttcctcaaatgtcaattccatcgatctgcaagatgacagggcagaaaaagaaggcgaggaagagcgttggaccttcctcctcctccgccaccgatcaccaacgctggagcttctccaccgccgccggtctccgcccctcccaaccgcaaccacaaggcgtagctcctcaacctcctgcttatcaatttccatggccaaagctttcaaaagagagaattccttctgaaagtgtttggaagaaagatgtcaacagggaattcactaaaggtgactatatcaatcgccctttttctccagattgggatgattatgatattctgttctataatgcctggatgagtgtagaaattttgcctaatcggtttgtggatttcggtttgatgtagcgtttgcagatagagaaatctgttttaggacttctagatgacataggtttggaaaccgttgtaggttgtactttttgtattatgagctggttaaacaattcatggcttctgttagggtatcttatgtgaatgacaggaaacacaacgctcaggaaggagctcttatcttcttcattcgcagtgtcagatacagtttaccagtgcgagatttgtgtgacatctatgggtttgacaatgatctcactggagtttccctgcctggtcagtttaaggattctcagattttctggagctggtttggtaatggaatctatgattccaaagacgcagtacattcagagatccgtcaccctgttctgggatattttgttaggctgattagtagcacactgttgtgcaagatggagcctggcaagatgagactttctgagttattattgctctataacgctcttcatgacttctttctagacagccttggatttgagcaggttgaccgtaatgtcaactttggctctgtgttcgctcatcacttggtttctctcaataccaagccctttacaggtaaagagaaaaaatatgagagagtttgcagttttctcactcctatatttcatcactttcacatcaactttgagggagaggaggtcaacacaacgatattcactatggatgagaattatctaagaactctcactggctgaaaggcaacttactttggtgcttcagagatgatacatggcaccatatgattcagttaccttgccctgcgcttacagaattacaggcgagcatgaggagcttggttttcatcccgatccttcccttctgcattccgcgccacgcaccaggagacatagaggttcagcttcaggatccgcacctacacagactaagaatgagttcattgaactgctgggggtactcgaggtggctcttcctcttaagctctcccatatcagctgccttcccctcctcctatcccgatggagccacatgtctttcagcagtacatcgtcgacagcttcaagagcgtttggaacgccatagctactctctctcgatgcggttgtgttgctcccactcgtcgtcgtcgtcgctctctcgcacccacctccgactcagagcatgaggactagccaccctccttatcttgctttgttttctgactttgttcttgctttatttcagactatttgttatttgttttgaaatttgttgcacttattttcctatgctttgttggacctattgatgtgtgttttagtgatttaacagtctaactggagagtccatgtgaaaacactaaccaaggctctagaaaaatgagctgaattcgcaaagctaagcaaaacgaccagagtgtcgatagacaccaacatggtatcgatcgacaccactctcaagtggcaactcacgtttttctaacttttatcttttgattattttcctttcgattcctatggcttaataaatctggggccaatgttatttaagtctgggggagtcagttactaacttcatcttttattttcttatgagtcagttgtgtcattctaacttagataatcgtttttattgagtcaaaacttttgtctgaaattatgatctatctctcgagtttattgccaggattgcttaagtactaca

SEQ ID NO: 37770 - DNA, 2279 bp, Arabidopsis thaliana landsberg
gatttttttattgtgttttgttatcttgaattcttgttaataaacctaacccaatgcatcttaattgtgattattgatgccagcaaactcaaaaataacaataattttatcctatcaagaaaagagccgacctctcaaaagtaggatacatcttaattgtgattattgatgctagcaaactcaaaaataacaacaattttatcttatcaagaaaagagctgacctctcaaaagtaacaaaagcaagaaccaaaaatttacatagtgtctgattggtaaccaaaagctgtacaagttttttaactgttagctttattggaatagtgcaaagctcttagaaggagttgtacaaaaaagctgagagtaaaactttttataacacttttaataaagtttttgttattggtaattgcaaagctgtacaaactgtactgttttgataatgggttaccattcaaagctttaaattctaaatcgcatgataacctgtaaataattattttgaatatatgtcagactttattattattggttaactatgttctcttcattgaaaaaaatatagatttgtaactcattgctgttttttttttttaagaaacaaatagagaactatataaaaatatgagaaaacgttggttttgtccaagaaaaaaattgttgggttttggtgggtggcaatagaagatgccatgtacatagtgggaacaagtaaccttacgcccataacatgtcggaacatcaccaataaatttctatgttcaaaaatatcattgtaacaaaaagtttttcgaatttcttctcccaacccaccataaaaacccaatcaaatgcatgtgaatgttcttgttcatttgatgaggtcaagatcaagaagccatgtaatctagaatacaacagtacacatgtgacttgttacagttttgaactctcgttcaagttttgcaagttcttaccaaagctatagatgcctctcatcccatgagccttcatcacctgatgtgcttattaggtttacaggcttgactaaactctagagcctatacgtatagaagaggcctgactaaacgaagataatgaaataagcccacaaggcccaaataattaatatcttttattctttttggcaaaatgaaaaatctgacttatgggctttttaacatttacacatttaacttcatgacccaatgaagacccgacccgtctggtaatgacccgatccaacacatgagtaaaccttcactgaaacctcgaaactccttccagaagcctaaaaccttcaccaccaaatcggtgcctccttgaatagtcgccgccgtcgtctatcatcgccgcttgtgactccggtgagtattcttctgctctattgagtttattttggttgaagctctatgagatgtacgtgggtctggttttcatttctgtttcttaatcgctcgaattagcatttgatagctactgagattttgagttttctgatctgccgaataatcttcgccattgtagtgtagatgttgtgtgccttttgattagattacactgagaaattggattgttttcgtgtttgtagatgagaagctaggttattgaatcagagattatggctgcttcaatttcaagaaggatttttcgcacttttggatccttttcagctctaggacgttcctcttcaccaagtattatctcattttccaagcttcttataaaatatgtttgtttcctggatctctgattgtttctctcaacagatttgtctgcgaatacatctggaaatggtttagcttctcttactaatgatctaaaggttggtgtgtttagttaatgtcactttctcctttccttcatctgcatattattgagttctacttactactacttgagtggtcatcttcctgattttgagatgttgatttcgtatttgttatcaatgcagtatggaatggctttactttccaaccgaaagctctccacttctattttgactcctgatgattcatttccttctgatttacttaccaaaaagactgtgcttacaccagaccgaaccataggtacgtctctgtttggtctacaagctggttttcaagctaattccaacatctgtatctttcatgtgctttgctgaaaattttgttcctttcctggaatcatgttggtggaatggagagtgagtagttgttgtgttataaaaatgcagttactttgtgttttcggaggagtaagagtttttcaggccttatttagcttattacttgaaggctaacgcagatttgagtacca

SEQ ID NO: 37771 - DNA, 3037 bp, Arabidopsis thaliana landsberg
aatcttctacaagtcttgttgatagaatgtccttaggttcatcctgtttattttcttggtttgttcttgctgtaaggtgtttgagttagtgacctgaaatgggaatgcttacttaattacattaacctttgttgtgtgatttagctgctctgctgatgtatatctatttgtattttacagctgatgccatatgtatctcagtgccctctacaagtcaacacaaacgagtcaactgaagcttccaagtgaaaaatagtcaatcaggagaaatatgtttttaagtcttcttcataaagctttaagttaggactctgttcttctattgtccgtaatccttttgtgctattcttaaaatgggagatttgatttgatattttcacgaaacgacatgcaaagtaattggataacatgtttatgcagtggaatatatattcacttcataaattggacgttcacatagtaaaatatagcttgatacaagaaaacattatgcgttatgcaatacttagcaaaataaaacatccacaacaaacatattaaaattcttgaagatgaaaaaacagtttcacactctcttgacatgagctttgttatcagagaaacatcgagttgttgataagaaggttgttgttggtaatatcactcgtgaacaggttctgatcataaccacaaggaacatgcggcatcaacccatagttgttgttcacagattcttgtaccgcaggagcagagtgatcttgtgtgtttgagacaaaagaatgttgaaagttgttgttgttcataaacatgttctgatcataaccacaaagctcctgttgcatcaagccagattcgtcttgtagtaaggctgagaaatcttgattgagatttgatgcagagagtgggatttgagagagcgtagcatctccatggttactcatgcacatgttctgctcataaccacaaagatcctgcttcattatctgactcttcaactcagattgttcaagtaacgctgagaaataatcctgattgaaatttgatgcagagactgggatctgagacagagtattgtctccatggttatacataaacagcgaaaactgtctagggttcaaagattgggtctgatgattcagagaggatgatgctaaactctgatgatccggttttgtctccttgtgtttctgcgactcaacaaaacgaatcctttctcggactttagagacatgaggttctaaggactgaatcagttgagaaacttggtcgggagagtaatgatcagcgagtggatactttaaaatattcacgttcttcagacaagtcttcaagtcatcattgtccgatatctttgctttcttctccaaattcgtcttgtccttcttcttgttcaggaagtcataaagagtaacacttttcttccttctcaaggctgcgaagaattgactatacctgagagccatgtctttcactgtatttctctccttaggccatgttctcagttcaccgtctggtccgtaatagatgacgcaaacgtcaatagcacagagaatcgaaagctcttcagcttttttgaagatggttttgagtctgtttgttaaactagttgaattacgtgacgaagaagaagaagaaaaagaagattgcttcatcgtgattttgccttgattcggcaagaaactagggttttttcttccgagagagagagaacacacaaagaagaaaaattatggaaatgagggtgaaacattgtgaactcaatacgtttctatagatgccttgatgcctacggaacaacgtgtacgcatctgtgttaaattcaaaactaggcctataatgggcttagcagaaagcccaattagaaaacgattggtttttgtggaagagtaaccctagaaaatatcatatataaagatattgtcttcttcgattaactcttcttcgccaaaatcagggagaggctaaaatggtttcgttgaagctccagaagcgtctcgcatcctcagtactcaagtgcgggaagagaaaagtatggctcgacccgaacgaaggaagtgatatctccatggccaattcgcgtacgttgttcttcatactctcaaatgttgttgatcagatttaactttctcggtctcgtgcttgttttggtctgcgatcgaagcttgttgataatgatagtagaaaaaaaggatactgtagcttacttcgtaggtgacgttgaatgatttgaattcagtctgatgaagttgagcttggaaatggtgttgctatgaatctgatttttgaaattctgtaaaattttgtttagtttggacttgttcagatgttatcgtaggtttagtagctttggattgactatgttcttctcggattcatggtctatggtttctgattgttaccaaatcaacatgccatcatagcactctgttggatcatgattcttgtttgttttctatacgaaatggtgatgcatctatgtgcatttgagatttgagtgtaattctgattaagtattttggattgttatggaacttcagggcagaacattaggaagcttgtgaaggatggtttcattatcaggaagcctactaagatccactcacgttctcgggctagggctttgaacgaggccaagcgaaagggtcgtcactctggatacggtaaaaggccaaatgagcttttcctgcttgaaattccttttgattattgctggtttagtgaacattgtcttttgtatcacttcaatgttttttaggtaagagaaagggtacaagagaggcaaggctaccaaccaagattctttggatgaggagaatgagggtgttgaggcgtttcttgagcaagtaccgtgagtcaaagaagattgataggcacatgtaccatgacatgtacatgaaagtgaagggtaatgttttcaagaacaagcgtgtgcttatggagagcatccacaagatgaaggctgagaaggctagagagaagaccctcgctgaccagtttgaggccaagcgtattaagaacaaggctagcagggagagaaagtttgccagaagagaggaga

SEQ ID NO: 37772 - DNA, 1105 bp, Arabidopsis thaliana landsberg
atctgtttgacacttcaaattggcttaaatattctaaatttatttaaataactggaaatatacttttaactaaactattttttatgtttgataagttaaaatataaaaaatatgtttaaacattttaaaataaaatgaattaaattttcggtttatattaatttctgttaattaaattaattgaattcctttttcagcaactgaatcatattaatttaaaatattcaatgcgtatatttctttcttgaattcgaatatatcacttttccataattataggtaatcaaatatttagttggatattcatttttgaattagcataaagtttctgaacaatttccataattaaataactacttataagataatagctaaacattttcctataattatgggattcatcataatttgtaaacttgaattccacgatttaatattttatgtatatctttcacctaaaaatttatatcttataaatactgtacgtcccatttcaagaactcactcagcaatttctattttcttttaccctctcgcctctttttttattttagcagaagagaaaaagaccatggagaaaactgaggttttggatcgacgagaccatggagaaaactgtaacgcccgtgaaccggaaaatcggttagggtttatttttaaatcatccgatttaattggttgggttaattggaaaccctagagtgtgcctataaaagaaggaaactcgaaattagggctttagttagccacttttcgttttataaaggatacaaagagagagaaggagaaggaacaaaatcgttagggtttgggaggaaacagttttgacatgtcaaatgggtgtctaatgtaacaaaatttggtagagttattcccaagtcttttacagtcattcttcattttacaaaagtggatttggattcaaaatctttgagttattcgcagttttgtgacgggagtgaggacctcctgtgattgacgctgagatccgcgtctaacgtgcttgcctatatgcccttgcctttgtggagcacagagccatgtatgtcgctcctttgctgcgggtcggaacttcctctgcaaggctttttaataccttaggacc

SEQ ID NO: 37773 - DNA, 5337 bp, Arabidopsis thaliana landsberg
gtaagaattgagatgtagtgatatcgatgtgtctgatatctcagtaaggtcgggggcgtaaagaccgaaagttagcagttgcttgccatagccgacgtaatggaaaatctatatttagggtggcacagaatgttaagggattgctgtgcagttcggatgaaagttatgtcggttccatgacggctaatctcttgggttccaagtactacatatgggccaaggtcagaaattcaagctcaatgtaacggtgttggttctgcttataggttggaaatcgagtatgaatgtttctggtcttttgattccattgcagggagttcgagttggttctgtaggtaaaatggtgaagccgcttctttcggttgtaatgtaagcgttgaggattttgaatgccgtgttttttgatgaatttgcctctgccttagttttgggtttgcttatgcatctgttggcttctgcagattcacacccaccataacaacttggacagggagctacagaagaatgagaactttgctaccaaagcagcagccaatgcagaaaaacaacaataagcaggtaaatgcctaatcttaaacttctctccatcaatcttgcattccgaaaacataaaactgttaatacacgtatgtatgtatctccttataggttcaacaagctagtaaactaccgcttgattggcttgagaataaggaaaaaattcagaagctatgctcaaggataccacattacaacaaagtaagtctcaccgggcatcattgttgattttgtaaagcatgaaattcattgtgtcttcccctttctttagatctccaagcagcatgagttagacttcagagacagaggaagaacaggactgagaatacagagctcggtgaagaactttcagctaacactcacggtgcatttccacaactttaaagctttgatcaaaaaccaatctcaagaatcctaaacattgtgtaatttggtataagcaggagactccaaggcagacaattcttcaaatagggagagttgacaaagcaagatatgtaatcgacttcaggtactacttgctcaaaccagaatgagccaaacataaacatacttataagcttaggattaaaggctttatcatctaaaagtcttttgctttatctgtttgcaggtatccattctcaggctaccaagcattctgcatttgcttggcttctattgattccaagctttgttgtactgtttgatcattaataaacggacgagttcaatctctgaacatccctccaatgatcatcatctgtataccttacttttctacataaacaattcctctatctgagtttcacaaactacctcagtacctctcaaatcaaattcaccatcagaggaaactgaaagtggacaactgttaaaaagattcaaactttattatataagattgtcacaagaaagaataatcgatgtgtcaatgttgattttcacaaccgagattctgaacaactaagaaacaaaacttatcagaagaacaacactttagcaatcatttaactcgctgtagaaatcaggcgtaaggaaagaatttaaatcaccgaagataccatcatcttcctccgccgttaacttgccggagttttgacacccgaaatacgtttggatttcttccgggaagctccgacgaggcggagcaatctcaggtggcgtcgatggtccgattacctcctctgccactaaaggtgacgacttcaagagctttgttttccgatcatcgttgtcctctgacgaagattgactctgtgataagtcagactcgtggttaggttttataaatgggctaagatcagaatgcggactctcgaagagattattcgcggtatcgatagggttctccggcaccgggagtttcagataacggctgatgtcgaagttagtaacggcgttgagtccacggtactcgatagctgcgatatcgtacgctatagctgcttcttcttgcgtcgctacaataaaaggggtgcaaaatgtcacattgagaagtttaagacaatttatgaaacttctaattctttggtttgttaattattacgttttactccccaaactattatggatttgcctaatacgtaatattgtgctacacaagtgaataatgccaacaacaacaaaatgaaaatgctacaagtcaataatcacgttagatttttttgaaaatgtactttgtcccgttgatataggacaatatgtaaaacatataataaatagaattaaattggccagtaaaattggatgagcaacttataatttaaaccatacaataaataaatatgtataaacataaggaaaaacaaactctataataaattaaaggcttgactaagtggttgggtttggtgatctatttcccaaccaacacaagatctgattacgtgcatatatcaaccccttattaaagatttcaaagtaaaaatgtttggttataatgaagagagaatcccacatatagcatttgtagaatttgtgttatcacaactaccatttaccaccatccaatttagtgaatgtttataatttgtaatcaaaatatatatgtatcatacaatctttttggttaggaaactaaccactaataaactcaaatgcaggagtagttgtttaaactttatgaaaacgtacaatttgatcaaggtgtggatgatatcgcatatttacttctacttgcttgaatttcatctagtttgtttgcgtttggagaatatgttttttcattatactgataaaaaaataaaaaagttttaaaagtaccgaagttccaaggtataaatttattgccaaacactcttcgattcagcttcatctcccattgtgggatgcctgcaagtccatatacttatcaaacatttaaattagtaatattgaaattgatcattgttcttatagtcttttattatggggaattaaagtcggtttactttgcaacgcctctgtattttgatacacctcgtgaaaacccactactttttctgtaagaaatcatccaaaaaatattattaatcaatacttagtttgttaaccaaaagaaagcagagaattatagttaaccaccaatcattcaaaaaagtgatttagttattaccttctcaaagatccaatatactcttcctttgactggctttccatttctttgatgtcttcttcataattacacaactataaatcacacacaaaataaacaatagttattagaactaaaaaaaaaaaaaaaagaagaagcaagaattagatataaacagactcttcttctttctttgggtttctttctataagaacacatatgtaagaaagattgtgaagcaaacaaagatcatgtgaatagtaactactttctaattatttaatgtttttaagtattaactaggattccgagaaaatttacagggaagttcaagatggtgtctcgtccccaatatttcaatgctgctaagtcgtaggcacgtgctgctgcatcttcctcgtcatatgcccctgtgcaaaccacattaatacattaattaaacattggtttaaatctttatttcttttcatttacgtattaaaatactatatattacgtaaatattttcttaaaaaactacatatgtcaattgtaaacataaaggtgaagtagcaaaaatgtttggggttgattttcaatttgtgactaagcacatttgaaaaagacaaatcgaaatgtacttttaagaattatcagatcatttgtttgtttttgtcacgccatagatgttaacatgtatgcttttgtttagaaccaccaagttggctttataaagaactgagaagtaacgtttgtttttttataattagaggtgataattaattagcatcactcactctaaaaagtgtctaccaatttgagagtgcaaaaagaaaacgccatatgaaaaatgaccaaaacaaactcacctaaatatactgcacgtgatgagtcagccattattccggtcagcatcgtcagcaaaaccaaaaaaaaaaacatattaaccaacaagaacaaaaaatacaaaataagatataattaattttcaaatcaagaacagtaacgacgaactcattccccggagaaatcggagttgaagatcaaaacgacaatatctttaataactcataaagatatatagatatgtgtgtatgtatagactgaccttgtcttcctttcttggtctgagtttcgttccaactattcttatcccacaaatgtgcttcgtaccttccagtccatcgatgcctataatcggaaagttatatgattaagtaaagataaacaaaaacggtgacgttttgagtgtgttttgttctcatgttaacctggtgacgcctctatggacggagctacgttgtggaggagcgtctcgtggttgcgatcggcgtttgcgtttagctttaaggactactgatgttgctgactgatcatcgccggtttcattctcaaccgaagtttttttgctctgccgtgtgatgtcttccattaccggagaaacttcgacggcgatggacataaaagaagaggaagaagaagaagaaaacaacaaagatgagaaattgatggaatggtttttgtttttgttatataaggaaactataaagagaaatggttgagtatttaaaattataattttccgttttattttttttagcctttttaattgctattgctttaaaagatttcctttgctacggccctctttgtacttctgtaattagatttctcatttattaaaattcctaatcgtaatcaaaccatttagacctgatattaagcgatttagccattttatttgttttcaatatatagcttttaattcatgtttttaattcagaacaaatgaggaattgacatgtggaagtttagatccgctgagccaaaaatcttggagaaagtaggcaagcaaaatcggagcttcataatttctccacttcttggtttatctactttttggtcgggccgtgaaagatatataatgtaatgctaaagaacaatcttattattattatatagtttacatttttttgttccattatatttaatatttccttccaattattttagcaatcgttttgctctaaaaacacatttccaagtaatatgataataacattgctaaactcctagttctctaattccaattcctaattaattgatggaatggaacagagacttaccaccgaaatatttgaattatgttctaaaaatatgcaaaatccaaacaaaacaaaaaaaattgcaagaattaaggcaatagccttaattaaactttaaacattggaactcccatattttgagtatatatgtttagaaattat

SEQ ID NO: 37774 - DNA, 3205 bp, Arabidopsis thaliana landsberg
tactgattttatctatggtctaggataaggattttgtgtctttatgttatctctcgagtctttttagtgtttattcaggtattctgtcaagtgggacaacaatggagatgaggagacattttggtgcaagagctaagaaaaataaaactaaagacgatttcagattccagattcagagggagtgtccaccgacaccatttttggcccagaaaagtccatgacgctttcaagttaaccgaagtggaaatttgccccaaaagacttccctatttgcattactagtccctggacgttttatagggtttatatatagctttaaagctcattgtttagacctaagttgcttttatcaagttccttgcaattcctattttcataaagacattaactattcatcccttgttctttagagattcatttagttctcaatacagtgaagagatcccttcattctccaatcttatttgctgtgtttatgctttcttactcaaatatgttgcttgtttcattctccatgtctgagtagtttgcctgttagggttagagtttctcattaaagattcatatggtttagtagatcgccccctgctaggttatctgtagaattcttcatctttaatttttcttaatgctagttttagagtaactaactagaatttgaatccggacaatagatatacccggcataggtatttgtagttggatctattatttgatgagtcttgcttataggtgtgtaataagaatcagcctatctactaaggtgaacaattgaactcgtttagaatgcatgtctaggtataagatctctcggcttctctggttattcttagttatagacatagggagtttcgtggaacgccaccggttattccaaaattagagtttgcttttaagaatggtttgataacaacctagctatcattagatctactaatcatatatttcctgagaataccctaagcctaactctttattttatcgtttcacaaccaatcattctactgtccttttactttgtttacttttttatttcattattcctcttctaacttaatcttgacattcaattcattgtgtgaacaaaagaactttcaggaaatttgcacaaaagaactttgtggaaattcgacccttaaatactacaaccgatctcttatttgagagagtaggtttaaggcaatttgaaccatatcaaatttagcgccgttgccaaagtttttgggaatcaccattgagtttagtttagagatttcgtctagtttttacttttcttttgttactcacgaatttcttggtttcttcttttctgtgtttcaggtgtatgcctatgcaaacaagaagcacacaacagaaggagctgattaacttgtctgttcttgacttaggaaaacttgagcgcacaaaccgaaaaactcagagattagcaatggctgacagaatcatcagacttgatgaggaaggagttttaagagatgaaaatgggaaagcctacaatgaggctggtcagagattggatgatcattgactatcattgacttcctctcagccacggccgcgcaccaccaccgccggcgcttctcccccaccgtcggattccccctctgcagctgcccacggtcccatcttttgacctttggccaaaattggataatgagtggattgcttctcaacgagtttgggaggaggatatcaaccgggaattcactaaaggtgactttgtcaattgtcatttttctccagattgggatgattatgatacattgttttacaatgcttggaagaatgtggataacctacctatacggtttgcggattttgatttgatgcgtcgcttgaagatagagaaatctgttttaggattgctagagtatataggtttgggaacaatttgtactaggtagtatgacttgtatcctgagctagtgtggcagtttatggcttctgttagggtttcctatgtaaatgatagggtgcgcgatgctcaggaaggagcccttattttcttcattcgtggtatcagataaattttaccgctcagggatttgtgtgacatctatggttttgagaatgatacttctcatgtttcgcttcctggacagtttgcagatgctcaaatattttggagcgaatttggcaatggaatttatgattccaaggatgttgtacattcaaggatttgttagcatgttctgaggtatttggctagactgattagcaacacatttttgtgtaagatggagcattggaagatgaggctttctaagttcttgctactttatcatgttgttcgtgacttctttcctgacactttgaggatggaggaagtggaccgcaatgtcaactttggggctgttttcgcgcatcacttggtctctcttaagaccaaaccctttacatgcacatggaagaagactgagcagattggtagtctcctcactcctatctttgagcattttcacattagtgttgagggggagaagattgtgaccaagagagccaccatggatgaggcttatttgaagagtactcactggcttaagggcagtttggtttggtgtttcagagattgcacagggagccatatgattcagttaccctgtcgtgcacttacaaatatcacatgagagccagaggagcttggctttcatcctgaaccttcactactgcaagctgcaccacgcactaggaaatagagaggtacaaccacatgatccgcgcctacaccgatagaggatgcgtttgttgatccttctaggggtcttcaatttgggtcctcttcttcagccttaccttatcagctgcttactcctgctcttatcccgatggagccagcgaactttcaacagtacgtagttgacatcttcaagagcatttggaacacaatagctacagtttcttgatgcggttgtgttgatcctactcgtcgctgtcgtcactctccagcacctacttttggttctaagcatgaggattagccatcctccctatctctactttgtactctgacttagtttttctttcctttgagacgattggttgtttgattcgaaacttgttgcacttatcatcttatgcttttttggacctattgatgtgtgttttagtgatttaacagttcagctagaggatctatgtgaaaatactaacgtaagctctgcaatgccgagctgaattagcaaacgacaatagaaacgactagagt

SEQ ID NO: 37775 - DNA, 274 bp, Arabidopsis thaliana landsberg
ccaagttcggcatggataggtgttgttcctctccgcataggaccccagattatcgatccatgctcgaagaaaggcatgcgagaaaaccatattggctagtgattgtgaggctccaattcttgactggagtggactccatgggcctatgcccccccatcctttggatagaagggcagaattttaggttttttcatgttgtcaaagagttgaacaatggttttttcgtgttgtcacagagttgaactatgtcaatacatggcgagtgcctcatcgt

SEQ ID NO: 37776 - DNA, 8996 bp, Arabidopsis thaliana landsberg
  unsure (1)..(8996): unsure at all n locations
atacttctaagaaagaataaggggcagaaaaatgacaagccattttatccgttttttaatttgacatttcaagaaaaataaagacggaataagggttaaagcgtcaattaccccatgttttcgagccaacccgaaccgcatgaggatccgatccggaaaagaaacacgcggatcttcatttaaacgtaatgggcctcttctcatcttcttcttcaggcggctggaatgacatttggcccattatctcgaaatttcaacgcaaacaacatcgaagaagatctagattttccctcctctccaagatattttgtgattcactacgatattctccaaatcacaactaataagtttgattcctaaattcgtttgagatagtatatcaacaattatgattgagattacctataaaaccgcaaatccaaatcatctcttaaagatcctgccaagctcaatattttgccgcttctccaagatattcaatatttctggaatatattctgcaaatcacaaccaaataggtatgattcctatattcaattaagatagtatattgagttatgattgagattaccataaaatccggttgtgatttagggttttagttgtacattagttagtataaatacctcaatcaataaccatcaattctaatccaactcggattacttttcttcgcagcctatcacatagtcaatgagtttacctttaggtttaacgtatattagtgatgtcaagcctttcaaaacgaattggcgtgtccgagtcaagattcttcatctgtggaggcaaaccatggatgcatcaggagaaacgttagatatcattatatgtgatgaaaatgtatgagagaatgtgttgtggtcgaattcccccacaagcaagaccgagccaaacagtctaagagtaacaatcacctcatggttaaacatatgattggcctctagcctagaagaaagcacctcgggactttattcaatcaaccgtctcggagagagttcgtaaaatggctcgggtgttaatcctataaacacagtccgagccaatcgtgagaacgctgcgaaaaacaactatatcgcctcacgagacagccaactgagcttaatggacagtcatcaagcgcgccccgaaccggtacataccgtttgcctgaagccacctctcaaacgaccaccgagccgtgaaaagagccgaggcaaagacttgtaaaaaccattcattctcaaaggatcatttccggtaaaataggatcttttatgggactttcggaaatgataaagtagaatctttgaagataatgtcgaatcaggaaatcttcccaaagcctctgaagaataaggaaaatatctttaggacgatgatcctctagaaccgacttaaagataaatggaaatcttccaagaatatcgctagagatgcggtttaaggatcctatataaagcgcctcaaggacttctcaaaggagacaattaaatactcaaaaagacacaattttatacccaaagagaactacgaatggcttgatcccttcacagggtacgtaggcaatccatcacggatgcaactataccttctaataccctaattctttctctgttcttgagcaaaaccctaatgtatttcataagagattagaacctcttttgtaatagagtcttggatggaatacctaatgaagagaaattactagatttgttttcctcctttaaacaaatctttgtgtgaatccttgattaaacagaatgctattgattaaatatatgaatctatatatatttctgtttgaaatatataacaaggtcttatgtgtttttgtttacttggttttgatatagggatctaagatgcattgttccattagaaagcattatattggcaagtttcacaggtcactaaagatcggtgattggaagatcattgataccttcactttgagtccttcgtttgacaagtacaagatatcgagtttgagctatcgaatgggttttaaccacaacacatatgtgattaaatgtgatcatgtatcggatagtgtttttctggatctagcagattttgaatgggttaagtgataacactgtattttactcattttagacatgtatttatcatcatttagcttagtgatcactcattggttcatatcagtttgcatcacatttagcttattttgcacacttaggatcatcttgcatacatattgcatgttttggtgtattttcaggtgtagaaggagcttacaaggattctactcgaccctatactctatccaaccaggatggaagcagtagagcattctactcgaccagttcactcgatctaggcagccacagaggaggcagcaattcactcgacccatttactcaatcaaggcagcctcaaaagaaacttcagatcgatctactcgcccctcctactcgatcctctcctcgaccaagggcgacccactctaccaaacatgttgatctatcaaagcgtcttcggatcctcctcattccccactcaactagacatctgagcatacgaatatgagaggaagaagcatctattagactaattgatcactcggagcatagacacaaaggcgcagactttgtagcaccctctttactcgatccccaagatcgattattagcccaaaccgcctcaagtcacttgtcttctagtaaatctagggtttccaacattttagtataaatagatcactttgggatttgtccaaaggatatatgctttatctttaggttttctttgtgttcttgaatcttcaaaacttaattactcttaatctatttcggttttgcatttagttgttttagtaaagttgtttagcttgtttagatctaccttttggtatgattttagtaatttctgggtttgtgtttttgagaatgttgcatgagtagtgattagggttctggaggattgattagattagggtaatctctaggttagttaggtggttagtgtttaggttatacccttctggattcgcttggcccctatgcggttttcgctggctaatgtggagattcgatcatagacgtctagcgtccaaaagacgttcaaatggatgtctgacctacgaattccagagatttgtagactcgaccaagggattggcttgtctacctattggttttggtagattgtttcttaaaccctgctctgctatgtttcatcaacgagagttgagattaggaagtggtagagttatgggggtctctgtcacgagagtggattgacccggtttttgaatctatcgtcatgggtatctacctttcgcctattagccatttggtaaatcctagagttgtccttatcaatgaatccatccttagaacttcaattagatttattttcatccctgttgattgcatttttatttacctgttatttgtatcccctatttgtatcccctgttgattgcatttaggtttcttaattttgtcacatgtaggttctactcgacccaatgatcgagtagggctcttaagttcttatttttacttgtttgaatcctgacctaggattgttactagaaacccaccatcattataatttggcttgacttattagttttggtagattgtttctgtgcacatcttgattgctagcaatacagtggactgcatcgacatgtttgtgttttaggggaattgaactgaatctgacacacattcaccataagcagacctgaaaaagctgcttatcatactcctaaaagaatctaaaaccaacaaaccattgcttagaaacaataaatagctttgttagtatttttatggtcaaaatgtgtcacattccaatccagttgactaattataagatttagagatagattaggagtggttagacaacacatatacccattttctctcaaaagaggctaaaaccaacaaaatattgctttgaagcagtcaatagctttgttagtgtttctatggtcaaaatgtgtcacaatctaatgcatttgactgattatatgagttagagatagattaggggtgtttagacaacactaatacccattttctcacaaaagagacaaaaaccaacaaaaaattgcttagaagtagtaaatagctttgttagtgtttttatggtcaaaatatgtcacaatccaatgcatttgactaattataagagttaaagatggattaggagtgtttagacaacatttatacccattttctcccaaaagaggctaaaaccaacaaaaaattgcttagaagcagtaaacagctttcttagtgtttctatgttcaaatgtgtcacaatccaatgcatttgactaatcataagagttagagatggagtagcagtgtttagaacacatttctacccattttctcccaaaagcggataaaaccaacaaaaaattgcttagaagtagtaagtagctttgttagcgtttctatggtccaaatgtgtcactatccaacgcatttgactaatcataagagttagggatggaatatgagtgtttagacaacatttatactcattttctcccaaaagaggctaaaaccaacaaaaaattgcttagaaatagttaatagatttgttagtgtttctatggtcaaaatgtgtcacaatccaatgcatttgactaattgatattgttcaaattaccgagaactattctctcaaataaaagatcaattacagtattttaggatcgaattcacggagttgttttgttcaaacagtgagttaaatgtcgagattaagctagcagggtatgagtgaaatagttagaaaacaaagtaagaaaacagcaagatgattgtgttgtgaacgatttaataaagagctaggaacagggtattctcaggaaactattggttagtagatctaatgaaagctaggttgttatccaaccgttcttaaactcaaactctaatatcagaataaccggtgggcatgccgcgaaactccctatatctatagctaagaataaccggagaagccaagaaattatccacctaaagtgttgagacaacacttacacccatttctcccaaaagagattagaacgcacaaaacattcctgagaagcagttaatagccttgttaagatttctttggttaaaatgtatcagaatccaatgcatttgactaattaaaagagttaaagacggattacgagtgtttagtcaacacttatacccatttcctcccgaaagatactagatccaacaaaaaattgcttagtagcaataaatagctttgtgtttctatgctcaaaatgtgtcacaatcctatgcatttgactaattatatgagttagagagaaagtagtagtgtttagataacatttatacccattttctcgcaaaagaggctaaaaccaacaaaaaatcgcttagaagcagtaaataactttgttagtgtttctatgggcaaactttgtcacaatccaaagcatttgactaattatattagttagagatagattaggagtgtttagacatcacttataaccattttgtcccaaaagaggataaaaccaacaaaaaatgcttagaagtagtaaacatgtttgttagtgttaatgtgtcaaaatcccatgtattcgactaattataagagttaaagatggattaggtgtgtttaaacaacacttatacctattttataccaaaacaggataaaaccaacaaaaaactgcttagaaacaataaatagctttgttagtatttttatggtcaaaatgtgtcacattccaatacatttgactaatcataagagttagagatggagtaaaagtttttagacaacacatatacccattttctcccaaaagatgctcaaaccaacaaaaattgcttaaaagcagtcgatagctttgttagtgtttctctagttaaaatgcgtcacaatccaatgcatttgagtaattataacagaaaaagatggattaggagtgtttagacaacacttatactcattttatcccaaaagaggctaaaaccaattaaaattgnnnnnnnnnnnnnnnnnnatttgttagcgtttctattgtcaaaatgtgtcacaatccaatgcattcgactaattataagagttaaagatggattaggagtgtttagacaacacttatggtcaacatttgtcacaatccaaagcatttgactaattatatgagttagagatggattaggagtgtttagaccatacttatacctattttcttccaaaagaggttaaacccaacaaaaatttgcttacaaggagtaaatagctttgttagtgtttctatggtcaaaatgtgtcacaatctaatgcatttgactaattataagagttagagatagattaagagtgtttagacaatacttaaacccattttgtcgaataagaggctaacaccaataaaaaattaattagaagcagcgaataactctattagtatttctatggtaaaaatgtctcacaatctaatacatttgacaaatcataagaattaaagatggagtagaagtttttagacaataattatacccattttctcctaaaagatgctaaacccaacaaaaaaattgcttagaagtagtcaatagctttgttagtgtttctatggtcaaaatttgtcacaatccaaaacatttgactaattacatgaggtagagatggattaggaatgtttagacaacccttataccaatttttttcaaaaagaggctaaaaccaataaaaaattgcttataagtagtaaatagttttgttagtgtttctatgctcaattataagagttagagatagattcggagtgtttagacaacatttaaacccattttgtccaaaaagagggtaaaaccaacaaaaaattgcttagaagtagtaaataactttgttagtatttctatggtaataatgtctcacaatctaatacatttgactaatcataagagttaaagatggagtaggaggttttagacaacaattatacccattttctcccaaaagatgctaaaaccaacaaaatattgcttagaagcagtcaatagctttgttagtgtttctatggtctatatgtgtcacaatccaatgcatttgagtaactataacagttaaagatatattaggtgtgtttagacaacccttatacccattttcttgaaaaagaggctaaaatcaagaaaaaattgtttagaagtagtaaatagttttgttagtgtttctatggtcaacatttgtcacaattcaaagcatttgactaattatatgagttagagatggattaggagtgtttagaccacacttatacctattttcttccaaaagaggctaaaaccaaccaaaaaattgcatagaatgagtcaatagctttgttagtgtttctatggtcaaaatttgtcacaatccaaagcatttgactaattatatgagttagagatggagtaagagtgtttagactgctcatataccatttttctttcaaaagaggctaaaaacaacaaaaaattgcttagaaacagtaaatagctttgttagtgtttctatggtcaaaagttgtcataatccaaaacatttgactaattatatgagttagagatggattaggagtgtttagacaacaattatacccattttgtcccaaaagatgctaaaaccaacaaaaaagtgcttagaagcagtcaatagctttgttagtgtttctatagtaaaaatgcgtcacaatccaatgcatttgagtaattataacaggaaaagatggattaggagtgtttagacaacacttatacccattttgtcccaaaagagactaaaatcaacaaaaaattgcttagaagtagtaaacaactttgttagtgtttctatggtaaaaatttgtcacaatccaatacttttgacgaatcataagagttagagatggagtaggagtgtttagacaacatttatatccattttctcccaaaaaatggtaaaactaacaaaatattgcttagaagaagtaaatagttttattagttttcctatggtcaaaatttgtcacaatccaaagaatttgactaattatatgagttagggatgaattaggagcgtttacacaacacttctacccattttgtcccagaagaagctaaaaccaaccaaaaattgcttaaaagtagtaaacaactttggttagtgtttctatggtcaaaatttgtcaaactccaatgcatttgactaattataagagttagagatggattaagaatgtttagacaacacgtatacccattttgtcctaaaagaggctaaaaccaacaatcaattgtttataagcagtaaatagctttgttattgtttctatggtcaaaatatgtcataatccaatgcatttgactaaatagaagtgttaaagatggattaagagtgtttagacaacttttcctcctcctaaacctcctgatttcatcaataagaccttcaaatttccaaaaactgttttacggttaagcaagccacgagtttttcgtcgagcgcttgttctttcttctaatgcttttgcaggacaaaggagtattccacccatacctgagttccaccctgctgatgctcctctcttcctagatagacctcatacactaattgcttatacaccagtatggatgatgagaggtctttctccgcaatatttactgccaccatctgatccacctgatccccaaattccatcaaagtcaagctattgactataaacaagcgcttagtggtaggcaacacactggtttgatttttcttttccctttctttcttttcttttatttttgatttatttttcccgttttctctggatttgaatgccactggggacaatgtcgtttaagtttgggggaggttcttcctaatattagttttatttttgattgttattatttttcgttttgagtttattgagtctaaaaaaacaaaccaaaacaaaaacgtgtttgtttagtttagttaggaatcatgatctatatttctcttgattattgcctgattgctgagtgctgcaggttcga

SEQ ID NO: 37777 - DNA, 3427 bp, Arabidopsis thaliana landsberg
agatttggagatgtgttttaaaattcagccctcaaagttatgattatttgaggtatctgcaacctcttaccaatataggcgagaccatgcgttataatctctgatggtttattagcaaatatatcgtcttttttctctatggcttttcgattatgtattatcctatagctttcattaaatagggtctgtgagacctaggtttcctgagtgtaattcttagaatccaaagaattctatgattaggtctgtggctcgctaatgctctgtggctcgctaatgctctgtggatatttatgtaggaggggacagcctactgttgaattcatctttgctgctaccgaagaggcagtttttgtccatgtcattatatctgccaagtccgtaaagctttttgttatactgtttcagttatggtttagtgcttcacatagttattgaaactaactataatattttatgcacgaaggaatgtccgcacactttcaagtggcgatgctgaaagaatgttaaggagttctttgaaaaactccagttataggcttccaggttagttatttttccatcatcatttggattgataaattatcctacttgtctacgattttgatggaactagttctagatgtttgttgacctcttcttgctttgtactgttagaatactgtatagattgagagtttttttaactcaattttcaatgcatccactccaaaaagaaacctagtgtagtctagtgctactgctacctagcttcatcaagcaaagatttaacacctcatttttttgcatgtcacaagagcttttcgtaaatgtttgggattggccaagagtgaggataatagattatgctacatgtaattctatgaagccaaactttttgaattgatacctgaaatgaaatccgccttctacacatgcttaaagaaagataagagctttttatttgatagaaacacttctcacaggcctatgttattcccaccagttattgtttctcctcatggaatgcggggcagccttactggattctgtcccaatgaccttgtcaagcaagtctacttcaggtacatttcatacctttgctttcgaatgccaagtcaacattttttgtgagtgcgtagccgttaatctgattaatccaattttctcaactaatacttttttctcacacagttctggaaacttaaaaacttcgactggatatgttggtctcccttctcatattggtcgtgggtcccgtctgataaatggcaatcattgctacgtggaagttacacttggttgctgccaaaatagaaatgacaacacaagtcaagctaattcgacctttgcagttaacttgccccataaccagtgtcctgaaccttcagttgggagtaaagatcaccgtaaaggacaatcagatctttcatcagtttgtgaaaaaaagttcatctatccagctgaggcagtgcttgtaccaatcttacagtcggcatttgcgaaattttctttgaaaaggtaaattgactaggtgaggtggttatttagaattcattgagtacttaacggtaagatccagattggctatacataaaatttatttcgtttctgttgaattccatgtatgtattaaaacaaattgactctgtgtgatcgtagtggaagttttagtaattgtttcagacctatgttaaatagatgtaatagttgtgatctttcctcagcttggagctgatgcaaggtgaaatcatacttgcagattttggcttcaaaactggataggcccgtcactagcaggctcatctttgtttatgcactggtgagtctttttcatctatctcgtcgacatttgaagatcaaaagaaatccacaaaacagaggtcttgaaatgcccaaactgttctgagaaaccgaatgttttgtaatcttcattatttgaagcaccataggagtgagagctgtggcatttccgagttttgttccaatgttatacgtaacgattttgtttttcattataacagtctgtccatgatccctgtatatgtgaactttattttatgcagggctggtgattttgactgccttggtgcgtctgaaaataagagtgatgggttttatgaaaaaaatggttacaatagcagtggtagtagccgtaatagcagcattagttcaacaagtagcgcttccagcgggagcggctggaggatgacgtcaagaactggtgaccttgacgctgatgcagattctttgacgtgtaggcaatctggtcttacttgtaatgatgatcgcctaaaaatggtacgacttttatctatggaagggatggagtttgcatggtactgatgaggaaattgaattgtcgattgtagcactaacatgcttaatcaacatcatataatgtagttttccttattttataataattcacgaagctaaccaataagtaacataacattctttacagggttccaagcggccgcgaacagggatggcagagtcattcggtcaagtaggtactgtcactgatgcacctattcaagaagcatatatgtcaggatttgtttccactaaaactaataaactggtgttccaggcattgaaaatgatcaaattggttgggattgggatgctgatgatgatgatgatgacagagaagttggcatggatatcaaggcacttctttcagagtttggagactttggtgacttctttgagaacgatgctttacctttcggggaggtaattttcccgcttctgttactgatcataataataatcaagaaactattatctgcattccctatgctggtgaatgatctgtaggtcctgtattagctcagatatctagactgtatctcagagatgtttggtaggaagggttttctgcttccctttccccatttctgtcatgccttttattttgattcactcatattgctttcggtgtcaattcttatgtcatttattatgtttgtgtagccaccgggaactgcagagtcgcatgtgctcgtttttcctccagattctgctgatgtaggttccagtcccgtggatatgatggatgtatcagaccaaatcgttttgcctgttgggttttcctcttttgagagctttaatcctgttcccccaatcattgatgagtgccttattaaaagtcaagaagttctccacagcagtatcacttcagttccttcaaatcaaatgtcgatctcttcgactggtgagtttgatcatttactaaaagcagaagcaatgatgacctttgctcctgagtatggagctgtagaagcacctatgagcgagatttcctcgacgtttttcaaaagcccatatcttcccaaatctcataaagtggagagttcaaattcaagaacgagtaattatgtctatggagccacaccaccgaccactgattctgatggagcaggcgatatgattttgttcg

SEQ ID NO: 37778 - DNA, 2209 bp, Arabidopsis thaliana landsberg
tctaccagtttcgtagattgcttgggatataagaagggttgttcttacaaatccttgcgagaaaaggagtattattgttcaagttaatagagagaaatgaggagaataaagtggctatttctgagagacagaagtggctttgcttaccattttgagcgagtcttttgtgacagttaaaatcgttgtcttaataataaatcattttactgttaaaaataactcaaaacgaaaaattaatattgaccatggaaataaagaaaaaggtttaggtagcaatgatgatccggtttacaagtacgcaacattatttagttcggtttgatcttctgcaagattagatttaggattgacaaagagaataaacaaaaagatgagagtttttgtctttgttgagtgagtcacaatctacaaccacagaagggaggaagctaatatgtccacatagttacaagtctaaaagaagctataccttgatcaacaaatcagtgaaaatgcagtgactttactcaatatcgtcgatccaatcaccataaacacgactgattttatctggtcctttccatttccgttgagttctgactccgttgggtttctgcgtaacagcactagatgtccgttgggatgagactccaggagaaacaaggctagtcactgtgtctacttgtcctctctgctttgtgtccaaagtggcggatgttccgatcttacattctccttcaacgagtcctccgccaaatgtatgcaactctgcaaaagataccataaagactcaaacttttagcttgcgacgattgaaactttctgcatttccatagccattaggaacaagcagatcaagaattctttccaatcagaaaccaattgacatcatcacgtaatggcaatgtagcaataggaaacatttcaacaatctcactcgatccactttaagtccattaatagacattgtcaccaatccattcaccaagcacgattaactaattggcacccacagtccacttaaagaatcctcaaggaaaccaataccattacatatacaattcaacagacttaacttaagctaataaagatagttctagtgttcaaagatgatctcttagtccagagaattagcatccattaacctctagtgacactctaaactcacagttcatcaagcaacaccgattaaaacccatttctaaactacattcgttggggttactaatagatgaaaaaggccgtagctttacctgaaggtccatgagcaaaatggcagtgagaaccaaaaggacaatagccagtagtctgccacttattgcaaatccttgtcttccaattcggagacttgagagtctgagcaacattgccacgagggcctaaactaaccgcaaagctttctctgtttcttgaagcctctgtcaccgtctcctgccaattgggcggcggcggcggaggaagacggagctcctccgcgctgtgagcaaagtggcaagagctcgcggagtagggacaagttccggcgcggaatttgaagcaaagcttcgtcttgaagaacgatttcccgatctcggaggaggaagatcgtgtcttcttgctcggagactctgcgccatcagagtttatggcccagacacggctgtaatcatcctcagtggcccagacggaactgtcgccggaatttggaaaacaattctcaggcggagggtcgtgggtgattctcacgtgaactgcatcactgccgtaatctcgccgatgactcatcacgtcgaccaagaaaccctaaaccctaacccaggagtaaaagcaagaggaagtggaaagagatggagagagaaagagtagatgaagaggaagtggaaagtaaagtagagtaaagccactcaaaatcgtactagtagtagcatttatataaggatcaaaatgtgattagctataaaatcaataatggtcatagattaaataaaagaaagaagtttaactaatgttgataattaagacgagtaaaacaaaagttgttaggcagagaggatttctatttttaagagcttcacttgctctactagtttagcaaggtggggaaatgcactagacactctctgaaacgattctaccatatgaaacccggcttggacatttcaagaatccaacccaaacaagatttacaatgctgactaatattcgaacaccactatattcaattctcaaagaaaacagaattgtctctttg

SEQ ID NO: 37779 - DNA, 2576 bp, Arabidopsis thaliana landsberg
aagatcctgacatgacatatagatagattcatgtaatagttaacttgattttagtactacgtgagtttttccctccgtagtatatgacttttcagtataccccacgatactgcattactgcttcggtgactctcaataaagtgcaattgagatttctcggttcaataaaacatacatcggttaggcttaatagaataaagatattgggtcttaatagttaaatgggctgtaatattggcccaatgtaaaacataagaagcactgacgagaaagctggagccaaagtcgtaacggaggaagaagaagatctgcttctgcaaaaaaccttatcctgctatggcttccactttcgtctgctctctaccaaatcctttctttgcttttccggtcaaagcaactactccttcgacggctaaccatacgcttctcggtacttaactatctgaaagttattttgatgtttcttccttttcggatataaagtttgtctttttgataatttgtttcctcgtgtttatgcaggaagtcgaagaggttgtcttagaatcaaagcgatttccactaaatgggaaccgacaaaggtactgtcttttccgaaaaatgtattggtttctctgtttttaaaaactggtgattaatcttagtgttgaggtgataattgcaggttgttcctcaggcagacagagttcttgttcgtcttgaagatcttcctattgtcagtttagctcctttattgtctgaaatgtcatgattattatcaataagctattaatttgatgaatcactaaattgaattccattgccaaaaacttatgggctcttaaattgttattctgaagaaatcctcaggtggagtattgttgcctaaagcagctgtgaagtttgagagatacctaacagagaggtaagtcatttgctcttatatgctttatataacttgtgttagagcatctttattaagaatagagaatcatttcagattatatctgttggttctgaggttggacaacaagttggacctggaaagatggtaaatgtttcttcttaagtcaaagacatagttatttatccattgtaactaccgtgaatcttgtctttatctctttctcctttgcctttcacaggttttgttctctgatgtgagcgcttatgaggtgaattccgcttctctgcagtgtatttgattagttgttgtcctgtccttgtgtggttttaaggaatatagaatcgaacatctctgaatttgtttctcaggtcgatttgggaaccgatgctaggcattgcttctgtaaagagagtgacttgttggccctcgttgagtgaagtcttgtccaagagggagaaatttgaagattttacaagttttctgtaattttcagacagcaattgttgtttctagttaatccttcaatttaatatcaattgagatcactttcagagatagtcatattcaaaaaaaaaaacaagttttctctttctccttcttccggtccaacatagcctccatgttagcagcctcgactaactgacaaagctcgatcattttattgactctgtagcgtagagaaatcggacggtcaacaatgagatattttggtattataggaagtttccgtgtgagagccgatggaagtgaggatagatctttcccaagtggatttctagggatcgaccgccacaagcaatgaagatgaactaggttttacgaaacataagagttttttatagtcatgtcaaaaaaaaaaagttgcgatttttaaaacataaacggagactaaaatcaaaactcaaaaactcggagctcgatcatgccttcttttctctttggagaataccaagccacgattttgccagactcaagaagcctcaacgagtaattcagactgtatatcacatcttccatgcgtgcagctcctacctgaaactgcgagtctactttgaaaacaatcggacccgcaacctgcataacagtgtgattagtgggaattgcttaaacatcatagactcttttacatcttttgatctttggacaaaagcttaatacctgttgctggaatatcaggttgagtctgggagaccacaatgtgtcgtctgagttgttactacttgcatggaagagttttttagcaagggcaaaagctgagggtaggtccacgcgagcatctactcgggtaagatcgccatacaacttactaaaccgtcctttttggaacgtataacaagcagaaccaaatacatctgcgcttatcggactccgcttcttgccattaaccaacatgcctcggcctgtgatccaagctgccaagctgcttcctagagagtgaaacattgagagaactcagcattcaattcaaggtcaagaaaagaaaaggaacgagacttctttaggggattggttttttaaagagagtacctactattcctgaaattgctgcatgaggctccttgagacgtaaatcataaggcagaaacacaggtttatcctcttcttctgtgttgccttctttctcttgtggccttcacaagtctctggtaaccttgtacgaaactgcagccttggcgcataaaccaggcat

SEQ ID NO: 37780 - DNA, 3547 bp, Arabidopsis thaliana landsberg
gtttcttctcatgttatacatatagtgtacatagcttatagcttgagttgcttcagattgatccgttcgacgggatatgtatatgcctcgaagttgatttgctgtcttaagcaacttagctttgtgaatgcagttatgagatcaacctacaaacatattcataaaccaaaacatgagcttgagtttgaggtagatgaatatatgattaaggcaaatcgagtgaaaacgaacctcgtaatcagtctgagatacggtttcacggcttctttgatacttctgaacccatggagcaacttgagggtcagtagctaagagctgttctgttgcagcttgatcaggacccaagaatgcagacattacagctagctacaaattcctcatacaggttagttacttcgagtgatcctagtagataattctctgtttaaaccgaaaatcatgtacctgacgaggacccaatccaacggcaatgaacttatctttcatctcttgcacagttgctttcccccactgtgggactctgccttctggatcagcctctgttgtatcactccttccaaaatttctatcaaacaatccccactaacagattcacaacggttcagtatcgatttgaacaaaacgccgcgactcaaaacgcatacgatagcattgtttacctgaccagctgaaccatatgctgtgtatagtaagttccccttctcttcattcccaccacatttgcggatagccgatgctaaatacgtaaacttgaccgctgattgtcctacagaaaccaacccaagaaagatttcagttatccacaaatacaataatgctactcttcatgaacaagttttggtatatactataacatcacctgctaattgaatgatatctgcatatgaaataggacctcccttagagatagagtcaatctccttcttcacttcctctatcaaactcaacccatcagaaagtccctcattctctgctctacttagctcagagcttcacaaaaagaaaaaactacatgagacatcatgtaaagattactcttataatgttctttagatcacatacctgaaccgaatggatccgttggctcccccggatttcgtagcctagacagaaagccagtatcattaaagggtaaagattatgcaatcacaaaagagatggacaagagcattgtatgaagcctgaccttatcataagtcatagcatcattgagagctagtttgagtaaggaaggtacaatctccggtttagccttaatggtggtcgaaagcaaaatcttgatctttgctgcataatgaaaatgaaacctttagtgccaataacaacctaatagtaccatacttgtgttcttgtttcagatactcacattgaaactcggatcgttgtctacgttgattcaagtcagcagcttttgcatcacccacattgttaatgaaaccgttgcctattaattcctaacaagagagatcatcactgccaagaactcatcaaatgtgacatagagagaacaacttcaagaagatgtagccacagactatacattacattatctcatttgtaccaatgtgtatgtaatttttgatcgagtcaagtgttaaggtaccattccgactgcagtgccggcgaatttgagaacatcacggcggtggaaagctaaactttcaccggaaacttgaggttcaatcttggaacatcgtataacagcctgatcagaagaagaattgttagcagaagaaatgtaaaatgggttagaagtaaagaatgtaacaatggttgaaactcacagagcgatgagaagaagaagagagtgtagtgagatgttgatgattggttgtgttggtgaaggaaggaacagtggagaggaaggacactcctcccatttctggtttgtgatgagacagagaagagagaagaaaggagaaagagttgtctgaagaaaatggagagtgcgttttggttttgtgaaggatacacttttgtggattctctgttatccatatctcccaatcataggggttcatttggtttcatcattaaactacttatttttttcaataggagttttttaaaaaggtcaaagattttttttgaggttaaaaatcccaaaaaaaactcaaactaattttaatttggaagtttaatacccaatatttttagattggaataaaaatacctcatctaattatttgtattcataaaatatctcagatacaaattattggtagaatcaaacccaaccgttaacgggcgttacagaattatttgacggcgttaaattttaactctaactagttttatatatatatatatatatatatatatatatatatataattgtttgtctacactaaacgaacaaattaaccccagttcgaatccctagtaaggccttttcttattttcgccggtggttcttaacagatccgccaatcacctcatctccacctccaacgcctccttcttgccctccaccttctataactccacttccttcacctcctcagcctcaacctccgcctcaatccaccccaactggagattctccggtggtgattccttttccaaagcctcaattacctcctccttctctttttcctcccccctccttagttaatcagctaccggatccaagacctaatgataataacatacttgaacccatcaacaaccctatttctcttccgtctccgccttctactcccttttcgccaccgtctcaggaaaattccggcagtcaagggtctcctccgttgtcatctttattgcctccgatcgttccgctaaaccctaattctcctggaaaccctttacagcccttggattcacctctgggaggagaatcaaatcgtgtaccctcgtcgtcttcttccccatctcctccttccctctccggatcaaataaccattccggaggctctaatagacataatgccaatagtaacggggatggtggtactagccaacaaagtaatgagtctaattacaccgagaagacagtgattggtattgggatcgcaggtgtgttggtcatattgttcatcgctggcgttttctttgttaggaggaaacaaaagaaaggctcttcttccccgcgctctaaccagtatttgccaccggctaatgtctctgtaaatacaggttaatatttttaccttttggtgttgtcttaaattggctcttgaaatcatgtcctgctcttgattttatttttgtgtacttgacccttaagtctagttcttgttcttgattattgtttcttgtcgcagaaggattcatccattacagacagaaacccgggaatgggaacagctcggcgcagaactcttcaccggatactaacagtcttgggaacccaaaacatggtagaggaacccctgactccgcagtaatagggacttcaaagatccatttcacctacgaagagctaagtcagataactgaaggattttgcaagagctttgtggtaggagaaggcgggttcgggtgtgtatacaagggcatgctattttagggatagcccgtagcgaccaaacagctgaagtcggtc

SEQ ID NO: 37781 - DNA, 4365 bp, Arabidopsis thaliana landsberg
atcccctattctccattgtaagaaaaataaggaatgtaataatcacttgttttttgaactatatgtaataatcactttatcaaaggtttttaccgaacccgagcattttgaacatcacaacatgaaggtttagatttatatttaaattatagttgaaccagctcgcagtttgtgctgtccatctcactggcttacttcctttgggccttagactgttaggatcgtttttagctggtaaaggtcgagaaaagtgggtagctgcactgctaaagttcaaaggaaagcaaggtggaaatataatggaagtatggaaacttatggaaccatcaggagatagaggccaagaggggtgggaaactgcagctgacataatggaaggggagggactatcacaagataaaggtcaagaggagagggaagttgctgcagagtgcagacattatggtagggaaggaatcatcatcacaagacaaaaaataacagtagtgtgaagagtcacctgcacaatttatctttaagcttgcaaacattagtgtccaaacaccacccccacccccccccccccaccccacccccacacactgttctcatgtttactgaaactgtaatgcttatgttgttccgtttaataaacatgcgatgattattatttcttagaacagagaatcactgaaacaggtttgaaaagagaggatgttatatctgtgaatagaaaagacaaagacaaagtggaggaatcagaactcagccacggttattgctctgttgagagtctattggaaatttggctttattatgatagagagcaatcagaaatagataaaattggcttttagtaattaatgtttctagggatgatgattcaaatttattacaatagctgaatacagatcaacaacaacacatcaaattgattcaagatgttcttaataaatcataagaatttaacaaaagcctgcataaccgtaaccgtaaagttcattctgcattaactgattcaaccaggggttcttcacagattcttctaccgccgagtaatgttgtgtgtttgagacgcaaggattttgaaagctgttgctattgatgttacccatagacatgttttgatcacaaccataaaactccttgtacatcaattgattcaacccaaagttgttgacagattcttgtaccgcttctttgtttgagaccccggatcttgaaatttgttgtttgtgatgtcacccatgctcatgttctgattctgatcataaccacaaatctccggcttcattaactgattcttcaactcagattcttcaagtaacgctgagaaataatcctgattgaaatttgatgcagagactgggatctgagacagagtattgtctccatggttatacataaacagcgagaactggctagggttcaaagattgggtgtaatgattcagagaggatggtgttaaactctgatgatccggttttgtctgattctgtttctgcgactcaagaaatcgaagcctttcttggaatttagagacatggagttccaaggactgaatcaatggagaaacttggtcgggagggtaatgatcagcgagtggatacttttaaaacattcacgttcttcagacaagtcttcctcttcttgttcggattcttcaaacccttgttcttcttcttgttgaggaacccatgaagattaacgcttttcttgcgtctcaatgcttcgttcaatagactatacctaagagcaatgtctctcactttcactttctccttaggccatgtcttaagttctccgtctggtccgtaatagataacgcaggcttcgatatcacaaagagtgcaaagctctgaagctttcttgaagatggtctcaagcctattgctcaaacttgtgaaagcgagtgaataagaagaagaggaagacgaattggaacaacgagaggaagaaggtaaagatcgaatggtcgtcatcttcttgttgattatctctctgtttttttgtttctagtaattgaaagcacgaagacgaatggaattgagagagtgaaactacgaattaggtttaagaaacccttagaagatgatgaaaattatgaaagtgagtgagacaactttgtgaaatagcgatatacttatagaaaatttggtccttaggttaggaaaaaaatgcgttttattttattttttcactctcctaatccgtaaaataaaatctcgtgaagatttaatttccatatcttttgcatagattttaatttagccgttaaggactaataaaaaggaaatagttttttttttctactctcactctctcttaattaataagatctataaaaaaagaaagatttgcttgtctatatatattcagataccctttgtatcattatgtacataatagctcttaattaataatataattattggatttgctaaaaatttgtgacaatacaatgacaatctaacaaaaatcgaccaaaataaaattgagaaccctccattaaaaaatgaataaaagattttgcagattcatattttctttatttataagcattttatcctcttcatgaagtatatgaaatgtggctctgaaaaatccaaaaaaagttgtgtccttcaagaatgagacttgatgattaatataaaaagccattacaattatctataccaaattaagtagaagttgcatgttcgaagcaagactttgtttttttgctttttcttttcggtcttcaagaaaccaaaagagaagcaacgtttatattaagacaataaaaattggaatacatattagcgatgatggtctacactaattcaagtgttaatagtactatgatcttaattgttagtggaatacgacgtcgctgacatctcactccccgtagtctcctccatcaccattgatctttcattcggaacctcatgagtcaacgctccggtcaagttgttaaagtagttatactcattgttgctcaaaaacagagcatcccctgttccgttgtttctggctgtgttgtacgggactccgaccatatgagacgcgaagtaagaagcagctgattctgtgcagcttgagagaaagaattaggttttatcttgttgatatgtggctgagaaagctaagagagttgcagtgttgtgtgactgtgagttgtattggttgtgaaaagatagataagcggagttagggcggaaatgtaactagtaaagaagtttacattgcaattgggttgtaagagaatggacgaagagtctatcatcttcaaggaactcttgagatttaggagatgttctgcttcttgtgaagttgttgttgaagtttgaaaggactttatatacacaagtttctgtaacacttaaatttgcagtttccttcctttttaaggaaagttccttttttgagaacacttgtaggtttttttattcattagatttcattttattaatctctcaccaatcctcatcatagtcaactctcatctctagtttagatttttattttatctttccatccaaagccattgtaaacgaagctttcctaagaagtcttagagagaaactaaagactctttgtagcggatctgcgaaggcagagctattggtttgtttggttattggtttcttcggcagctaagaatcgaccattttggtgaagatagcaaatgagtaaccaaggagcaattcgtagatctggagaagataggataagtagcttacctgatcatttgctaagtcagatactctctaatcttcctacagagaatgctgttactactagcattttgtccaccagatggaaagatctctggctttcaacccctgtcttggatatagacattgatgctttcgatgatgccactacattcatcagtttcgccactcggtttcttgatttctctaaagattcatgcttacacaagctcaagatttcttttcagatggaagctgttgatatgtggacaatcataccgtggatcgaagacgctgttaagcgtagaatccaacatcttgaagttgacagtcgtattgatcatatgattgatacgctgcctctaaccgtttacttaagtgagagtttggtttcattgagacttcatcttgtgatgctgcatcgtttcgtgtttgtgtcattacctaatcttaaggtgatgcatttagaagagaatatctattcttatgctgagactatggagaagtttatctcatcatgcccggttcttgaagatttaactgttgttagaaatgtagatgaagccactgagaaggttttaagggtgagctctcagtcgctaaacagtctcaaaaacgttattgatagttccgagtgttggtataatgatgatagtgacgattggaagagttgtcattgatgctcctc

SEQ ID NO: 37782 - DNA, 1237 bp, Arabidopsis thaliana landsberg
atgggatcccactagttaaggttgtgtttccgttttagaagatatataacagaaaattactcaatgggattttggctggactatctaaggggtgagaaacaaaaagaagcttggttagtgttttaggagtcaagaataactaaatctcatgtatatgattgagtataagaactagaactgcaataggatccccatagctaaagtaatgttaccctgttaaaagatccaaaacccaacactcatagggacttcagctacaccattaaagctttgagaaataagaagagtcttggttagcattttggagtctaatataattagactgcatgtatatgattgagtataggaactaaaaccgcaaccggattccagaaggtaaagtagtaattccttgttagaaaatcagaaataaaaatgcataaggactacagctacaccatcacagctttgagaagtaagaagaagcttgcttggtgttttggaatcaaatatgactaaatgtcgtgcgtatgactcagtataagaactagaaccgtaacaggatcccaaaatttaaattagtgttttcttgttaacagatccaaaaccaaaacttcatagggactttggctacaccatcaaaactttgagaagcaagaagaaggttggttagcatttttggagtcaaatgtgagtagatgttgtctatatgattgactacaagaactagaaccacaatcgaatccccgtaactaaagtagtgtttccatgttagaagatccaaatccaaaagcgtataggaactctcgcaaaaccatcaaatctttgacaagtaagaagaagcttagttagaatttttagagtgaaataagactagatgtcgcgtgtatgatagagtacaagaattagaaatgcaatcggatcccatatgctaaagttgtgtttccaggttagaagatccataaccaaaaacgcaatcggttcatattctttggtttctggaagagagttaaggagagtgttcgtaacagagaaatagagagttagtgtagagagtgatgggtgatcaaggaagacgattcccaacgagatgtcgatcggtgaagctataaggctgggtacatcaaagactgctaaaaatcctggaagattatttcattagtgtcataatggatctgttgaggtaatttcaattttcatatatgttttattgtgtttgaaacattattatgagtttcgttttgtgttagaaagtcag

SEQ ID NO: 37783 - DNA, 2844 bp, Arabidopsis thaliana landsberg
  unsure (1)..(2844): unsure at all n locations
tacattaaaactccaagacgctaaataatatcaaaatgataagtccttaaaaacatttctcaaatgtctagatctttgattctatatcgggggagaagaaatcaactgtgaatagaccaacagcgttgtgtataccttagatccatggataacaactctaaaactttgcgatgaacttttatatagctgatccaacttttcccgccagcttgcagcttcattgtcctttgggacagattcagcaaaaacaagctttcctatagaaaaacatccaaagtaaagtccagaaccaataagtcaacgaagctgtaaagggaattttacacacctagattcttgtaaatttcttcacattgttccaatgtcataagcttgacaccaagggcaatagctagcattcctcctgttgatgtgccacatataaggtcgaatagttcatgaataggcttgccacttcccttctcaatctccttaagaatctgcaccgttgcaagacctttcattcctcctccatccatggtgagtatccgcagtccctgttttggtacttgcctgccttttatggaacgtcgcagaatttcattttctcctgtcatcagaagaaaaacgttctatgtaatgcccaaccagagtatcaagcaaaatgatgatttgatacacaagaaacacaccaagaattgccaaagctcgagccgcagctttgttgactcgtggttcaggtgtgacaattaaccgcatcaataactctctcaaactctctgaagtaatcagaatacgacgattttctaaacagaaggccaagttcccaactgctaataaggcttgtctttgaacctaagggaaaggatactcagtcgaagaaactatagggttttcttataaggagagcaaaaatgcaacaaacttacttcaggattcttatgggcacacaaggattttaaagcttttagcatatccttggtgagcatcttctgagaaacggaatcagatacaaaagctaaggtgaccacgacttgtaaaacggatatcacttcgtctggggacgaagatttcagaactgtttcagtcggcttcattatatcacacttcatcagctgcattgctagccaacatctcgagcaagagatgataaagcaacacaagcttgctcaacctatcaaacctgtagttatggtaattgttcccaaaagaaagtagaagttttttcaaaccatagcacagaacaaaaaccaacataccacgtgttgattgtcactagttatcatacttataagctgcctcaccgcattttcatctttaccaataacagaacgatttccttcatcttgcattatcttcaccaatgtagatgctagaagaggatgatgacaagacgacgaacggaatataaggggagagaaggcactgagcttgtgcctagatgccccaaaataggaagtgttttctgtctgcaatcatgaaaacttatccttagcataaacttagtgacctagagaatgaaaagtagcagcagatagtctgatgagttttcttcttacctctatctgtacatttactgatcttagattctcatcagacacaattctgatatttacaagagacaagtgacgaagctgatgcaaaggtaaaatttccggaaggaattcaaggggattaccaaaaagccgtagaattcgtaacccagccatcgccctgcatttcaatcgtatacttaatcagcatcctaactaacttcaagaagaaattaaaacagtaatatcagctctctgccccaatgacctgaaatcaagaagaggccggacaagtttattgtgttccaacgacaattcaacaagacctacacactgtcttagttccactacacaagagtttcaaccaacatcagctgaaaaatctaatgattccaatatgttttttttttatcattaagatgcgataacggtcacctgggacagaaataagcatgttattgtcaaccctaagtatcttaaggttcttcagcttccctatctcaggtggcaaaactgacagtttattgtgctcaaggcatagcttctcaagcagaggtaactcagtcacttcaactggcattacctgcccaacattgcaaagcattaaagacggatcagcataacccaattcctaatcaaattttcttccttggattcaagaaatgctaaaagtaacataccaataaaccacaaccagatagactcaacgaagtcacagtcttccaatgcaccccacaagaagaagcaacgtcgatagccggcgcaggaatggctgcaggcatcatatcagaccgcattagcctagtcaaaacgccaacaccgtcgtactgctgacccgaaccaaccgctttcatcaacgtaactgctcgtaatggctctctccgtttctcaactctcatctctaatccaacattctctataccaccttcatcgtcatctccaattcccttcaatgcaaccactactgtatcatgcggtgcaggcaaagccaccatcagctgcgattccaatcgcaacgctacctgatcctccgaatcgcctgccgtccaatctaaatcaatacggaannnnnnnnnnnnnnnnnnnnnnnnnnnnggagaagaacatgtagaagacatcgacgttggagatccgaatggtgacgccgacggtgattgaatcggatcgtcgtttagatcatcgacgccgtagctgagacttagacggaaactctccgatgatctcttccatcctaatccccacgacatggcgaaattctccgatcacctctggagggtgaaatcaaagccggagaatctcgaatcaaaattggtaattggtgattgaattcgat

SEQ ID NO: 37784 - DNA, 3026 bp, Arabidopsis thaliana landsberg
agggcttcctctacactactggaaacctgaaatggtcattacattggagaagaagtagggatctttcagggacatgaacttactccctcttgagcaaagataagagttattattgatggtctccagcctttagttaaagataccatagtggaatttgcggatggaagtaaggttatggtgtacctagattataagaatttgaagaaccattgtcttcattgccaccgactctctcatgaaaagaaagattgcccagggctatacgcttcaaatgataaacagattccagcagcttcaacccgtaaagatcctcctggctctagcttcacggctacctctccccaaaaagatcatcgtagtggtcaaagagaactttatccacgccaaatgagttctgccagctatcactccaatcgccctctatccactagaaggtatgcagagcggactcagcgggagaactctccatctaactctggctttcactcccatagtagaccaagatatgaagtctcccaaagcaaagccaggagccaggagccaggtgcccaagtttcagtcaagggagattagagagtttatcccaggaaaagataagcatgttagaggacgtgaagatcattcttggcaatggcgtgagaagtcaaaatcagtatctttacagaggcaagaagtctctgatacctccaggagtagaagaccacctctagaacggaatcttgatactaatggtttttctccaagattggaatcgcctctacgtccttcgggagagattgtagtacacagagcgttagagagccatattccactcccgattcctaccactgaagaagtgatgggtgagcttagggaagttactgtccaatatatggcgtgtgctgacccaaatgagagtgcaacgcgtagagcacgagtgatgcagggtgaatctagagatatgatggcggaaactgctgctttgattattgcttctgctgctgagtctcatggcaacgccggtctgcaggtctcaacctctgttcagagaactttagctagtctggaacctcttgagtatcaagaagaagaggcagctttccaggctctaattattcaaaagaaaaggggtcggcctcctctgaacaagcaagctactaaaagttctattaatctgacaggtgcaaaatctcagaaacgtaatttggtcttggctcaagggtcccctaaaagaaaaccaggactggctagttccctccctcctagtgaggagaatgttgcttcgacaccagctagatctggtggctcaagagatcctgccacccaggcgggagataaccctggaaggtcaaaacagcaaaaaccaaaaactaagatcattcctgcaatcaaaaagggaggggtggattttcagaatccaccaaaaccccttccttaagggttattagctggaactgttgtgggctgaggaaccccatgacagttcatagactcagggaaatcagacttggtattttccctaacattttcttcctcatggagaccaaaaacaatgatgagtttgtgataaatacctttgcttggatgggttattcttcacatttcctagtgtctcctcatgacccaggagctgggggacttcttttattctggaaacaagaaattgaagtttaaattttatcctcttgtcagcacttcatagatacgcaaatcaaggcaaaagggaaagctttttatgctacttttctctatggcaaacctgatagagagaagagagcagcagtctggaaccagatcaggaacctcagactagatattgataaaccatggtttctaactggagatttcaatgacatcatcaacaattctgaaaagatagggggtccagccagaccagaagggtcattcacaaatcttagaagtttgatgtcggaatgtgatttgtatgaccttaaatactcatgcaacttcatgtcttggcggggaagaaggcatagccacttagtgagatgtcgcctggatagagctatgtcaaatagctcttgggtggaagcttacccatcagggagatctgaatatttgagatttgaaggctcgatcatcgtcctattgtcacctcctttgatcctgtaagacgaaaacaaaaaggattgtttagatatgatcgtcgcttaagagataatgaggacgttaaaagactagtgttgtctgcctggaatctaaatcagctagactcagttgagaagagattaggtagatgtcgatctgcaatcattgaatggaataaagagcagcaatgtatcagtaaaaaacatattgaatagctgcagatgaatctttaagaagctttgtcttcacaagacttagcagcagagtgtgtggagctgattagtaaagaattaagcttagcttaccaagcagaggaagagttctggaaacagagaagtcgccagctgtggttagcgcttggtgaaagaaactctggctactttcatggtgctactagaggaaggaaagcaataaacagttgttcagtgatggaaaatgatgaaggtctaattgtttatgaagaagatcaaatagctgtaaccattgctgactactttaaaaagatttttacctcagaggcttcagtttgtagggacatagtcctggaagcgctgcaaccttgtatttcccatgaactcaatgaatcactcattgccccccccccttcaacggcagaaattaaaatagcttgctttgcgattcatgcggataaagctcctggcccggatgatttttctgcaagctttttccagtcaaattgggagtcaataggaggtgtagtggttcatgcagattcatagattcttttcttcagatgtcttgcttgcatacatcaatcgtactcatgtgtgtctttattcagaatatctctagtcccagaagggtgtctgttttgcgtcctaaggctctgggttctgtgatctacaagatagtgtccaagctactctccaatagatggcagccagtcctgcttcacatcttgatcgtgataacctaat

SEQ ID NO: 37785 - DNA, 2373 bp, Arabidopsis thaliana landsberg
gaacttggaggggtaacttctcttcttccatgaagaaatgtccaaatcaacaaccattttatatctatacacttgctccgattcataatatacacagaaataaaccaaatcaacatctattttttacgtacctagttcttccatggtgacttttggctttgactcagaacttctggtcttaggctgaacgaagacatgtccaatctgagcagaaaagagacagaaaccaacagcccacgcaaatatgcttcctgccaagcctgaaattcttaaggaagcactgttcagtgtgaagtgtttctttcttatatcgatgcaggcttcttcaacaatttactacaaatttttgcattgaaattttgcactttaacggttgacgacagtattgcatcacccaaaattggttttcttcgtgtacaagcttccataactttgtagaatagttgcgaggaaacagcagcaaaccacttccggattccctcctgaggagaatccggaacagatatatgacgctcgagtctttgtaaacgggctttaagccttcgaatgtcatattcatgagactgcagaataggattttgcacctgaaccaatgacaagaaaaatgtttagttttgtttcagcatataaccaaatagaaaaattatggtttgtctgtttgttcacttacaattgaggcaggtcttccttttgtatccttcacctttgctagctgatgttcaacctgatcctgtttgacatcttgaagtatttcacagataggtgtaattagaagaagcttttctgtattcaatgaatcgaattttgctttaatatttgtctaataatttaccttcattaacctctccatggtcagcgtctttgttctctgttaagatgagtttactcggcttagtgaaaaccttacaaggctggtcatcatggagagaatcaggtcctttactcctctcatcatcttgcatgttatcattttcatcctcacaaggatcataaggatcaagcacgctcttgacctgcatagatcatccacaatggatggacatcataaagacgagagaaacatgtctgtataaagagtagcagcctattcttccaatcagattacctttacagttaacacgtgatgttggctgttaacattaccaatttccattctcagaggaatctttggccatacatactgagcttcttcttcttctgaacagcctctgaagaaaggtggctggtaatctggtggctgcaaaaaggttcaaataagagctgtcagcctttcttatgggcaatcaattttcagagtagaggaaagtgagataagattattcgaaaagaaagcaaagcataccacatattcgtagtaaagaagcttcatcaaaatggtgcgctggacagaagcaaaaaagtaacaaagtctgtaattggcaatatggaaactgatgtaaactgaaaccctctgataggtaacaaatgcattacttcttcgggcattctgtccaaagtcttcatcaactgaactagggtatgaaccatcttgcaagctgaactcgtgttgcactacactcatgaaaaattttaagcaggtatgcaagataaacatcttagacctcacaataggataaaaaatttcacctcatttgatttagggtcatgtcagcaatggagttgtcagcagtggagttaagagttcccccataggtattgattgtagtaatattgatattcatccggacatcttgactgtcagaatctgaatagctgaaagaaactgcagtaacatagtgagagtatcaattaatcagaccattttaccagcgaactacactagtattgaactaaccaatcatctcccaagaacttagatatgtattcctcaatcaagggaccatctactgtttcacatatgtagaatatcagctttttcaggtgtttcttatgcagggcatcgtagacccctttctccatccagccaatcaatcggcgtgattcagcgtccataggcattagcttcttcatcttcagatctatattgtgattcaaaagcgtcaggttcccattaaacagttgtagaaacttccatggttagtgtctcacctaaagcaggaaccgacatatccttgaaataccgcacgggaaagaggcctctgatgtaactgatattgaagatggcagtacggagcaattccgtagtctatttcaacacaacgaagaacaaaacaaacaagtcagagccaaaaatatatgtatcggcgtgattgagaatcgaaagacgaaaatccatctctagacgcaagacgctacacacgcaaactaaaaccagctgcgaaaatcaccagcaaggaacgagacatttgagctagaagagtgacttaccaaaat

SEQ ID NO: 37786 - DNA, 1884 bp, Arabidopsis thaliana landsberg
ctttagtatctcatctgggagaagaaaaaataagtttttaatttctacttgtttgaaagccatgtaaaggctcttacaatattggtagtatattagcaaaggctcttaacaatatttctattactgaatttgaaaattttgaagttaagagcttaggtaagagttaaaagtttaggcaatgtccaatggtagtatttaaactggggttcttaaaaataaaagagttcataatcaacatcaacaacttctcaaatgcaaaacaaagattcataatcacagtgtatgtaattcaccaaatccaattacgttgaagaacgcatgtaattttgaagcatagtgaagacagagagttgatgtcttcaacaacaaaaacacattgaacacattctagaaagtcaaagatatttcttaaaattcaatatgtttaacataagcaaatgaacggactgaaacattgcatgagtcggataacaatcaacacacgtctaaaggtatataatctgatgtggtgtttgacagttaaaaaggtcacttttcatatataccccaataaaagtttaacaatccttgctccataagtaagaataagaacttcccctttacattaaattgattagttgagaataaataaagactcttgcttacctcatgtgtttttttttttttaattcgtgaccttgtttctgtttttgtgattcttgattatctcagccaaaagattatctccagccacttctctcatcttccttaccaattggtctctcctaatcttccgcttctgcaaaataaacccacattgaatctaaaaaaacgaacttcaagaataatagaacagaacatacagtaaggaaactggattacatacccgaaaatcatcgtaagttcggatgatcaagttcattcttgaaggatccattgatgtatacaacattgacatcaaggaagcaaaactaacccacggcgagcttggtctcgaagcaaaaccacctctactcactgaaaaaaatacaccaaccaatcctttagcactatgtaatcaccaataccaagagaccttaaagaaagaaagtgtttataacctctcagtctaggagacctaaaactgacgatataactcggaagaatacacgaattcatgttacaactccaaatcacatagtttctaggattgtgtaaatcatccacaccagaatcaaactcagcagaactcggatacgattgtttagagccggagatgattatctcaggtttccctaagattacacggcataacagaagatatcgtaaaccttcttcatcttgctctgtagctgaagccctgcaaaaatagctttcactgttacatcatcaccaccacacacaataagaaaaacaaacctagttaaactcatgttgattataaatcaaaatcaattcaaaatttctcagaaactagctataatccgagttattagctcaaaattacgacgaaaatcagtagagagatctcaggcttacgcaagtagagaacacttggaaggaaccaaatggattccaattccatgagaaccaccatcattttcaaattttccaacatcacgattgctaaatccgtaagagatgattctttgaatctcatctctagaaccagcgtaccaaccatatttcacattagcatctccgccgtgtttcctcgcaacagcgtcagtgaaaatcctaaacgccaaaaacttagctctcgtcgtgattcctcgttccgaagagtttttacgaatcgtaacgatcgtcgtgtcgctagaaacaacacccattcccgagagtaaacacgtcttgataacgtcgtgctctgggtttccttcgccgagaagaatcagtgaagaggaagagaaagaagatccggcgtga

SEQ ID NO: 37787 - DNA, 2144 bp, Arabidopsis thaliana landsberg
  unsure (1)..(2144): unsure at all n locations
acagatcacctcactaaacgcatctttaccaaccttttctttatggagcttcgtcgcttcctttatgatacctgcataataataaaaaaaaacaatatgaggtaagagtcaagtttctctaattcagaataaagaggctgaaattacatacaatgatcccgccggtcagtattcctcatcttctgttgacttggtttccgaactgacaaatctatactgggtgtatcgactttaaggacttctttcatggagtgagaatctgacagtttcttagatcgtttaaccagaactttttcagacgctccgacacatggtttccttagcttttctgctgtctgatttgatatattagactgtaccagctttttgttccgagtaacagttttgcgcttcttcagtgccaatgtttctttacgagaaacttgatggcttcctttcagtgaagcaaggaattcgttgagataacactttaagaacagtgatttccaatctctcataacatcattgtgcaacttctgtctacataatgccattgaaacatatgctttaatctctggaatggattccttggacctaacaggctgatacttatagcgcagagatggcatattaatattgctttcacatccaggtggtggtggctcatgaatggccagagcatcaagttcatcattaacaggaatatctaatgtctccaatgctgtactaaaaatattagcaataatatcttcagatgtgatttgctcggaggattctccctcttgcaacagtctctgagaatcactgaaatcattggaaaaccgcaacttagcaggaaccacatttaagccattcttctttttactagacccttccaaattatactgctcacggaaggaaccctgaagagatggcgggttttcctgcagcaatttgaaacaatttgaattcagcccccacttgctagcatatggcaaagatggcagaacgagaaaggatagcttttcccttagaaaacttataaaaattgccaaacaaggagattttgtctccttacctcatgcattttgccatctcgtgcactactagtagtattattcgctccatctttaatgagaatactagtataatcagttaggtgagttttaagagacagaaagagttcattttcaacatgttctgagatgcttgctatgacactttccgttccataagtatctgatgacaatccacgaactctggctccattggtagctaagtcgagttcatcagagtaagcagttttagaggaagaggaatccaccctacaagtaaactgcaaaacattaaaaatgacaattcatttcattgatgagcaaagctaattagaaaaaaatgacacttaatctattaaagtcatagaaactttttataagctcacactctcaaatgattcaggtttgtctgaatactttgtatgggaacctttgcagtaattaacagtcgagatatcagaagaccgaaaaccaattttgtttctttttcaacatgatgaatgagttgcgggagtatggtgaaaagactgcattccacatgatttgcatgcaatggtggtgaagcgttctacacacagctgagcaagatgtctgaaagttctcaatgcttccaacagatttagtatatttgggcgactctgcagctatactactatgacccccctcattcattgtattcttacagcctgcagattcagtgtttgagacaacacttttctccgcattaataacccgagactgcgcaaaccaaaagttaccatattagtgtatgattcaatgatagcccctgaagtttgatagttcaatgtataataaaaagagctaccgatatggattcaacagcagaagtgggtggataagacttgagatgctcatcacttttnnnnnnnnnnnnnnnnnnnnnnnnnnnnnnnnnnnnnnnntcatcgagtagagctcttctagctattttcattattccactctgaagatgaacagagagttcttccgaaacttcggatatgaagttcacgccagtcactgactcgtctcaattagcatcaccacatttcaccctccatacacccattaaccctgctaatgtgattggtctaagcttaaaatcacaaacacgtatctacaaaacaaaaa

SEQ ID NO: 37788 - DNA, 1534 bp, Arabidopsis thaliana landsberg
cttgtctcttgtgttacccaaaagctcgatatattttgattccattttagaagtgtgagtattcctaaatttgtagttgggcatagacgatgttagtggtgtttttcttcttttagagtggctcaataggtcttagagttggtcttgaaagttttctgtttccgttcaaagtcaatggcctttagcctactcttatgacctttttggtgttccagatatgaagcatgggttatctacaattttctatcgctgtgtttggcatgggttggaggcccaggatcagtagtgcttagtttgagtggtcgttctttaaagccatcatggtctcttatgacatgttgctttccgcctttaacactggacgggtaagttcgcagaatgaaacaaaattcttctacttatcaataaggtagtgtttacataatctttcctggtatttcctatcattttggatgatgatttttctgtgcaagtcatacaatattaatgacctggacatttgagtgttctgtttggatttcgaggtctcatgatgattctatttatcttgcgtttttataagacagtcctcttagctgaaatctattgacacatgcactatggtctttttcatgcaggcgatttattagacgatgcaagcaaggttgtctgcaatttgtaattctgaagcctatcctagttgctgtcacacttgtgctttatgctaaagggaaatacaaggatggaaattttagccctgatcaatcctatctctatcttaccatcatctatacaatatcatacactgtagctctgtacgcgctggtcctcttttatgtggcatgcaaagatctgcttcagccattcaatccagtcccaaaatttgtgattataaagtctgttgtctttctaacctattggcaggtgatttttcgtactctcttgctatcactgaatctggtttttggcattaacttttgctattctccatacatatataacgtatttcttctgtctggcgaacctttttgtgttacagggtgttctagttttcctttttgctaaatctggatttataagggatgaagaagaagcagccctcttccaaaattttataatatgtgtggaaatgcttattgctgcagctgctcatttctatgcatttccgtacaaggaatatgcagaggccaatgttggaggagctcgcagtttctcaggaagtctggcacatgctcttatgctaaacgatttctaccatgatactgttcaccaggtaaccgattcattgtataacaaatattttgaaatgagtgatctaagtccttttagtgatgatcggttttcgattcttgcagtttgcaccaacatatcacgattatgtgctctataatcataatgatgggggtgaggaagggacaaggaagtaccgagcacgaacatttgtgccaactggtcaggaaacccatgctgttagaaagaacccccacatgtttggaaacaagatagatggtgaaacggtctccagtcaatcttcagaaacaagcacacccaaaac

SEQ ID NO: 37789 - DNA, 6956 bp, Arabidopsis thaliana landsberg
gataacaattaccaaagtccagacagtgctcaggccttttcttctctgcgaatttcagatgagtccggcaaagaatggcaccctgactccgctgctaccgctcatgtcacctcctcaaccaacaatcttcagtcagctacaccttatgctgggaatgacacagttcttgttggtgatggagcttttcttcccatcactcatgtaggatccaccactatttcctctggaacaggtacgattccattaaatgaggttttggtatgcctagatatacagaagttcctcctctctgtttcaaaactctgtgatgattatccatgtggagtatattttgatgctaataaagtctgcattattgatctaaatactcagaaagtggtgtccaagggtcctcgaaatagtagtggtctatatgtgttgaagaatcaggagctagtagccttatactctaatcgtcagtgtgctgccacagaagagaagtggcatctgcgtttaggacactgcaactctaaggttcttcaacatctcaacaccagctaggaaatcattttgaataagagcagcacctcccctgtttgtgagccttgccagatggagaaaagtactagtttacagttttttgcttcagaatcttgtgtgaagaatcccttaggtcgaatacattttgacctatgggggccttcaccagttgtatcaaatcaaggattcaaatactatgcagtttttattgatgattttacaagattctcttggttctatcatttaaaggcaaaatcaaattttttctcggtgtttgttgcttttcaaaagttggttgaaaatcagtttgatgtcaagataaaagagtttcagagtgatggaggtggtgaatttacaagcattcaaatgaagactcatctaaagaacagtgggatacaacagggaatttcatgtccctacactcctcaacaaaatggggttgcagaaaggaagcaccgccacattgttgaacttggtctctccatgatgtttcacagtcatgtgccattgcattattgggtagaagccttctccaccgccactttcatcatcaatcttcttcctgttcttcaaagcaacacaagtcctcatgagcgtctatttaaacaaaaaccggtatacactatgctccgggcttttggatctgcttgttatccttgcttaagaccacttggtagtcacaaattcgagccgaggtctcttcaatgcgtttttctgggatacaaaagagaataccagggatatagatgtttatatcctcccactggtagagtatatatctcaagacatgcaatttttgatgaagatgtctacccttttcaacaaaagtttcagtctcttattccaaggtatcactccacacttctcgactcttggcaacagtctttcatgtctaacaaggttcaggaggaaccagaagtacctataattcctcccacacatgtgaatcagtcttcaagtgaacctgaacctgcagtagaaccagtcactgatgaagtaactcagaattcaccatcagaaacagaatcttcaaatgaaatagaggaatctattgatgagcaagtcacagtttctgaaacacatcctattgcggaagctcaagtcaatactcatcccatgagaacaagggccaaggatggaattcataagccaaactcaaggtatgtgttgcttacatctaaatttgcaacagaggagccaaaaactattgttgctgctttgaaacatccaggctggaacaatgcagtaaatgatgaaatgaggacaatacatatgctacatacttggtcactagttccaccaactgaagacatgaatatcttggattgcaagtgggtgttcaaaacaaaactgaaaccagatgggtctctggaaaaattaaaagctagactagtggccaaaggatttgatcaagaagaaggcttagactacttggaaaccttcagtccagtggttcgaactgctactattcgaatggttctcgatattgctacagcaaaagaatggtatataaagcaactcgatgttacaaacgcctttctccatggagaattacaagaaccagtcttcatgcgtcaaccaccgggctttatagatcaagaaagaccaagtcatgtttgccgtctcaccaaagctctttatggactcaagtaggcgcctagggcttggttcgacaccttgagcaactttcttcttgatttcgggttcacatgctgtaagtctgatccatctctcttcacttaccacaaaaatggcaagactctagtattactcctctatgttgacgacattctgttaacaggaagtgatcaaagcctgctagaagagctactcaaatctctcaactcaaggttctccatgaaagatcttggtctacctaaatactttctgggagtggagattgaaactcatccaggaggactttttttacaccaaactgcctatgccaaagacattctgcatcaggcatcaatgtccacatgcaattccatgccaacccctctgccacaacaaatcgataaccaagattcagaactcttctcagaacctacctattttcgaagtcttgcggggaagttacagtacttgaccataacaaggccagacattcagtatgcagtaaacttcgtgtgtcaaagaatgcatgctcctaccacagctgacttcagttttctcaaaagattgctcagatatgtcaaaggtacaattcatatgggattacacatcagaaaagatcagaatctagcactctctgcttatagaaacagtgattgggcaggatgcaaagaaacaagacgctccaccactggtttctgtactatgcttggtcctaatctcatatcttggtctacaaaaaggcaagaaacagtgtcaaagtcaagtactgaagcagagtatagagctctcacggccgttgctcaagaactcacatggttgtcttttctactccgagatcttggcgtatcacagtttcatccaaccctagttcgttgtgataatctatccgcagtatacttgacagcaaatcctgctctgcataatcgattaaagcatttcgacaccgactaccactacattagagaacatgttgctttggggctcattgaaaccaaacacatctctacaactctccaacttgcagacattttcaccaaaccgctgtctagaaaagcctttgtcgatctacgtaccacacttggtgtcgctgaaccaccgaccacaagtttgagggggaatgtgagtcagtcatcaaatgagcaactgggccaaagtaaagataagcccagctcatgtccagttaccaatctaagcccacacactaaatcccagaacacgacaaaggcaaaaccctctaaagcttgtgtacctgcaaaagatgttgaggtgaagaagacgacgctcctccattcaaatccgtttcaagccttatcctctttagctgatgactagtcaagcttacagctgtccaaattgataaggattctagattgttctctaagagtctataaagtgaagtgtataacgttctatcaaggtattgagaaacagagtaataagattcaaagtttcatattttctaaacttcttcatggtatcagagccattgtaagctctcacaggcacaacaatggcggattcctatccctttcctgataacatccacgtttcaagctatgttactataaaattcaaagactacaactatctcctttggaaaacacaatttgagagtctcttgtcctgtcagaaattaatcggctttgttaatggtgccatccagcctccgtctcgcagtcacaccgccgtcaacggtgacatgaggatagaagttccaaatccacaatacgatagctggttctgtacggatcaactcatacgctcgtggttgttcggcactctctctgaagaggttcttgggtacgttcacaatctcaaaacctcacttgatgtctggatctccttatctgaaaatttcaacaagagtagtgttgctcgtgagttcacgctccgccgaaatctccaactcttgtcgaaaaaggagaagtctttctcgtcttaccgtcgtgactttgttgcaatttgtgatgccttgagttcgattgggaagcccattgatgaatcaatgaagatttttgggtttcttaatggtttgggtcgtgagtacgatcctatcactacggtcattcaaagttccctcagcaagctctcaccaccaacattcaaagatgtgatttcagcggtagaagctttcgacaccaagcttcagtcttatgaagatccagccattgtcaatcctcatgttgctttcaatactcagcgtagtacctacagtaaggattacagaagtggtaatcaaggcaaaggacgaggaggttctggtcaaaatcgaggaaaaggtggctactactacacgagggagaggtttctctcaacatcaatccaacaccacacaatccggagaacgaccagtgtgtcaaatttgtggtaggattggacacactgccctcaagtgctggaacaggtttgataacaattaccaaagtccagacagtgctcaggccttttcttctctgcgaatttcagatgagtccggcaaagaatggcaccctgactccgctgctaccgctcatgtcacctcctcaaccaacaatcttcagtcagctacaccttatgctgggaatgacacagttcttgttggtgatggagcttttcttcccatcactcatgtaggatccaccactatttcctctggaacaggtacgattccattaaatgaggttttggtatgcctagatatacagaagttcctcctctctgtttcaaaactctgtgatgattatccatgtggagtatattttgatgctaataaagtctgcattattgatctaaatactcagaaagtggtgtcaaagggtcctcgaagtaacggtctatatgtgttggagaaccaagaatttgtagccttctattctaatcgacagtgtgcagcatccgaagaaatatggcaccatcgcttaggacattcaaattctcggattcttcaacaactcaagtcaagcaaggaaattagtttcaataagagcagaatgtcccctgtttgtgagccttgccagatggggaaaagttctaagttacagtttttttcttcgaattctcgtgagttagatcctttaggtcgaattcattgtgacctttggggcccctcaccagttgtatctaaacaaggtttcaagtattatgtggtgattgttgacgattactctcgctactcatggttttatccattaaaagcaaagtcagatttttttgcggtatttgttgctttccaaaacctggttgaaaaccaatttaatacaaagatcaaggtgtttcagagtgatggaggtggtgagtttacaagtaacttaatgaagaagcacctaacagactgtggaattcaacatagaatctcttgcccctatactcctcaacaaaacggtatagcagaacggaagcatcgtcactttgtcgagctcggtttgtcgatgatgtttcacagtcacacaccgctacagttctgggtagaagcgttcttcactgcaagtttcctaagcaacatgcttccctctccgtcattaggcaatgtaagtccccttgaagctttactaaaacagaaaccaaattatgcaatgcttagagtgtttggaacagcatgttatccctgcttaagacccttaggagagcataagtttgagcctagatcactacaatgtgtatttcttggctacaattctcagtataaaggatatagatgtccatacccacctaccggaagagtgtatatctcaaggcatgttatcttcgatgaagaaacatttcctttcaaacaaaaatatcagttcttggttccacaatacgagtcctctcttctcagtgcttggcagtcatctataccacaagctgatcagtcactcataccgcaagctgaagaaggaaaaattgaaagcttagcaaaacctccatcgatccagaagaatacaattcaggatactacaactcagcctgcaattttaactgagggagtattgaatgaagaagaggaagaagactcctttgaagaaacagaatctctgaatgaagaaacacacactcaaaatgatgaagcagaggttacagtagaagaagaagtacaacaagaaccagaaaacactcacccaatgacaacaaggtctaaagccgggattcataaaccaaacacacggtatgcacttcttacctcaaaattttcagttgaggaaccaaaatcgattgatgaagccttaaatcaccctggttggaacaatgcggtgaatgatgaaatgagaacaattcacatgttgcatacatggtcattggttcagcccacagaagatatgaatattttggattgcaagtgggtgtttaaaactaaactcaaaccagatgggtctctggaaaaattaaaagctagactagtggccaaaggatttgatcaagaggaaggtctagactatcttggaaaccttcagtccagtggttcgaactgctactattcgaatggttctcgatattgctacagcaaaagaatggtatataaagcaactcgatgttacaaacgcctttctccatggagaattacaagaaccagtcttcatgcgtcaaccaccgggctttatagatcaagaaagaccaagtcatgtttgccgtctcaccaaagctctttatggactcaagtaggcgcctagggcttggttcgacaccttgagcaactttcttcttgatttcgggttcacatgctgtaagtctgatccatctctcttcacttaccacaaaaatggcaagactctagtattactcccccatgttgaccccattctgttaacaggaagtgataaaagcctgctaaaagagctactcaaatctctcaactcaaggttctc

SEQ ID NO: 37790 - DNA, 4686 bp, Arabidopsis thaliana landsberg
gtgtttttttattaccagatctccttctttcatcatccttcactttctcgagattatttctcaaatgatcttaatttaatcaatcatcaaccggtgattttctctcggagagtgggcaccggttcttgattcttcaatccacgtggtcccatttttggagaaaacaccaaatatctgtcaaaatgtccatttttgctaagtgttaaactagttctatatattactactactacaaaagtacaaatctaacattgtgacactaactattaactttgtaagtttactgtttgcaaagtgataaaggaagtttcttttgttatcttttgaggtgttgtgatgttgatgtaaagaagaagaagaagattggtatatagattgaatcgaaaatcttcatttaattctccagcacatctgaccatggcacttccgtgacactgtaaaagattctttctctgaaaatcttgttttttaaaaaaaatattcctgatattctgaaactgtagcagctaactagttagaactcaacccacctttctctcctttttttgtctggtctctcttgtttgaccactgttttcctagttctacaccattttcttatctctttcactgttaagctctttcttgattattatagtttgaatttgcttctttttttttgttttcttcattgtaatgatgatgaaattgtcattagtttgttccccttagataatacatgtgggagtggtttttgttgttgtaaaggtagaatcttatttacttttctttatctgggctgtctaatattctttgctctttttccgcatggcctatctgtgaggtatcttactttgggtttcttgcagaataaagggacttcatttacagcaactggagctgtttttattgtttacctccaagcgcataattaaacgagaggcatgaagaactgctgaattcaatcaatgcaagtttgtttcgttagcttgaatggatgtagcaacagatactacaaggcggcgtcttcttccatccgacaagaacaatgcagttgttgccacccgccgtcctcgaacaatggaggtcagttcaagatacagatcacccacgcctaccaaaaacgggcgatgcccttccccaagcgtcacaaggccaacagtgtcttcaagctctcaatctgtggctgcaaaaagagcagtttcagcagagaggaagcgtccttcaacaccaccatctccgactagtccctccacgccgatacgtgacttgtctatagacttaccagcttcatctaggaggctatctactggtcgtttgcctgaaagcttatggccttccactatgagaagcctcagtgtttcgtttcagtctgattcagtctctgtccctgttagtaagaaggagagaccggttagtagttcttctggtgatcgaacattgagaccttcttcgaatatagctcaaaagcataaggctgaaacgacctctgtatcaaggaaacctacgccagagaggaaaagaagtccattgaaagggaagaataatgtgtctgatctttcagagaattcgaaacctgtagatggtcctcatagtcggttaatagaacagcatcggtggcctagtagaattggtggaaagatcacttcgaattctttaaacagaagcttggatcttggtgacaaggcttcaaggggtataccaacttcagggcctggaatggggccgtctcttaggagaatgtcccttccattgtccagcagttcacgacctttgcataaaacttctagtatcacatctagttatggtggcttagtgtctgcaacgaagtcggaagataataacatagctcgaacttctggggctcaaagactattgtctgcaggttcgttggatagagcaacattagcaacggctgtagctaggttgcatccattgcctgctcctggatctcgccctgcttcaccaagtagaacatcgtttttgtcttcatcgtctatttcccgaggtatgagtacttcgagaggagtgagtccatcaagaggactaagcccttctagaggattgagtcctacaagaggtttaagtccttcaagagggttaagtccttcgcgcggcacaaatacatcctgttttgctagaccatcaactccaccttcaagagggataagtccttcacggataagacaggcctccactcccacacaatccagtaccacaacttcggggctcagcttcaccacggatgtcaagaaaggcaaaaaagcaagctatatcgaagatgttcatcaactgcgcaggctccacactagatattcacagtggcgatttgcaattgcacgagctgaatctggaatgtgtattcaacgactaacttccgaggaattcaacattcctgtctgctatatacagcgatcctttaattgattgatctaaagacgtctgaaaatttaagttttgactgtcaggaaacactgttcaatgtgtggcatgcgatatcagaactacaggatcatgtgaccaggcaaaggattggcctacaacagctaaagctagagatcaagctcaactcattattaaacgatcaggtatgttgtctctctgttgtattctggctttgtattcatcagattatgccgtgcttatgcataaatatgtgcacagatggtgagccttgaagattgggccacacttgaaagagatcatgttagttctttagttggagccatatcagatttagaagcaaacactcttcgccttccagctactggaggaacaaaggtatatttattacttgcgaatatttatgggaacgaaatttcagaagatcatttagttatcatttataacttctcttcctacaggcggacacagaatctttgaaagcagctatgtcctcggccctcgatgtaatgcaggctatgggatcgtccatttggtctttactctcaaaggtgagacctgtttaataaatgagttttccaaattatcctcttgacataactctcacgtggggtgcactgctctttatgatttgtatttgcaggtggaggagatgaacataatggtaacagaactcgctgttgtagtaacaaaagagagttctatgcaaggaaaatgcgaagatcttctggcctcaactgcgatcatgcaggtaaatgaataacaatccaatactataatgaacaaatgaattgaaactgagattttgtaaaatgaacagatagaagagtgtagtctcaggactcatctgatacaaactaggcgagaagaaggagaagacgcagagactccacctccattgttgccattaagcaagtttccatggccataaataacaaaagcttacagttcccacacgctcaacactgatcacctgtaaattgctctttgatgcccccacatttctcttgtcgagatccttttttgatctttgcttgttgaagttttcttcttcttttttttggtataaaaacattagcttaggaaaaaaggaagtggaagatcacgagttcgaaagtcttaggataccaaaaaggaaatttattttgttcacaaatcacatgtaagctctgatgtggggtttattctttagtatcatttagtgtagaaatcataacaaaatttaattttaggacttttttggcttttctgttatatattttttgacaaaaattcactaacaagatgtgtatgtgctcctcttcacctaataaactgaagttgaaaattcatttcttcattataatccatatacagtaaatgaacatttaatatgcttttaatttgaaattaaaggtaaaatactttttaaatgaaagtgaaagaacgcaaaaatgagttgtttcgttttctctgaaaggcaaaaagccaaatgctgctacggacagtatcgtccgccaccgccgagacaaccgccgcattgataagcaagaacacatatctcgatttcttcaaaagatcaacttctatatctcaccttgctcaaacccatgctcagatcattctccatggcttccgaaacgacatctcattgctcaccaagcttactcaacgactctccgacctcggcgccatttactacgcacgcgacattttcctctccgtccaaagacctgacgttttccttttcaacgtcctcatgcgtggcttctccgtcaacgaatcacctcactcttcgctctctgtgttcgctcatctaaggaaatccactgatctcaagcccaacagctccacctacgccttcgctatctcggctgcttctgggtttcgtgacgacagagctggccgtgttattcatggtcaagcggtcgttgatgggtgtgactcagaattgctgcttgggtctaacattgttaagatgtacttcaagttttggcgagtcgaagatgctaggaaggtgttcgacagaatgcctgagaaagacaccattttgtggaacacgatgatatctggctaccgaaagaatgaaatgtatgtggaatctattcaggttttcagggatttgatcaatgagagctgtacccgtttggacactacaactctgcttgatattcttcccgctgttgcagagttgcaggagctgagactcggcatgcaaatccatagtcttgctccaaaaactgggtgctactcccacgattatgttcttactggtttcatctcactatactcaaagtgtggaaagattaagatgggaagagacac

SEQ ID NO: 37791 - DNA, 3988 bp, Arabidopsis thaliana landsberg
tctcttggcttctttccatacactcaccggacttgaacactcgccttctacatcatttcttctgtcttgacattcaactgttctaaatttctctgatcctggagagatacacgagctaagctcagaggcatgacttagttctttctgcttcatactcagaagatgatgctctcgttttcccttttgatccactctcatcactgtatcagcatccgttgcatctgaaaatgcttgtgatctaactgagaaactctgattcctcatttgttgagacttcgaatctacctccaatcttttgacagcaccggtcgataaatctagctccaacgaacttgcagctgtttccgcgtaactacaacacgcttctttggttccatctgcattagtatccttgcatttctcaaactgtttccaatccaaaaccccaaccctcagcgcctttccgcggaaatcttctttcgatcttcgaagataccttggcggatccaacatatcatgcttcaccagctcatctttaccttgacacaagggatgtctatcttcatgaaccttagaggctctttgttgcctcaccatagtggtagaataattaccagcaacctcaaagcaatgactctatactgcattcagggactaaaccaaatcttagtttcttcatccacctttacactaaccactctgcaataacaaagacataaagtttaagcataaaaatatcactagagaattcattggaattacacaattcagtacttcatactcaattcttagcaaaagctaaacagtctcttgaagaattgaggctctagaggatatcagtagatcacagatctaactaaaacttaggagaatcagaaacctttgcaaggaaatcagcaaattttagcaatgggatcaccaaagaagaaagagaaaggaaaacgaaattgtaactttcccttttctttttgtcactccaaaccaaaccagagagaggaaaaagtgcataattatctttcacttacagacacatcttaaacaaatcggaaagggtgctgatatgaaaacaaaaagcagggatcctcaaggaactactccagaagggtgacaacgtcaggcacctgacatacatgattggccggaagcaaccaaaactaaaatcctaaggacccatctagtcttcgttgaagaagtcgtgacaacgtcgtgttgacaagtcgggaacaagcaaaatatcttatctttctcaccattattgtgcttccaaatcttcatttctttttttatatctaaacatattgttgcttccttcttcagatcttgaaacatactctaaacaatacaaaaaaaaaagaaacaaaaaaagataagctgctcaaaagattctttcttgctgttgtgattgtgaataattatgtctatggggaagaaacatcttaacatcaattctctgaatcaccaatccacaagggacgaagacaacaattgcaagaacagtctcttttttggattgtttgacgatcctgaatctacaaggttgagaagtgggagtatgaagagacaatacagcgacatgggagatagctaccacagagtttatgacgaacaaaatgatgatgttgaatatgatggtgatggtgatgatgatgagggatcaaggatggacatgagagtcttgatggttttggagtatatgagagagctttacgtgggacaacttcagctgcttaaaaagatgtttccaggtgcagctaaagacgagtttcttggtttcttcaacaaaatcggagacgctgtgtcccaaattaaacaagattctcgtcctcctacaaagtcaatgactatgcggaggagtctcagtgctggttcgccacgtttcacttcgaaaggggttaatttgggtccatcagatctaagacatgaaaggtttaaagttacaatggttaatgctggtggagctgctggttctgcgggaggaggtaaaggtggctcggcagctggtcagggtcagaccaagaagtagtcaagatttgtgacatgtggtgtggccatggatgatcaaatcttctgactcctcagggtttagcattgcacaagccgttactatttgctacatggaatgaaatgtgtaaagtgtggtcaagacttttgagtcaacttggggattcctagttttaaagatggatttcaatttctttattcaatcaattcctagttgggtttgttttatgttttagtatctatagagatgaagtatcagactcatccaaaggtagaagaaactaggatcaactagctttgtttatttattctctttggtgttcgattctctgattctgttatgttctttcaattaataaaagaagctttgtgttattaatccttaactgtaataaaatgaattaattcataatatatacaacacttacatgtaagaaattgacaagaatttgtgtcttcagtgtgtatacccctctctgtgcagctacaatgaagaccattagaatcggagaagcaagaagaatcacatataggagtgtctcatttatccccatttcctctcctttcttttcctcctgcgctttgtaattcgttttatcttcaacaaaggcttcaaagtagtcctgataaccagtgtttccttcagcaaagctcgaccccttaaccttcagcatctccattgcctataagtgtataaagaaaaaccctcacatttttcagggaaaacaatttcttaagccaactctttttatcattagacacacaataagcaaacaaaaagagttgaattggctcttgtccgatcatagtcaaatatagagcaaactcaactcatctgcttgttgtgctttgtaggtataatacttttgtgggtgtttgacttacctgaaaactgaacatgaactgcctcgctttcttgctcactcccgggtttggatgggaaataagcttctcatacatgcgccttgctttgtctgtcctgtcaatcactcccaaaatacgattttaacgcacaagatcccataaggccaatactcaacaagactacttttgaggatattttagaacattcacgaatgaggcatcaccttggtaggtataaactagtattttgtgtttttctttggggacttttggagcttgatagagttttgggactacggtttacaaatacaaatatatactcatgaagaaatacttgtcatcctgtagttgcatcaagcgaaattaggagagaaaaacttactttcgaagtgaatcctgacaaatagaccactgcaaagccgctagtccatgaagctcactctgcacaactaaactcggaactagttaggtcacatctactacagcgaacataagaactttaggtgatctaggtggatcaatcgattaagatttcgataaagtgacacccaacaaagcaagaaactaattaatgcaaaataatcaggtccttaagttacttttactgattatgtggttggctgttatataagcttgttgaatttttgctccacatacgtactgatgggtagatccgtagataataaacaagttttcatgttgtcaaaacgagtaaggcatatgtagaaaaggtatgagtagactaatgcataaacgtagacatgagtataagatgaataataaaccagatttgcagaaattaccttgaaaactattttctccatgaccttttcatagtatggcaaagcttccttgagtttcccagaatccataagcgagttccccacgtctattgcctgttataattgaagtatcacaatcaagagaagaagtgaatgatgagcaaaacgattctagctaccttgaaacacagataggagccgacatgcctgtagataaagcacataaccttttctagttcttctcctttcaaatcaatttttcaactttctagaaaatgtggcaacgtgcaaatctcatattaaataagagaatctgcttgagtaaacatgagtccatatcacagtttcagctgaacccatat

SEQ ID NO: 37792 - DNA, 3053 bp, Arabidopsis thaliana landsberg
  unsure (1)..(3053): unsure at all n locations
aaggtctgtggagcaatatacaatcttgcacagggatatgaagactctggagcaagtttatctcttctctctccttatcttacagagatcatcacacatctgcttgcagctgctgagcgtacagatggggcagagtctaagctaagaggtgctgcgtatgaaaccttgaacgaggttgtccggtgttcaaacctttcagaggcctcaagcatcatagcgcatctcctccctgnnnnnnnnnnnnnnnnnnnngagacaatggacctccctataatatcaactgatgaccgtgagaagcaagcggaactccaggcgtctctgtgcggtgttctccaagtcataatccagaagctgagcagcagggacgatatgaaacctatcatagtgcaaaacgcagatgacatcatgaggttattcctaagagtgtttggttgccatagttcaagtgtccacgaagaagccatgcttgcaatcggtgctcttgcctatgcgactggaactgagtttgtgaaatacatgcccgagctttttaaatatctccagatggggctgcagaatttcgaagaataccaagtatgctcaatcaccgtaggagtgattggtgacgtatcccgtgcgctggatgaaaaaatcctacccttttgcgatcagataatgggtctccttatccaaaaccttcaaagtggtgcactccacagatcggtgaagcctccaatcttctcatgctttggagacattgctctggcgattggtgctcattttgaaaggtatgtagctccagctgttcagataatgcaaggtgctgctcaggtgtgtgcgcagatggacacccttgacgaggagcttatggattatgcaaaccaactccggagaagcatctttgaagcatactccgggatactgcaagggttcaaggatgcaaaggctgagctcatgatgccctatgctcaacatctgttgcagtttgttgactagtatccaaagattccctgaggtccgagccttcttttttcaataatataatcaatgttatatatctcttctagtttcactattcagtttaaacttattactcggtttttgttttgggagcagggatgatagcgtgacaaaagccgccgttgcagcaatgggtgatcttgcggatgttgtaggggagaacacgaagcagttgttccaaaacttcaccttctgtgatgagttcctcaatgagtgtctcgaatcagaggatgaagatctcaaggtcactgcacgctggactcaaggaatgatcgcaagactcgtgctctaatcataattttaaaggctttttcatcatcactactcgtgcgtctctctctctctctctgtcgtcattgttttgagtaaaggtttcaaagaatagttgcgggtcttcctctttcctctgtctaatgatgttgggatagtggttaaggaggggtttgggaaattgtttcggggctatctctgttttgatgctgcgtcttattttttactctgtagaagaaaaacaaaatcttttcttttttttttggttaatggaattatccacttatcggtggtcactttttgagtcaactttatgattctatgtttcttaacgtgaacaatttcgacagaatttagcaaacgattaatttgatgtaaatgctcatcataactccgatgatctacgtaaacacaaactgcgaggtataagaaattctgtttatacaaaaggtgccaaattttctttaaaataacgacagtacatcattacatgacacctatagaagctaagagccaccacatcaagaggaagagaaggtatcgataatggtggtgtgaagtgggtcactaacgtgagtcgcccagttgttgagtggtcctttaccgggtgcagccgcctgaaccgcaaaacccaagaacccacccatgggtaaccgagcatgtttgatctcagctagctgaagttgagcgttcttctccggatcagacgctaatcctagcgggtcaaagatcatgcctctgggatacaaacgcttctccgagtccagctcagcgtttcgttggaagtcaatgtagccgaccattaacacttcgatccatatcaatgtcgcgatagagagcggcaatggctgccctaagtaagtcgatccatccactagctctacctgatagaacacagaaaccgacaatcagacaatgccaaaacgcaaaacgcaaacgctaaaaacgacgaaaaagagacgataccttgccggcgtcttgccaagtaacaccggtgagccattcgacggtgatagcgccgagagtggcgagcattgcccaccgaccgtgaatcagctcacattctctgaatctctgtagcccgaagacttcactgtatggctgaaacggcgtcgatttggggtccaccgcctcggtacgggtcccgatcacttctccgtataagttcttggctaagttctggtccaaggaatccaaatcgaattggagatactctgccggtttacctaacccaaaaggatcaaacccgtagtccccgacaagtgaaccgtcgagatattcgggtgattttgcgcctgggaaccatagaggccggtctgagataaccgtcttagcctttttgggagatgctttcttggttccgaatccgaaccgggctgtgaaccggcttgaattggagctaatgtcggaaaccacccgggtacccatgattgaagaagcagcagcggcggttgaagtggcggccatctccggcgtcgtttgttagttatgtcgagtttgcggtttgtaatttttctgaagcaaatggcgtttttaagtggcggtatgtttgtgggagagatctcagagaacgaatcgtgacggtcagatggagaaacaaatccatctgacggtaggaaacaaaatcagccttatctataaaaagctcgcgttatctatcctgtctgtcttttagagttagatgaggcaagcaagctgattgggcaaaagaagctattgacgaatcgcatagcaacgccacttgtcacttcagcagcacatgtccacttgtatagttgtatgcc

SEQ ID NO: 37793 - DNA, 2085 bp, Arabidopsis thaliana landsberg
caaatttcagatacgaagattctcaacatgactaaaaaggtttctttcaaacctatacgggtgactgactataagttggaaaacatgtaaggcttctcataaatagatttattcacttgttttgacgaccattggagatgcatcatctataagttgcttaatttattcattgaatgattaaatccattcagggatatttcgaagagcccctcatactggtctatggtttgcctttgcaatatagccaaattagcaaaggaaactaccactgttcgtcgggttttggaaccgcttctgactgcttttgacagtggagattactggtctcctcagaagggcgttgcctcttctgttttattgtttctgcagtctcgtctggaagaatcaggtcagatgatatatattatttgcgatctttcctgattttcagtatatttataacttgtctatgaggcaactgactaaagaagtatttaagcaggagaaaattgtcatgtgttggtatcttctttgatcaagcacttggatcataagaatgtaataaagcaacaaggtcttcaaattaacatggtcaatgtagccacatgccttgcactacatgcaaagcagcaggcttcaggcgcgatgactgctgtaatagctgacttgattaagcacttgcgaaaatgcctgcaaaatgcagctgaatcagatgtgtctgttgataaaacaaagcagaactcggacctccagcatgcattagaaaattgcatagcagagctctcaaataaggttagttggactggtttctgttctttagaggtttctgtggttttgatctgaccctcgccacaagtgttacttgtattgtcttgtgtcttatatgtcctaatacaccagatattattaatttttcaatggtcgaacatggcttcaagtttactcgttcttaaaattatgtagtttgcttgtatgaaaaaataagattgtaaaaggaaatacgctaggtaaacagcagtagcttgtatattaggaatcatttcccaagtccttatgaattctgttcttatctagttatggcgttagtagatagccagtggttatgagtcccatgttcagctttcagtatcaattaagtatcttagttagctggttcttgcagtatattgtcaaaatagaagttacggcgttattccatttgaaagttatggacatgttgttatagtgtcgaaacctatatgatctatagtgtgctaagactaattcaataccccatatatcacataacagtttcgaaatcaagcagcttcttcttatcttatgtaatatgttatttcttctttcagcatgtggttttgatctaccttcactcttgaaactccttggagttgccagtgaaatttgtgcatattgttgttttctctcctgtccgcgtgttcatacaaaacgccataatttgttcaatttttttgtttgcttttaaggttggggatgcagggcccattcttgatatgttcgcagtggttcttgagacaatttccactaatgtagtcctttctaggaccacagcatcagccattctccgagctgcacatatagtatcggtggtcccaaatgtttcttaccacaagaaagtaaatgaattcttttactgcaacttttgttttgtatttgactatggcagtagttattatgttctaactgagttactgtggtctgtcccaggtatttccggatgccttgtttcaccaactgctccttgcgatgtcccatgcagattgtacgactagagtcgaggcacacaatattttttccgtcgtgcttcttggaactcttcgtttgccttggtcagatcaacataaggaaacctcagaagctgtttctgggtcattgtcagttgatggaatttgtacagtaaggaaccaggaggaagagaaagaaaaagttgagaaatccttaaacagtgaactgtgtaaagatgtaaaccacatatctcgtccaagtgtatcacgacagaccagtcaacagcttagctgtcagtccttggatagcttaaaggatttagatgatggtataaaggtactatttttctaaacctatctcttg

SEQ ID NO: 37794 - DNA, 1672 bp, Arabidopsis thaliana landsberg
gatttggtgggagggaatgaccagtataacatttgtgacgagaggagtgtaagttccaagcaataagaatcctaatgaacgtaataataggatataggcacagcataaggttttatgtttttcgagtcccaggttataatttctattcatatagattctgatcgccaactcatatatattagatccagttatacaattttttggaattgagaaaatatgactttccttttttttgttttcaaagtaactcttataatataaactattttgttgtgaacctttaccttaggagtaattcatagaattgtttatatctaaaaaaataacatctccttcctttatatgatcccctatagttatatacatacaaataaatagattgactggaatttcagacatcggcccgacgatgatccatttttcaaaagagcgcaaatttttttacgtttacacatgcataagagttttttttatttatgtttgtaggaatctatgtgttatacaacattctaccaaatgggtcttatcgaatcgaagtttttaaaataaaaaaaaaaggtgatatgattcggtctcagccgatctaaaaaatcttatttttttgaatatgaagaaataaagaagccattgcaattgccggaaagactaggcctactaaaggcacaaaaatagagggtaagttattgaaagttgtcataaaatgggtacctcaatttaatatttgtacctgttattgttatattctgaattctaaagatatcttagaatatcttgtatttttattatttctattatatctattatataattatactaagtatctttaagtaaatatatatctaatattaatatacaacctaatagaaatatatagaatagaaccgaatagaaatagaatagaaatagaataaaaaaataggtacaaaaaaagccaaactaaataaatggacttattcatctttcaaaatcaactacaactagatgtatcataatccccttgttagatttattattctttttgtcttaatatcttataatagttaatagtcattaataaagaagtaatagctttcattgaagtgagtctactctaaataggatttccacagtaggaaaactagacatcaggaaatttattcaatcaagacgacttatgtaatagagtaatccccgaaggtattgagcagcggtgtagcatcagatcctaaagacagtaagtctttttcttttttatgaagtatgaaaaagtctttttcaaagattctatataaatttttatatgaaagcgggatagttacctttcagaaaattctaatatctaataacagtggacatgcttttttttctgaaggtaggagaaaagataaaacttattatattaattaatatattaattaaatcaaaatgaaagtttgaaactcatgtaattactctcttttgtttaatccaagaaaaacaaaaaatctataagaaatctcattcaattagacattcaattagatataaagttcaaagtaggttaaagttaaaaaactggtacaccaaaacaaaagagttggttgtcgagccgtatgaggtaggaaactctcaagtacggttctcagggagggaattgatccgcctattccgaccgtggagaacaggccattcaacaaggagattctgaaatggc

SEQ ID NO: 37795 - DNA, 12262 bp, Arabidopsis thaliana landsberg
  unsure (1)..(12262): unsure at all n locations
gttggaaaaatgtggcaaggttcgtaaccgcaattaaggctgtactgagctgttcatcctcaggcgccaccatggtgagagaaaaccgccctgaagaagtggtttcaagaaggcacataatttcaccatcaaggcaatctgcctatgagcaacgagaggtaagtcgcccacaagctcctgcaagacattcatctcatgagcaccgcgagcagaaaagaaggagaaaaacaagaatggttcagccaaggagcaaggaccttcttatgtccaatagaagatcactcgaccaagatactcgacgtgatatcgagcagagtgtcgagcaggatccgtgggttcagaaagagtagagtgtcaagcaaaatcagtgggatcaagatgggcagtactcgggaatgtattgggatgcttatcacggcatcaacgagcaggaacctacctctgacaactgaggtaacaccacctcaaccattgtatataccatagcatctttttatttttatttgtgtattttgtgctttggtcttgaattctctttcagatttttattacacaagggactgggttcaagacatgtttaacattgtgttctcttttcttatttcaaattttgcatcatctaaggcatagaaaaaaccataaaaatttgaaaaaatttcagaaaatgatttcatcaaaaacagagtgtcatgtagattgcatttcattttaggattttatatagtgtgcttgcatttaggattgctcatttgcataggggataattatgatatcaaaccgataagcatgtttcgattcaatgaagtaagttcaatgccgaggttgttagttctctgttgcataaccgattgtatctatgaagtaaggctgcaccctgctttgaatttgtaacttgactatactgctttgattcgaaactcgcttatctgatgccattccatatctattagaacctgaactgaatttgcaattatcatgtctatgcattgtttgtgaactcatggctaccatatacatacttggattatcttattcacttcaccaccctctgttaatccaagtagctgtctctcatttttagagcagcttctcatacctttagcctagctttatttcaagccaaagatcatttgtgtgtgattgtgaggtctttttcgattgagcttggtataacgtgttacgtatgagccgacaagagcagtctttcatgtagacctagcccacgcttattgggttagctaggactaggtggacacttgtatttgggaatgagattgtgtatggaatgaatgggaatgataatgagaatgaaaaaaaaaaaaaaaaaaggagagtaagagtttagagttctaaaggggatacaaaagtgttaagtttagtaaagggtttggaattcaaagaagttagggattgtgattcaaagaaaagggtaaaacgccctatgtgctaagattagaagaacagccttaagtttgtcaaaatataaaaccaaacccgctagactcttaaatcgtttcaaagaaaaccccttagaacttgaaccaaaaagagagaaagaatgataaaaagggtagagtaaggaaatctatgggactgggatcatcttctgagctatcatactatatcattgggtagatgggagtctgttcttgtatgggtccattggcttttacctttagcattctgctgaagctcaatcttttctctgagagtcccctgttactcgaccaaacctctagagggaccatttttgtctcttagcctaagcccgaaacaaagtgagttcataaccattgcattgcttgatccactattcgtgcttaatgaatgttaaagggaactggttgatgtgaatgtttgaatagattaaggcaggttgttaggttgcattgtgacgagtatggctaacggttttaagtaagggtctatcactttgcaacctagaattagctacctggacattgagcttacctgttctatatgcatgcttcgatttttgaatccccaccttcaaacctctctttcaacttaagattttttgtttgcttgagggcaagcaagatataagtttgggagagttgttaacactgtattttactcattttaggtgtatgtttatcatcatttaactgtgcatttgctcattgtatcatatcattttgcatcattttagcttattatgcatacttaggcatctaggatcatctcgcatacgcattgcatgttttggtgtgttttcaggtgcagaaggggctaaaaaggactctactcgatccattcactcgatccaggcagctagagaagaggcatcagtttactcgacctctctactcgatcgaggcagctaaagaggaggatgcagtttacttgaccctcttactcgatcaaggcagccttagatgaagcagcagattgatatactcgcccctcctactcgatcctctactcgacccgtttactcgaccaagggtgaccaaactacaagacttgttgagctatcaaagcgtcttcggatcctcctcattcccctctcaaccagaaatctaagcatacggataggagaggaagaagcatctactcgaccaattgatcactcggagcatagacacaaaggcgcagactttgcagcgccgtctttactcaatctccatgatcaagcactcgcccaaaccgcctcaagtctcttgtattctagtgaatctagggttttcaacattttactatcaatagatcactttgggatttgtccaaaggatctagcttttatcctttagtttttctttttgttcttgaatcttcaaaacttaactactcttaatctatttcgtttttgtatttagttctttaagtaaagttgtttagcttgtttagatctacattttggtatgatttccgtagttacagggtttgtgttcttagttatgttgcttgagtagtgattagggttcttgaggatggattagattagggtaatctgtaggttagtcaggtggttaagattaggttagagcccttgtggattcgcttggcccctatgcggttttcggtggctaatgtggagattcgaccataggtatccagcgtccaaaagacgttcaaatggatgcctgatctacgaattccggagatttgtaggctatagaccaagagattggcttgactgcttattgactttggtagattgttgcttaaaccttgttcagctatgtttcatcaacgagagttgagattaagaagtggtagagttgtgggggtctctgtcacaagagtggattgacctggtttttgaatctatcgtctagggtatctgcctttcgcctgttagccacctgatgaaccctagagttgcccttatcaatgaatccatccctagaacttctattattcttagatttatttgtattcactccttgattgcacttttatttacctgttatttgcatcccctgttgactgcattttagttcttaaatttgtcacttgttggttctactcgacccaatgatcgagtagggcccttaagttctcatttttagttgtttccatcctgacctaggattgttactagaaaccaaccatcattataatctggcttgacttagtcgcttctatacacatcttgattgctagcaataacagtggactggattgacaccccctatagttgcatcgacatgtttgtgtttaaggggaattgaactgaatacacaacacttcagcacataagtaggcctaaaaaccctaaaaccttacttatcatctgtgtaggaatcaacttattcttgtcattcttaaccattgtaaaccacatgcacttgactaacccaatcactatatgaaattggaaagataatctcagcttccaacagtttcatgatttccttctaaagaacaacctttagattctggtttagtctcttttgatgctcaactgagggctttggctcatccttgaggtgaatcctatgcatacacaagtccggagagatacctggaatatcatcaagagaatagccaagagctntacgatacttgtgcagcttgctcagcaataaggtgagttctgcgggattaagagaagcattcaccataacaggataagtagaattttcaccaagaaaagcgtacctcagccctgctggaagtggtttcaaatcgattttaggagccttagctggatcccaatcagaagtaagagtcggtgttggagtcacagatggaagagcttcttcaactgtaagttgcatcacatgttcggtctcatctagcaggttagtatatgttgaagtttcgcagtccaaatctgcactatcctctatggaagagaccaaaactcgctctagtgggtcttctaatttcatctctgaaatactatataaagctgatgaagtgaaagaatctatcaagaaggttttaccttctatgatcggtttcttaaccaaagtgttcatatcgaactgcatagtaagatcgccaacattcagccctatcctcccttctcgaacatctatgattgctccagctgtgtgcaagaaggatctcccaaggattaatggatccttaggttccttctcattaggcaagactacaaagtctgtaggaatcatgctctttctaatcatcacaggagcatcaataagaattccatctttaattcgggtagaacgatctgccaacacaagagtgataaaggtaggctcaagattggaatacccaagacgcatagcaactgaacgaggcatcagattcacactagaaccgagatcacgtaaagcttttgggaaggaatcatgattaatggtgacactaagtacaaaagttccaggatcaggtatcttcctcgggattcgttcctaaataatgtcgctgccttgctctaaaatcatcataacacttcattcttttgtcaaattcttagtaaccattgtcttaacataccttcttattataggagatagatgaatatcttcaactagaggcatctcaacaatcagcttgtcaatcatagccttgcatctgacatcatctaaggcttgtcttgactttttaggactcttggagaaaggaattcgtcgatttgctgacttggttgcagctggaatttgcacattgtctgaacgagctgggtgttgatcgacaggagctgggtgtcgatcaacaccatcgggaatagtttcctcctcctccttaaaattgtcgattccactcgacaaaggaaaatacagagtcgtcaagagtaattggtgtcgatcgacaccctggtgtatcgatcaacactgtttcattttctgcaattggagaagatgaatgctgagccgattgttcacgctgaagtattgggttgagctgctttccgctgcgtagtgtgactgcattgatagaagctgatgtaggtgagagattggagaattgagagcgtagagtgtcaatcttgctaatgagatctatggagagagaatcatatttgctatggagatctgtggagagaaaatcatatttggtatggagatctgtggagagagaacatagactccattctggtctctgatgagggacgagggggggggggcttgggaaggagcagaaattgctgaaaaaagagtctctttgctattggtggctttctcagctgaaattcttcgttctttgtcaaattcatgtgtcgaaagactagttaaagcattggtaatgaagagtaatgcttcactagtggttcttgtcatgaagttacaggagcttgctgcatcaagttgaatctggtatggctagtctattcctttgtagaatatgttgatgagttggctctcttggaaaccatgttggggacattcacgctgataagacctgaatcggagccaagatgctctaagggattctgttggagcctgagtgaacgaagaaatttgcaaacgaattgcctctatcacggattcatcgaagaagtgaatcatgaatgctttctttgtatcagtccaactggttaaggaacctggttctagttgacgcaaccatgatgttcatctggtcgcaagagagtgggggaagagtttgcaaagaaggtaatcagccggtataccttctgctttaatagaggaaacgatgtcttcgaagacttccaaatgatccaatggtgattcatcgggagctcctctaaactttcctttagatacaagatcataataggcagggtgtatagcaaagtcatctctttcaaaaggaggtagcttgaatgctgatcggtttgtgtagaagagatcatttctgttaaaatcgcctattgtagccgtctggttctacagagggtgtcggtcgacaccctgatattgtctgtcgacacagccgtgaaagtctgccatgggaacgtgattctcaatctgaaggtacctgaaacacaagagaccaaaagacaaagaaacatgtgaatatgtggtaaaaaagaagtatctagacttaaaaggacacctagtctaatggtgaactaaaagagaacttcggcaacgacgccaaatttgatatagctcaaattgccttaagcttactccctcaaataagagatcgtcgttagcacttaagggtcgaattccactgagctctcgatgttcacacaatagacttatgatgttgtttaataagctagatgaagtaattgaatgtaaaagacaaataagcaagtaaacgagttgtagattcaagtgattaaagcgttgggagatagataaatcatagatctagctattattaggattgttaacgcaccgttctcgaactcaaactatgattctagagtagccagtggcgtaccgcgaaactctctatacttaaagctagataaccagagaagtcgagaaatcatatgctaaaacatgcattgctaataagcttgataagttcacctagtatctaaaccagagcccttctatgagcctacctgttttttcttaaatgcctaggctcatctatgatagttctaataacaagtacctatggcgggcatacctattatctaatatcaagttctaggtgatcaatctaaaactagcaagaagaataatcaatatgaagaactctaagaataatcctaaggggttttccatctactaatccatctaaatccgtatttagactccctaaacccaacaaggtgattacccagacatgataccagaaacacaaatcataatctgaatagtttgcattgatgatttaagaatgaaagtaagggagttcagaatcctctctaaaaggattggattcttctctcaaaatgtgtaacaatctctaaagcaaaacttaggtctaacaatgaccaaacaattaggtatattcatgactaaaaacgtgtagggactattttgtaaataaggaaaacttcagggcttttcaaaggcttggtagaaaacgagaattcccttggcagcaataagagtgtcgatcgacaccagcttctgaaaaacgtccttcaagaacttcattgctgaaaagcttccaaaattccttattgtgctccatagttcccagatgtgtaagtgtacctgaaatgactcaaaacatacgaaaaagactagaaagactctaaaaatcattctgaaactatgttagaaatcagtaaaaaccaggatatatcaacatctagttgaatacacattctgttaatgagatgaaattttagcgtgatgaaatttaactactggtcataggcttaccaactaaaatagccggatttgagtcactagcttggatattagcgaaagtagctaatgaaaggtagctggaattaataacaaaatccccccggatggcccggggtcccagtgccaaaagccttctggtataaatgaccaataggtcggaaacgacctgatgcatggataagagctaaggtttctatcagccttcactcattcaaaggcacgatgttcacaaaatcgctcaccaagtccttcttaactaatgcatgaatcttgactccctattaacaacagaaaccatataattagaatggcattcgaaaatcacatgtcaatacaatatgttttgtgaacttacatgtgagtttaccaagactaactcgagtgtttcaccagtcatgctagtgtattgacgccaagagtgaagcaccttcacttggacacgccatgaggtcttgtaaggtcggacatccctcaggaaagcaaagaggcagccatttgaatggtaagcaaagtttctgatattaaaaatggtgtgatatttgatagactgcaatgtgtagaaatgatatgtaatctagagtatatttatagtggttttgagattgtatacggttttagatttagattatggagtaggcgtaatctttgagaatcatactgtgaatattctctgctaggatatgaaactggaaatccggtttgaaaaatatcttcgtgttaaagatgattgaatctgatatgtagatattgacatatctgttgaactaaaaaaatatgttctagattgttttggtaaccacattgatttcaagaattcaatatagcgaggttgaaggattgtgaaaagattgcagaatgattcgtgtagctgtagtttgggaggttataatattaactgtcggatttactatatattcttgatgtgattaaaactgatttagtatatattcttcaatcaaatcgggtaattgaatctcttttatgttaagtacattgattatctgaatgatcaaaccgagatttgtgcgctcgtttgcaggagcggcaatatttgaaggaatcgaaagtgaggttagggccgaaagagagagcatcaatcgttttgggcccaaaaaactgggttaaaaactgggtaaaacccaaaaaaaaaacgacccaataaaatccttattttgtacttcaaaaatgttaagtagattcattgtttcttacttttcatattccttcatttaatcttaattatcaattttcttttggtcgttgtcatcattattttcaccgttcgcttcttcgttatagtcttcatctttattttcctcgttctctttcttactttcttcctcatcctctccatgttaatctatgtaaaatattcgcaattatgtgggttaaaacagagcaataaatttaaacttactaacctaaaccaaacatagttcaataagcctatgaattaactactaaaacgacttagttcatttcaccctctgaatttgaaattcgactccttagttcccatctcccgaataatctaccaaatttcaatttactctgagtacattggatgcttatttgttgtctccacatatttggtcaaatctgaaactttaaaatattctcaaacctgttgaagaagttgtttaaatcttaaatctaaaaaaaaaaggttttttaaatctatatcccacaattcaacctcatgacactaatatcagacacctcatcatcacgttgagctacatatatatgaactaaacatgatcataaaaatgtcatgtcataactttttctcacttttttggccatatttgataatccaagtttgtcttatggtgtcaaccaaatttctctctttctctgtcatttatagaataaaatcaaccgtatttgttacctaaattttgacgtcaattgttcataactgaattttgctcagattgactcataacttaggattaataacttaaatgactctcataattgatggctaactagaatgactaacatttttaatgaaaagactttttaaccttaatcagtactaaaaccataatttgatactaaaaaccatactttgattaaaaaaaaaaataaaatgattaataaaaagaaaggaataaataaaacacatgtaaaaaacccaaaggaataaaactcaaatcgatttgggcttttctcgattctctcttttccgcttttgcatgtctcttcttcttctttgatttcaaattgaaaccctagcaaatctccggtggtggcttctcgatacgccgacttctcttctccggtggtggcttctcgactaggcgacttctctctccagtggtcgctgcttgacttggcgacatctcttctccggtggtcgctgcttcttctcacacaaaacggcgtgagaattcttctttggtacaagcttttgtagccgccgtaggttccggctacacaaacagcagggaagagtcgcggtggcccagattcacttcttcggtggtgtaggtaaactattgacccgccaccaccgcttttgaataagtcccttttatcgatagaattttgtttgattgtgatggcgattaatattttttgttgcagatctgtagatttgttgcagcattagggtcgtgggtttttccctttctgatttactccttatcaaaagaagcttctccggccacaacaacggaggtatcgacttcggtgtaagtaaaattcagaacctgccacctttcgtttcaaaacattgaccaatggccaatcccaatgacgatagttctaaggtctcgtatgtagcatctcctttatcttcttctacatatacacttaaactcctcttcttgcttggtactttcgttttatcttcttcttctggtggaatcccatagaggctaaagttctcatcatcagaatctgttccgtcggaatcatcacagtaatcaaatctactctcgtcatcttcaccatcttcaactgcttcagatttttgtccttcaacaacgttatcagtaggggtgtatacgtcaacgttttcaatgttctcttcgacaataccgtatacatcaactgcttttgtcttcggcaagtcgctgctacctaaatcatcaatgatttcctcttctgattcatatagaactttctcttttaattcaacacaaagtcaaacaatagcatttttcgtttgcctcaaataagactgaaactgtctattattaccaatgagtacaggtggagtatctgctggtaattgctttcatttcgagatcttgtaactcaaaataacttcaaatacactcttcttgacattgtaatcctcatacaccatttggatgagatcatcataactggtttgactattaccttcaagtacacgacaaccttttatactatcaacgacaaaaagccatcttgttttctcatagacccatttaccacacatgagaattacttgatccataccaaaagagggaatcgaataaaaacaagggaatcgaatttgtatcaaagatgaatagaaacaagtgaagcaactaagatcttgaataagtagaagaatagtggattgtattgaaaatagatttggtaggcgttacagaagaagaaaaaagaaaacgataatggcagttttttttcttgaaaaccctaggagaatattccttgactcatttggatatttaatggattaaattcaaatatggtaatattttggaaaaatttgtcggctaataaaagtctgtcgtaacgtttttaaaaaaaaaaaaaaaaatcgagtcaaaccggatttaacatacaatcaaaccggaaataatttaattgagggctagctactaaatctcatataacaaaaaaattcgaaattttaaaaacaaatctgccaaaaaaggtatgttattactaaaaaggttattctagtcataaacaaatcggccataacattgacatgagtaaatatgttatgctttgacactaaaaaacaaaactgtcatcactaaaaacaaatctgttatcactatatgactgtctagtaattttattttttaacaaaaatctgttgtaaaacaccagatttgttaacaagttaattaaatctgtgattacacaaaacaactctgtcatgcctatataacatttttctgggataacaaatctgttacaaaacaacagatttttggttaaaaataaaaaatctgctgctaccataaggaaaaatctgcggtattgaaaacaaatcagtgactgattcattttcaaccattctaaattttaaaattttagaaaaacctgtggagactatatgaaacaaatttgtcgcaaaaaacaaatgtacgaaaaaataaaaatttgtcgtaacttaatccagtaaagtctgtggtacaaaacaagtatgttgtaaacaaatatgtggttgacctataaatttgtggtcgaaaacaaatctgtcgcaacaagagctacaaatttacaaaaatcgacgatggcaatatcgtaaataaatgtaaatttaaagccatgctggaattaaataataatggtattcctataatattatttttctttgcaaaggaaaacatggacat

SEQ ID NO: 37796 - DNA, 10812 bp, Arabidopsis thaliana landsberg
cagacagctttgtagtaaactctctgatggggtcctgatacagagagagcagacatcacgctcagaacctggagcgcacatcccggtggcaaagacttggtcaggagcaatcccaatcgaaccgatgaagtagccctcctgagccgtgacgttagaagctagagtagagaggatgagtcggcggttcttatcataaggactattgggtatgaaagtcccagtagtattgtcacaagtttgtgcagaaacagaaattgcactgaagcttatgacgaaaaagacgaagaaacagaggactaattcacaactcttcgttgccatttttcttttttcttgagataatgtgtgggtggtgtagttagtatttgactatttgtggttcttagaaatttaatcatcagtttaaaatttccatttgaataaccatgcacattaataagaaattgacaactttgaaatttttgtgctagacttggactatgtaagtcaatctttgatattaggttttggggcttatgaaagaagatacatgttaatcattagcctcaatttcaacgagagctaaaaaccgtgatcgatgcatcatctacgtacagaacaaggacaagacctgctagtagacatgcttggaggatgtgaatgcatttaatgactcatatctaaaaagtcaaaacacgcagaaagaaaaaattgtcatctcaaaacacgcaaaaatgatcaagctagattcgatttgttttctccacaaataactgaataagaagcatagtgactttaattttgtgatgtaaagtgtaaaatgcaatttttcagttatgtaaagacatcttcaatggttacttttatattttcctctattttttagaaaactttattttggagatgattattggaatacaattcttttaaaatagaattgaaaatggtttaaaacttttttttttttgaagaagcttaaattacagcgtaaatacaatttaagacaatgtttgcggtactctcctcacgctgatttttcatgctatcataattctgaatttctgatgtccacgaaaaaataaaaatataaaaataatatcttgtattagaaaattgtgagagagagagaaaagattcttttctgacaaataatatcttatcatatccaactaagttaggctgttttttttcctttaattcctgacaaatagtttattgtaatttagaaatcgtaactactctctctttgtctttttttaaaaatagttattattttgcgcgatacaagtttgacattacaaaataaaataaaataaaaccggcgtttactaagacttgttggtctcatagaaaaaagggaaaaatatagttctagtttcaaaaattgagagctacatgatctgaaacccagatcgaggaaaaggaaccatgtcttctctgatctctttcatcttccttttccttttctcatccatcacagcttctgctcaaaatactttctacctatatcataattgttcagtcacgacgactttctcaagtaacagcacttactccaccaatctcaaaacccttttgtcctctctctcttcccttaacgcttcttcttactccaccggattccaaaccgccacggcgggacaggcccccgacagggtcaccggacttttcctctgccgcgtcgacgtctcgtcggaagtttgccgtagctgcgtcacctttgccgtaaacgaaacgttgactcggtgtccaaaagataaagaaggcgtgttctattacgagcagtgtctgctcagatactctaacaggaatatagtagccactctaaacaccgatggaggaatgttcatgcagagcgctaggaatcctctatcagtcaaacaagatcagttcagagatttggtcttgacccccatgaacttagccgccgttgaagcccgcaggagtttcaaaaaatgggctgtgagaaaaattgatttaaatgcatcccagagtttgtacggaatggttcggtgcactcctgatcttagggaacaagactgcttggactgtctgaaaataggcatcaatcaagtaacctatgacaaaattgggggaaggattcttctgccgagctgtgcttcaagatacgataattacgcgttttacaacgaatctaatgttggaacacctcaagattcatcaccacgtcctggtatgaacagtccctttcctttgactacatatttcaacacaagtttcatacaagaattttgcttaaaaaattcttgctgttgttgatacaggaaaaggtggaaactcctctgtcataattattgcagttgttgttccaatcactgtactttttcttctattagtagctgtttttagtgtcatggctaaaaataatatgacgctcaatgagaaggcaccattagctgtatgtaagcacaccaaagataaacatatctcctcataaaatgaatagtctgttgtgctcttacttaattcagctgttgaagttttcttttccagatgggaatgatattacgactgcaggatcacttcagtttgattataaggcaattgaggcagcaacgaattgctttttgccaattaacaagctaggtcaaggtggtttcggcgaagtttacaaggtattattaccattgaacagagcaatgtactctgtttttcccctgtttccaaatcaaatctcacacacattacttcgaaagttgagatctatgggatgagtgcagcaaccttgtatttgcaaaggttgttggggaacaaaacaaactctagtcgtgaattatcatcctatatttgtaacaaatactaacttcaacttatataattgcattttgagtacttcattttcatgattaatcttaccgacaattcctatatacctatggttatcttaaaataaattactcgtgtagggtacacttcctaatggactacaagttgccgtgaagagactatcgaaaacatcaggacaaggtgagaaagagttcaagaacgaagttgttgttgtggctaagcttcagcacagaaatctggtcaagcttcttggattttgtttggagagagaagagaaaatacttgtctacgagtttgtgtctaataaaagccttgattacttcttgtttggtaagatttagcttaggaaagatatttccttttggaactcatgttttaggtattctaactatatgaatgtgtgcagattttagaatgcagagccagctgtattggactacacggtacaagatcattggaggaattgctagaggaattctttatcttcatcaagattcacgactcacaatcatacatcgtgacctcaaagcgggcaacatcctcttggacgctgatatgaaccccaaagttgcagattttggaatggcgaggatttttgggatggaccaaacagaagccaatacgagaagagttgtgggaacctagtaagtttttctcttaaaatgtattgcctctctatagactgtattatgcttctatggactcaacatttttagtattgtggcagtggttacatggctcccgagtatgctatgtacggcaagttctccatgaaatcatatgtgtatagttttggggtcttggttcttgagattgtaagcggcatgaagaacagtagtctcgatcaaatggatggtagcattagcaacttggttacatatgtgagtatataaagctttaaaacttctaatgtttttttgctttattcaaacaatgaccaaagcctaagttattaaaatgttgaacagacttggagactatggagcaatgggtcgccatcagagcttgtggatccgtcatttggagataattatcaaacaagcgaaattactaggtgcatccatatcgctttactatgtgttcaagaagatgctaatgatcgtccaactatgtctgcaatcgtccaaatgctcactactagctcgatcgctctcgccgtgcctagaccacctggattcttcttacgaagcaagcaactgaaactggtatttaaaggatcagagtctgatcagtatacaagcaagtcttcctcatttagttcgtaaaaaatgatgtggttcctcatcatagcttaaaagttgtaacagaaaaatggtcagatgacatttatattatttgtccacggacataagaaacatagcaggtttatctgtaattgtatgttgtacagtgtccactgtaaaatgcttatgaacagttcacagttctttaagaatcgtttctcgattactggttttactctcttcatgctgaatcaaattacctgctagatcgttgtgtaagtcttaatttggagggaaaagtcactgttacgtcttcatggagaaacgtgtaaatggtatatatcttatacttgcttgtggttacaattacaatacaaacattctataacaaaagaagtttttaacttattttcaacaccaatagattcaggaatcaggtatgaagggaaaaactcatcatcatcgaggatgtatatctgtgatggatgcatcgtcaacagaccctagaagagatttgctcgttgtatctgtatcaagcgggtcttttccaattctactctgaaagaaaagaccgggttgccgtggcacgggtaaagtcacagtgttactagtgagcatcagaacaatggttgacaacgtcggacgctcagcaggatcttcttgaacacataaaagaccgatatggacacatcgaacaacttcattcctttggcaattttctacaatagctggatccacgagttctaatggtcgcccgttactccaaagcccccaagcctagaatattattcaatcaattaataattctttggctttatcatatacactcactgtaacttaaatgattatactcacgtgtgttaccaaattgctaccagaatcatcaatgttgtagaagctgctattctttttgccacttataatctctagtgccaatactccaaagctgtagacatcagacttcattgagaattggccatgcatcgcatactcgggagccatgtaaccgctggaatccacaacaaaactttagtatatatgttggcaaaataaaatttccaacaaactttaacgtatgagatgttaagtggaacacttactaggtaccaactattcggcttgtgttatcctgggtttggtccaatccgaagatcctagccattccaaaatctgcaattttcggatttatatccgcatctaggagaatgttacttgctttaaggtcacggtgtatgattgtgagccgtgaatcttgatgaagatatagaatcccccgagcaattcctccaatgatattgtatcgctgcatccagtccagctgagtttgctttgtagggtctgtgcaaatccatggattacagttaaatcttgagattagcaaccccaagtttcaagattaatggtcaaagaatcattaaaatgcaacagaccaaatagtaagcaatcaaggcttttgttaggcatatactcgtagaccaaaattctttcctctccttgtaatgaaaatccaagaagcctaaccaaatttctgtgttgaagcttggcaactacaacaacctcggtcttgaactccgcttcgccttgtcttgaatttttcgacaatctcttcaccgcaacttctttcccatttgaaaatgtaccctatccgtttaactttttaatcagcatcatctcgttatccaatcaaagaatcaatacaaagtacttaacctagggtgtacttgaagatattatagtataccttgtaaacctcaccaaaaccacctcgaccaatcttattactctctgcaaaatcatttgttgcagtttggattgttctatagtcgagctgtagtgagtctgcggttgccatatcatctcctactgcacaataaacagaacaaatgtcttagtaatcagctaaagaggctgatgaatgacgaccactactatatcaaacccaattaaggttgttacttgttagtgatctttaccctgagatgcagatgctgtgtcaaaagtcttctttttcctttttgcaaggaaacaataaccaactaaagctatgaaaagcagaacagccagcacaacaatggctaccaccaacactgttgaattcccacttttgcctgctttttaaagatcattggcttaagatcagataatgccacaaagtataaaaataaaaaaattaatcaaaagaacaaaactttccctactagtatttcacgaaagcaggggaaataaaaagagaggacggagaatgagttcaccaggtaatgaagaagatgatatcggaggagtagacaccaacgactccggtggtggtggtggtggtggtggtagtggtggtgtttcaatggcgctttcattgtagaacgggtaaagctcgtaccttgcagtacaactcggccagtaaagtcttgctccaattctggaaagagccattccattgatggaactttgcaaacaactcaagcagtctggtcttgtaagatcaggaatgcactgaagcagcccgtacaaattctggtatgcggccaattcggtattcaccgtatataattttctagaactgacggctgctttaccggcagctacactcatcttatacgaaacaaaacttgtgaacccgtctatttgttcttgatctgaagaaatattattggtgttctgcatgattaatcctccttcgtatataagggtcgctagaatattcttgtgagagtatctgagaatgcattcctcgtagtaaaacacggcttctctcgccttgggacaaagatttagggtttgattgacagaaaaggctatgcagttacggcaaacttccggtgagacgtctccccggcaaaggaaaagtccggtgactctgtcgggggcttttcctgccgtggcgttttggaatccggtggagtaagaggcgttacgtgaagatagagaggacaaaagggttttgagattggtgaagtaaatgctgttacttgagagtaatttgtcgtttttggacaataattatataggttataaggatcttcagcagaagctgtgaaggagctagtgaggaatgagaaaaggaaaaggaagttgaaagatataagagaagacattgtttgagtaccttgatttgagtttcacatcatagagctcccatttataagctgatcactagcgtgtagtataagatgggttgtggtgactataagagtcaacaagtcaaagtaaatgattctttttcttattattgtcatttctcttaaacaacatatatttttatttgggaaaagcccacgttaaaattaacttgaatttgaatcaaaatttagttatttgatcagtgatccacatatcactagttgagcccaataatgagtgtataaacgggagctccttaaaagttgggaaccactagcctactacaacttggtattagaaacaaaaggaattcaagaatgagattcttgttgtagcaaagcttaacgcagaatttcggtcaagcttcgatttttcttagttaaattgcttccatttttgtttcataatattttagtgcctgacaagtaagtgtaagatactcttgtctagaattttatttactagagagtgaaaacaaaagggtgcagagaattaatggcttatctgctgattcttacacaatcagtttgttttgttggaacagagatgtgataggtaagtacggttttctgcagaagctatggagtttgtgaggaacagagagatgaaatgatgtaagtaggcaagtttcagttctttgtttcccaaaatgacatctaaaattcttatacacagttgtaaagtatcagaaggaaaagtactaaaatatgaagtcaacgactatctttagagtcaaccttccactaaaagtgttgattggtttgatgaagcagtgaaggctagaaactgaagcaactagggtttgggaagttactgttttaacttgtaactgttcgtttgttacttctttggtaaggaagtaaaacggtattgtcttattgacccaaagtctccgcggcttgctgaataatcacaaacctattagatatccaactccaataggttcatctttttccggaaatagattgatgaaaacttaaaaatttataattgtattttctctggttttcgctttcacatgtttattctaacatttttatagttgattcattttagttaacatcaatacaagttgatgttactcgtctagttgaccttgacttgcaagatattgtattattttacaaaaaccaaaatttgactggcttggctggtttcacattcattcattagtactcataaaccaatcattaaaagtaagaaaaaaaaaacagagaagaaaggtgaagaaattggataatgtctgcttatacctcattaaactttctcttccttctaaccttcttcattggaagcttgagagcttctgcacaattacaagacccaacttacgttggccatgtttgtactaacaggatatcaagaaactccatttacttctcaaatctccaaacacttttgacctctctttcttctaacaatgcttacttctctttgggatctcatagtctaacaaagggtcaaaactccgacatggtgttcggactttatctctgcaaaggagatctctcgccagaatcttgccgtgagtgcgtcatctttgctgctaaagacactcggagtcgatgtccaggtgggaaagagttcttgattcagtatgatgagtgcatgcttggatactcagacaggaatatattcatggatactgtaaccacaactacaataatcacttggaacactcagaaagttacggcggaccaatctgaccggtttaatgatgcagtgctttctctgatgaaaaagtctgcagaggaagcggctaatagtacaagcaagaaattcgcggttaagaagtcggatttcagttcgtctcagtcgctttatgcatcggttcagtgcattcctgatctgactagtgaagattgcgtaaggtgtcttcaacaatccatcaaagaattatatttcaacaaagttggaggaagatttcttgtcccaagttgtaactcaaggtacgaggtttaccctttttacatggaaactatagagggaactgttcttcctccgccggtttcggctcctccactaccactggtttcaactccttcctttccgcctggttagagctctgttttatttatttacctaatagttagtttggtttgaattcatgtctaatctaagacttatgcaggaaaaggcaaaaattctacagtgataatcatagcaattgttgtgccagtcgctatctcagttcttatttgtgtggctgtttttagcttccatgcaacaaagatagcaaagaagacttatgatacaccagctgcaaatgatggtaaagattccaaaatctatgtgtctgttgcttaaacttttatggatttgaattcttaaatattttgcagaaggggatgacattacaactgcaggatcattgcagtttgattttaaagttattgaagctgcaacagataagttttcgatgtgtaacaaactaggtcaaggtggatttggacaagtttacaaggtactactaccagttcattgagtttccttgttacttgcataagaggatcaaataaggggacggctctgtttaattcacaatctttttagggcacacttcctaatggaatacaagttgcagtgaagagattgtcaaaaaaaacagaacaaagtaagaaagagttcaagaacgaggttgttcttgtcgcgaaacttcagcatagaaatcttgttagacttctcggtttttctgtcaaaggagaagaaaagatcatagtctacgagtatttgcccaacagaagtctcgactacatcctctttggtaagaaaagatacagataatagggttatattctctgaaacactacttcttgatctcatatcctaatttgtgcagaccctacaaagcaaggagagttagactggaaaaagcggtacaagatcattggaggaactgctagagggattctatatcttcatcaagattcacaacccacaatcatacatcgtgacctcaaagcgggtaatatcctcttggacgctcatatgaacccgaaagttgcagattttgggacggcaaggatctttgggatggaccaaagtgtagctattacagcgaatgcagccggaactccgtaaaattctcttatatattactcatgatggttatgaactttaattgcaagaatattttcttgaccaaagtagaattaatcttgtagcggttacatggccccagaatatatggaactaggcgaattctcgatgaaatctgacgtgtatagctatggggtcttagttcttgagattatatgcggcaagaggaacacgagcttctcatctccggttcagaattttgtcacatatgtgagtactataatcgtatctcactgttgttgtaactgtaagatttggattagatcattgaattttgtttcaggtctggaggttatggagaagcgggacaccattaaacctcgttgacgcaacaattgcagagaattataagagtgaagaagtgataagatgtatccacattgcgctcctatgtgttcaagaagaacctacagatcgtcctgacttttcgataatcatgtcgatgctcactagcaattccctcatcttacctgttcctaaaccacctccatccttcattccaggtagaccaaaccaatctacgacgaggcccagttcccaaaataaagatgatggaaggtggtccttgttgaaaatgatgttccattga

SEQ ID NO: 37797 - DNA, 2307 bp, Arabidopsis thaliana landsberg
tgaaggtcgcgtgttcgatccacgctcaccgcatttttgttatttgtccctactttaattgaaacgcgtcgtttaggaacaacaagtcttattttattttatttttaattcacttacttgaaacgcatcgtttttgacgcgtaatgaattaaactgtttacctttgacttgagagatgtagtagaaaaactttaagatcttcgagaacagacttaaattcatgttgcattagagtttgatgaaaaccgattgattttattttattttatatacatgtattaagatcgagtgtaatagtatatttgtcccatgttcattttttagatgtatatacgacttttagaaatttatgcgttctcaacaaaaagaaaccatcaaaggtagccctcttccgaagaaaaatatttgacttttatcaaccttataaactaacaatcgaaaactcatcccaacacaatcttctaccttcttctctaatccatatagattccacacttcagccaaaaaaaaaaaacgaggatggaggtcccaaaatcctcattgctaatgataattttcgtggtagcttcatgtttcttgcatgtcaaggattggcatggtcagacttattgtggtggcaatgcgactccccgatgccagctccggtacatcgactgtcctgaagagtgccctaccgaaatgttccccaactctcagaacaaaatttgttgggttgattgctttaaacccctttgcgaggccgtgtgtcggggtaattatttaaccaccaatttctttttgtaattgatgatataccaatgcagtttaaaattagaattaatagaatttcatcattttgattaattttagattttgaaaatatgttttaagatttggatatgatcttttgtagcggtaaaacccaactgcgaatcctatggatcaatttgtctagatccgaggttcataggtggtgatggaattgtgttctacttccatggaaagagcaatgaacattttagcattgtctcggaccctgactttcagatcaatgctaggttcactggtcatagacctgctggccgcactagagactttacatggatccaagctctcggcttcctcttcaactcccacaaattttcccttgagacaatcaaagtcgccacttgggacagcaaccttgatcacctcaagttcactatcgacggccaagatttaattatccctcaagaaactttatccacttggtaatcatagaaactcaaattttatcctatcatttttgtaggttgcgattgtttcaacttttaaacgtcatctttgtctattcgtttagattttcatgtaaacactcattattttaatgcatattatcaggtactcatccgacaaagacatcaagattgaaaggttgacagagaagaacagtgtgatcgtgactatcaaagacaaagctgagatcatggtcaacgtggttccagtgaccaaagaagatgatagaatccacaactacaaattacctgtagatgactgttttgcccattttgaggtccagttcaagtttattaatctgtccccaaaagtcgatggaatcttgggacgcacttatagacccgattttaagaatccggctaaaccaggagtcgtaatgccagtggtgggaggtgaagatagctttaggacatcttctctgctctctcatgtttgcaaaacttgtttgttctctgaagatcccgccgttgcgagtggctctgtcaagcccaaaagtacatacgcattgttagattgcagccgtggtgcgtcttccggctatggactcgtctgcagaaagtagttaccaatacaaactcagtttgctaagaattacagatattaaaagtatattgttatgtgtggatgtcggattcggtccacttcggactaatccgcattcaatgggcttcaaggtgaattaggcccaattcccagcccagcgtgagcctggccgtttaaagaataatccgacattaatacagaaacgtaacgtacgacgttaataacgtacgacattaatacgacgttacgacttaaaccacgcattaaagtcccgagctgacgactcgtaacgtgcgaagttaatgaggcgagatccgcggcgtgaagtcagcgaatcatttaactcgtttgattcgatgtatttgtataaataagagtcaattgacattgtaaaaggggacacacattgtactgaaactatactgaaatacataaatacttttcacttgatcactgttcgtctaacaagatttaagaccttcacgaaacaaccacaaaattctaattgcg

SEQ ID NO: 37798 - DNA, 3579 bp, Arabidopsis thaliana landsberg
  unsure (1)..(3579): unsure at all n locations
taatcttctctgatttgaccaaaagtgttctttttttttgtcatctcatctatggtggattaacaaaggttcctcttagttattcttcaagaaggcggcatgaatgctcactttgtttgtagtctgcttatctcagctatggtctccatagtgagtttcccttagagcatatctcgttgttgtccatgatgaagtttttgctccatgcggatcttgtgaacttgctagtagaatttttccgggtaacggcatcagaagatttttattccttcgattatggggttaccatttaggtcaagccaaaacaggtcagctttaaagatgggggtccattaactaggagtacccttcaagcctttgtttccttaaagaaatttatgattcgtatgtagactggagagatctggtgcctagtggcaatgtgaggtaggtctatcctctatggacacttacccatctgtttaaaacccggatatcccaagtgatacgctagccccaaaccttgttggatggtgtaggcctggcttttacgactgggtgggcatatccggtggaaactggatagataacccaagatggaaggactgaagtgaacactcaatgggctaagctgtcatttctctatgaaagctccatgaaccaagagggctgttgatagctgatcaacagcgaataggagatctctttgtaatggtgattgctcctctcactgaacgctgattgttgctgcctcaacaatggattgttttggtgtggtgcaatgtagatgaagcaaacagttcatcgagtttttttgctggattttcaggtgactgataatgtttgcgaaatgaggaatagattttctaaatattttcttacttgcaggtttcataagctttccatcaactagcagtatctgccaatatcacagacagataattcgtaatgggagacgtatatttcaaccatttcgctcagcaactgcagatgtctgaccaagagaagggtgaaatgtcaagacattcacaccctcattcaatcaatgaagaatctgagtcgtcaactctggaaagggtagcagcagagtcattaacaaacaaagtccttgatagaggactaatggagtatgggtaggttttactccctatttgtatattcttagctttgagcttgtttcttggatgaatacccctatgttcttgcagatgtccacattacagaagaaggtgttgcattagagctccttgctgtaatgagatctttggttgccatcactgtcattatgaggcgaaggtagaggcttttttcaagttatagatttcaggaaactactttttgtaaccgctgttttcacaaaatctgtatacttactcttgcaatcatgtctttggagcagaacaacataaatgtagatcagaagcagaggcatgatattcctcgccaccaagttgaacaggtaaagtagtctatatatcttggtttctcggagttattattttatgttcaattcccagttgacaagacctctatcttcttcttcacaggttatttgtttactttgtggtactgaacaagaggtatgttttaactcttacactttctctggattttttctgcgtttagtaatcagacattttcttaactttgttggagatgtaactctgtattttctctggtaccaggtgggccaaatttgtatccactgtggagtgtgcatggggaagtacttctgtaaagtctgcaagctctacgatgatgatgtaagtctctgaggagaacttattgctaagcttgtttgttgtatccatatcctttttcttatgctatataccatgccctgagttttccaggcttttttttgttgttaatggttaaccattatgttgcttatcttgtttccagacgtctaaaaaacagtaccactgcgatgggtgtggaatttgcaggtacattcttggacttctctttaacatacaacatgtttgatttaatccacacgatatatatttgttcataactaaaatctctttttcgtttcagaatcggaggacgtgaaaatttctttcactgttacaagtgtggtaagccatttactgcatcagatttcagataacctcaaattttccgattgggcaccgctatatttgttgatttttacaatctaaccagctctctgattctcaaaccaggctgttgttattcaatcctcctcaagaacggtcacccttgtgtcgaaggagcaatgcatcacgactgccccatttgctttgaggtattacttattgttggtttttgttctacttctccactgtaaacatgagcgtccctttgttaacaaaaactgtcctggctggttttcttccagtttctgtttgaatcacggaacgatgtgacggttttaccatgtggacacacaattcatcagaagtgcttggaggaaatgagagatcattaccagtaagtacattataaaattcaggggcttgtgttccattttgaaatgttgttgtatatatcaactgacaactccaaactatgcctgcagatatgcgtgcccactttgctcaaaatctgtatgcgacatgtcaaaagtgtgggagaagtttgacatggagattgcggctacaccaatgccagaaccataccagaacagaatggtcagtatgagaacaaaacttacttagttacaccttatcccctaaccaagaactaaaagtctttttgacggtgacaaaaataggttcagattctctgcaacgactgtgggaagaaagcagaggtacagtaccatgtggtggctcagaaatgcccaaactgcaaatcatacaacactcgccaaaccagaggctgaagctttttttgaagttgatttgctatcaaatgcaattaagagcttttcacttgatccaatagtgtcattggatccttaacttgaggactgggtctctcgagtctatctcttctcactctcttcttcaatattctctgagtcgtctcttgttcactagtctatatgtttccttggtgttgtttgatggtctggttagtttccattgtgattcatctcctttgtaattatgcggctttattgaaaagtttcgtttaatctgttaaaaaaaccctaaaaaatttgaacttgtatgaataaaaaattttagctgctcgcatatattaataggtttagagactcttattaaaggccaaaagcacacgtctcaaaaatatatccgtttcctcgcttagatacgaaacctctctctttttgaaatctctctgactctctctcnnnnnnnnnnnnnnnnnnnnnnnnnnnnnnnnnnnnnnnnnnnnnnnnnnnnnnntctcctggtcagcaagctgattcggatctgacgtctctcgtcttcggtttgttttttcctccttttcctctgatccttgttcatccaatttcgaatttcgactgacctagaaatcaggattaagcgtgagttcttcatgtttgtgaagtcaaacgctcttatgatttggtatttaacgagatttgtgaatacttaatggcttaatcgcttcatctaatcttgatttcgcttaaaagactgtggcatcgaaatgtgt

SEQ ID NO: 37799 - DNA, 3793 bp, Arabidopsis thaliana landsberg
gcggaaccgaaaactccccatggataagaaacaagaccaaagtgaagaaaacgatctgttttcgaatattcctcttgagctgatgatagagattctcctgaaattgccggccaaatccatagccaatctcatcttcgtttcgaaacactggtcatcgatcatcctcgacaaagatttcacggagttgtacctgactcgatcttccactctgcctcgtcttctttttcaagtctcagtctcccgtctcaagatgcagttcttgcactccagctccttggagggcccgtcttgtgatcatcacagggtagctgttactttgaatcatgatctagagtatcggttttctccacccgtccggggcttgatctgctgtctaaatggtactaaagtgttgattgggaatcctagtactggtgaattcgtaactttgcctaaactcaaaactaagaaaaggttcatagatagagtatcattttttggatatgatcccgttaacgatctatacaaagtgttgtgcataacgcaactatatgttcatttcatagatgatattagaattattcggacagaggagcatcaagttttcactctaggagctaaacaagaatggagaatgattgaatgtaagcatcaccattatctagctgatcctgaaaagaaaggaatatgtatggatggggttgtgtattatgtagctaggatcaatcataaactattatctctgataagcttcaatctgagatctgaagaattcaatgttattaagttccctaaggatgtcaaacatatatggtagtaatctggtgaactacaatggaaagatagacacttgacttgtgggttatgaaggatgatgctagtaaacaagaatggtcaaaagcttctctattggttccttgttggacagatttagttggggatcaaagtttcaggttcaagggtacacttagtaccggggagcttacatttgcaccgtgctttattaccgatccgttcttttttatttgttacgatctcaaggaaaaaagtgccagaaaagttgtgattgaaggacttggggatgactatgttaatgtctctttggatcatgtagagagtcctatgtttctaccaaaggtttgtttatccgatgatgagtgatgactagttcttttttatgttcaagactcatgtaagaacttggaattggatagtagttgtctaagattattccttattttgtctaatggcattttatgctcatgactttgattcgggtttggtttttgtgtggagctttacaagcttcatttttttcatctggtttatattttgagagaacaaaaaagtttaaccaatcatatgaacaaaactgaatctcaatttcgatttgatactttaatgattggttatatacttatgtttgtttagtccacaattttggatggataagtttttaacaacataattttattattttgtccaaaattggacttttggtaaagaaccaggatattttgtgcaatttactagaaatacaaaactaaataacaatgtcacaagcataggtgacgtgtccaactgtaattggataagctgacgaaggagcagagcaaaatttcacctccaaagaaaaaaattatcagactttcagaagaagaaaaaacgaaggagaagaagaacaatttcgcggattcaagagacagagagcttcttctgcgtaaagtttgatcctttgaaaatggcggaagaaccagagaaggtgtcttcttcagtattacatcaaccttctggtgataagaaacctgaagatgttgggatcaaacctcaggtctgtgacttgctcaatttttcccctttcgctggatcaattcaagggtttgcgaatttgatatctgggtgtttgaattaacaggatccagcgtcttcttctgggtttggagcttatcctaatggtgattctccaatgtacccggttttttatccgggtcttgtttccggatcgaatcctgtacagtacgaggaacaaatgaaccgtggagctgggatctatgcggttcctgttcatcaatttggaggacatgtcgctggtcttccctcaaattatcttatccctctcacttacaatgttccaacgtaagtaaataactccttcgaaattcccatggatttgatggattagcttgtctcagtgtaacactagagaagaatcatagctataggtaactggtttcgttagaagaatcatagttgtgtcaacaagttggtaccttttgctcatttgcttgggagttgaatccagaccattgttagaaagtataggcttgattttgaagcttttggggttgatggttttatgttttgtttaggactagaacaaataatgagggtgagcctgggggagagaatcaagcgcaagctgaggcagggtcagcagcagcagcaacctgcaaatcaaaggcatgttgtggaaaggagatttcagattgcgtttcagcttgatttgttcctcatactcaagcttgctgctgttatctttttgttcaaccaagatggatcaagacaaaggcttgctgttcttgtgattttcgctaccataatttacttgtaagtctcgagaatcttgtgtaatttcaatcttatgtcttcttatggtgttatggttttcactgtatataacgatgtctcgagtgcgtgattcaaaattaggtcccattaatccctcatagcaatctttttatgaaaaagtattgatatagagtttgatctctgtttgatgttgcaaacttgacagataccatactggagctcttgcaccgtttgtgcgatggctctcacaaggtatgcatagagcagcagtaccacctgctcgagcacatagacctgctgttagagctgataatgatcccgcagctgcagttccactaaacgaaaatgctgttctcggtatattactttgcaatatctctttcccatggtaattactgaagccatcacaacaacaacttatgcagaaggataatctttctattttttgagcagagggacaagagaatgaagctgataacggtaaccgagcaagagcaaatgcaaatgaaaatgaaaacgttgacgcaggaaaccaagggaatcaatggtgggggatagtgaaagagattcagatgatagtgttcggcttcataacttcattactccctggttttcacaacatagagtagaagtagactcttttctgcatactttcatcttctgcaactcaaaaaaaggaagtgttgtgttctacttttagtctccttcgatctaatgtgtgagtacagaaaattttacccttcagactccaaaacttaatgtatgtgagccgcaaccctctatgcttttgcctctaatgttcaaagcagaaaatcataagaacttaggtatctttattgataacatcttacacatgaccgctacaccaaaaagttttggtatttctgcagcaaaatcgacagagatcaaggaaaacgtttccttaattttattctgtgctctaaagaacaatacttttcaaaaaattagatatatatattcagagagcagaacaagaagaatcaaagggtccatcacatttccaacaaaagattactaatttttcgaagctccttcagagcagtcatggctgtgacttgtcccttttcgaccaaattgttcttagataagttctcaattagtcctgcctgaaccagacctagttcttgctgctaaactgactctataacctgaacatatggtctcaaatcatcagcaacatttgatttgatattttcagcataaa

SEQ ID NO: 37800 - DNA, 5147 bp, Arabidopsis thaliana landsberg
  unsure (1)..(5147): unsure at all n locations
gatcgatcctttataaggaaatggggatttgagaaattggcgtatagagatgtgaagaaagtaccacgacgggataggaagtatgcggttcaaccgcggaacgtatttgcgacaggggttcacatgtctcagcatctacaagggaagacgtatcacagagcggaagggaaaatacgctattttcactaccatggttcaatctcgcagcgtcgtgagccttgtcgtcatctttataacggtacccgtatcgttcatgagaacaatccttacgtgcttgataccacaatgcgtgatattggtctcgcggtgaagacgtttgagattaggacgattggagatcgcttgcttaggacgagacaatgaaggcaggagaagaatggttaaagacatgttatcatcattatgcgttgtaacgtaaatcttttagagtattatttaggcgaatgtaacaattttcatggttttttgtttagtatattcttttattgtattataaaatgggttcgtacatagagatcatcatacagctcagattcttggtatataagcatcttttttatgggctttataattttttccgttatttatggaaaagtgctttatataaattagtgaaagttgttgtggtcttccatggatctttgtcgtgttaattaaaagtttccacattttctttctcataattgagtcactaaatagtaaatactcgaatatttgcaatgcacaatgatcatatttgtttcatatggaaattgtgaaaatcgtttagtatttcattttaaaaaatttagtaaacacaactccttttaaaaaaatacttttttcttttatcaaacatgtaaacacataacccatttctgtataaaactctatttttgcaaaattgcaacgttaataaaatagcggatagatttcacttccatattattttaagatttttttatcatttactaaaagtagtatttcataaattatctttaataaatttgtatttacatttaccaaattagctctaaatttatctttccatttaacaaattagctctgcaaataatttttttttttgctttcatttgctaatagttgttccataaattatcattaacaaattttattttccagtttacaatttagctaaactctagtaaagtatcttgttttgtttacaaaattttcttataactattactaaaagagaaaggttattttgtttttaatttgtttttataaaattcacaagtgttagtgtagaccccagaaaaaagtgtccttccaagtttcgtggttgttaattgtcgcaaacgctggaaagtcctcattggtgccaaatgctcaacaatcatacacattattcccaatcaacaaatctcctaataacgacaacacttattcatctaatcatttaacaaattatgaaattaatctcaaagttaatgataaaaataaaaatagaaacaagagattgataaatagggaatgtacaccgacggttcagcatttaattctaatgcaaacaaggtacgtaaaaacaatttctagcacattcacgaaccctaccattacttcccttacattaatatcgatcgactcacaaatttagtaattttgtaaggtgattgaattttgcccataatgattgttgtaatggacggacttaaatcatttaatatgcttatcaattttgtcggagacaacatttaatagaactagtcgaaactacatgatctttgcagctgtgatattctctgcaaatctacagtttccatttaaaccactagtttaattttggttctattaaattgttattcgtcgtccactaaagaaagcaaccaagctatttcaacgagttttctataaattggaaagaaaaagttatagacaaaatctatttcttgtattaatataattaaggcaaaatatatttcttgaaagatttgtattaatatgtacttattatcttcgactctcttgtactcctatataaatcgtgcatctctagtttagagttctaaatttgggaccaatttaaaaaccattgcacatagatacaccgttgcaaggtaggaccaaactaggatggccaaacatgtgtctttgtagaattggattgataattcatagggccagattcctagcaactagcaagacccaaacaataatgagatttgaacttagtttgaaactgatctttataagtccggtcttggctaagatttttaatactttgcatttgcgtttagtttaaagcgcaaatggtaaaagaaaatttatttgtctttaacgtttacttttacaaattacaaagaaactttacttaaaccaatcgagaactaaatcaaactagaaaagtgtaccacatccattattgaaaagtatatcaacaatatggagtaaaaatgttagttttctcggaggtgaaaaacgatattaatttcccaaagaaaaatatttagcaagactttggtatattacagcttatattttatattgtagttaagagtccatcatttaaacggcttgagcttccaagaaagcattaaaattcttggaggcttctaataaccgtggagagatcgccggagacgtcaggtatgaaaccggcgatgatgtggagaatcgaacctgacgcagagaaggagactccattgcttttctgtctttcgaaccagaaacctttaaaacacctttgatctctttctcaacaggttccttgtcgaacacgaaagccgctgaaaccgattcgtcatggtcgttatcacctgaaccacttttgattagctcggacggtaagtcaaagaagtgatttcctccttcctctccgcaggattccgaagtatatgagccgcaatcgaatttctccattgaagctcgagcggagatcactgtggtagtggtggtggattctctgacggagactgttcttgaaacggtaatggtagaggatgatgatctcgtcatcgtggtggttcgggtgaaggaagaagaatcgtctttctgtgatgatctgatcggttttcctttactgaaaccggggaggaataaacacagagcgttgcatttgaatctgtcttctaatgtactattattgctgatgctcttgttcgaatcggttttaatgaagaaagagtttctgattccgctgctcttatgagaaagtgtcttgctagtagacccacaagatttgcttctcttgtacgacgccgaagacgagtcttgttccttgtttctgagggcccgcatgagacctgaacgccgttttgcagaaccagtggttgagtttggaaggctgtcttggtccttgtttctgaacgcccgcatgagacctgaacgttgtttaggagagtttgggaggctgtcttgttccctgtttctgagcgcccgcatgagacctgaacgttgtttaggagaaccagtagtctgcactggctgcaaaggaagaggcataggcgaatctaagtctctaggaggtgacattgccggtaaacgaaccatatcgaagctatcgttccttctcaacgaacccgacatagacaacgacctgattgatttcggatccatcgatatctctctctcggattgcatcatactcgtttgcttgactagaatcttcttctttgaatcgtttctgcttagaacttgccaatcctcgcgagcactttcgtctctgaaactaatagttggcataagtactgcagccaccattttattttccgacctgaaatctcgatctgtaagaagagaaattgacaaatggctaagtcttagtgctaaagagaagatgaatacttatacagagccacagagagtaagcatggaccgcacgtttggtggcttaaggatagctacactgagtcatgatatgcacgtccagcttttttttcgtttcctgcgtattagtctcagccaaaggttatttgactttattcttataaacataaacaaataatataagctttaaaatatttaacatcgttgacatgagactatgcccaagattgagacaggatctgatcatgatagatatgctcgcacgaaccacatttattttaatattaccgagggttttggagtactttacctggaatttgtgcagaccacaagccgttgtataaggaagaagatgattaaataattgaaaaactcatttcatgttcttaagttacaaaacatcaatgatgggtcattggtggtggtgtgtataacaactaaatggatttgactctactgtagggaattgtaaaacaaaattaatacaacagagataccaatgataactggtaaagctgagacgaagtacaacgctccatagccctgcaaacggattaagaacaaaaggcaggagaaatatcaatcagatttcaaaaagtcaaatacggaacgcttaaaatgttgtgaaagaataacgatttccaggtcaaagctgtgaaagtgtttgagagtgatatgggaacaaaccgcgactttggttactactccttgttcatcatcgacatcgacttcttcaattgcagcagctgaatcccattcgacgttgagtctcttggctgcttcttttggatctattccagtgtctgtggatttagcgtacattgactttcctcgttgcttctttgaaacctcaaccttataagataaataagataaggtgttaagatagggctttaaaacagagttctgcttagctaactaactaaatgtatatagccgtcaccagagttacacaaaagaaaagagatctcttccattatagtttctagcatcaataggaaccattacggattatggatttaaattgcctaaggagagatgtcattatagatttatattgcctaaggcagtttcttcctatcagtcccaccaataggcaacaaaaaacaattgtgaggtacaaagaagaggtacctctaaatttggccaacggatcatttcctcatgcagcatccgaagagttgcacgatctttagggattttcccatcatttacctgtgtaaagcaatcaattcatttttaaggatcttcatactaatgccacttaataaccccatgtcgctacaaagagcaaactgctcaacttggtgttgtcaagtgagatttctatcacaagcacagttacgccttggaacagttntgcatacttagcttatata

SEQ ID NO: 37801 - DNA, 3557 bp, Arabidopsis thaliana landsberg
  unsure (1)..(3557): unsure at all n locations
aaaaccattaagtgagataaatacatgcacatgtttggtttattgcataataaacgccgtacgatggatgagtattaaaaaaacaatgaaaatgcagctttggagttagaactcgagattcaaaatccaactattggtaaatctcaagtgattaatgcattattttgaagttatgatcgttgtcagtactattgattatgtagcctttaatgtatgcttaagaatatgaaggtttttcttagcttgtttcttaattttgaatacgtaacaaccattgttgtctccgcgagtccttgtctgcgtttagcaacatgttgatcaaggggatcttgattgtgagcgtataacaaccatcgttgttttgttctcttctatcatgatcttctaatctcacttttctttttccgttcgtttttctataaaaaaaaaattaacgtcaaggactcaaggggatttgaacgtttgacttttgatatttagatgaggaatggggagagactggtgactttcaaagttgttacgtggctaattaactcccctaggatttgtgggagaatccaaatcacgatcgatttttgctcaaaggagctgattataagatggatagcaaagatacaaaataaaataactcagtaagagctttatttagtgcaaggggaaataaagaacgctaagcttaatcagtaaatcttagattgatgtcttgaaatgatgaagaaggagagttgtggatagtggctggcaacttccaaaattagctacattgatgcttataagttatgacaacatatttatgtcaatctagacttgctagaaatttctaattacatggttttgcggatttctaattgaatcataattgggcttcttgtgaattctctaaatgcttcaaaatgaattaggatttaacaactcctaccaaacaaacctcagcaaagccgtacgttctagcattttaaggtatcttcagtgcagattgtgtatatactgactgtaagaacaagaaatttataatgtagtatgtaataataactccaaaaacattcgtcaagctaaggaaaataatcaataatgggatgtcttgtctacttcttcaagcccattgaagaaggcacggatgggcccatacgaaaagatttttaacaagtctagccttcaaatttcctaatggctaattaaatagtttttattagataataatcattttgggtagtataatatacagtagtgagacatgggcttatgtcacatacactcacatgtgtcacacatacacctatttttgattattttagtcttgtttgtgtccattggaccttgagagaatcataattcattatctgtatcatgaagatttcaagaatttatattcttacaggtccattactcaaaaaaaaaaaaaaaaaggtaaagaaaaagagagcgagataaaatgatttcaatgaaaaataatttgaaaaagaaataattgtaataataaatatattgtactaacatacgcccaaaaattccactatagcgtatctcaagattcaagatctccttcttcttcagctctcgtcatcatcattctctgcttctttccatttgctcccgttaacaaatttgccaactttcttccattttctaatccctcttaacgctaagttaggttttttaatttattcatttcattgcttggatcctaagaaaaaaaaaaaacagaaatgaaaaaacccaaattgtcgaaagtggaaaaaatcgacaagattgatctgttctcttcactatggaagcagagatcggttcgtgtaataatggcaatagggtttctctatcttataattgtctcagtagagatacctctcgttttcaaatcctggtccagcagctccgtgcctcttgatgctctttcccgactcgagaagctcaatagcgagcaagagccccaagtcgagattatccctaatcctccattgaagccagtttcgtacccggtttcgaacccgaccattattaaccggacggaccttgttctgaacaaggtccgtgaacatcatcggggtcttctctcaagtttgagatttgattcggaaactttcgacccgagtagtaaagacgggtcagtggagcttcacaagtcagctaaggaagcttggcagctaggtcgcaagctatggaaggagcttgaatctggaaggcttgagaaactagtggagaagccagagaagaacaaaccagattcatgtccacattctgtttcgttaaccgggtctgaatttatgaaccgtgagaacaaattgatggagctgccgtgtggtttgacattgggctcacacataactttggtggggaggccgaggaaagctcatcccaaggaaggagattggtctaagttagtgtctcagtttgtgatagagcttcaaggtttgaagactgttgaaggagaggatcctcctaggattctgcatttcaatccgaggcttaagggagattggagcaaaaaaccggtgattgagcagaatagttgctataggatgcaatggggacctgcacaacgttgcgaaggatggaagtcaagagatgatgaagagactggtgagtgtagatatgttcaaaagcatttatctttcatctgttgtttttcttggtgtttttgttggggatactaattagtaagaatggttgtagttgatggtcaggttaagtgcgagaaatgggctcgggatgatagcattacatctaaagaagaagagtctagcaaggcggcttcatggtggcttagtcgattaataggtcggagcaagaaagtaactgttgaatggccatttccattcacagttgacaagcttttcgtgcttactcttagtgctggattggaaggctaccatgttagtgtcgatgggaagcatgtcacttcctttccataccgaactgtaagtgatgttttgccctggcttaaacatgttgtggtttgattagtgattggtgtgaactgatggttgtctatgtgcgtggttttttggcaatatatgaagggatttacgcttgaggatgctactggtctaaccattaacggggacatagatgttcactctgttttcgctggctctctcccaacctcgcatcctagtttttctcctcagaggcatcttgagctctcgagcaattggcaagccccatcacttcctgatgagcaagttgatatgttcattggtatcctttctgctggtaaccattttgctgagaggatggctgtgaggaggtcgtggatgcaacataaactcgttaaatcttccaaagtagtggctcggttctttgttgcactggtaagtttagactaatttacaagtgatctgatcttggtcttctaggttaannnnnnnnnnnnnnnnnnnnnnnnnnnnnnnctaaactcagatgtttatttgggcagcactcaaggaaagaagtaaatgtggagctaaagaaggaagctgaattctttggggacatagatatagtcccttacatggacagttatgaccttgtcgtccacaaaaaagttgcaatttgcgagtacggggtgagtcccgctg

SEQ ID NO: 37802 - DNA, 1177 bp, Arabidopsis thaliana landsberg
aaaatttaaatcctaagaggtcctttccttattctacacatatcaactatttcaataagatcttttgattgcgtttccttttatcaatttatatttttaatttatatttttaatataatcttaatttatatctttcaatttatattcttaatttatattttttcatatcaataagatccagtttttttcgggatcttattcatttatttttttaattcatttgattcataattgtatttttttttgctaaaaatatggtattaaggttgattaaggttaattggtctttttacttcaaattagagtcattttacttaatcattgccaagaggagtcattctagttatttttgttaaaagtagagtcaatatgagcaaatttcagtagatatattatgaaagcatatttacatgtttactaataaatatatataattaatacagagataaatacttttttcatacacctttgctcaagatccttcgcagccaatgatataactcttcaggataagaacattcctttgatcttatgcaatttagaaaaaatattttcaccattttttttttgatgttatggaacatcttccgattcatcttcctcgagaagtagtgttaggtggacatgttcagtataggtggatgtatccatttgaaaggttaatgtttcatctaaaacagaaagtgaaaaatctgaggaaggtcgagggttctatcgtggcgcaaaatataaatgaagagactacatatttttcttcgtactacttcgcacctaatgtttaaacaaaaggtagaaaaccatgtcgctatgacgattgcgggaagaaaccttcttaccactctgatatcccaaaaatatttgcagaatttgggcggctcagatagaccatcaaccatggagttgttgtgcgtacgatggatgcaaaaaattacggtgtgattaaagactttttagaggttgagtatcatggactcataaaatgtgtgtttttcaagtgtcagtggtacaatcctactagggaacgtggtgtttgacttacaaaatttggcgttacggaaattaattcggctaaagagctaaataagtatgatccgtttgttcttgcatcccaagtcaaacaagtgtgctacattccatatcctagagttaaacgcatctatgatccgaggatcacagc

SEQ ID NO: 37803 - DNA, 1011 bp, Arabidopsis thaliana landsberg
  unsure (1)..(1011): unsure at all n locations
agagccattgactgtttacggtgatggaaagcagacaaggagtttccaatttgtttctgatctggtaaggctttccttttcccccctcaaagaatagagtcctacaacttgccaacacaaatatttgtattctattgtttctttggtccctcaagagatattcttacattcttgtggaaaggaaacaaaaaaaaaagccaaatttggtaggtggtttgatgtcaaatcactagtatattcaacttcaacccttttaagtttagacctttaagttctttttgtatctagtggagactactttttagggtgacattctcaaaggaaaggattttacttctgtgtagatgcattccagtatcttttcatattttggcgggtagaaagatttgagagaagggaaaaaatatgtgtttagtgagctcacatgttattgaataaactggtgggtatgtcgtgggatctgataacaaaagagacccatgtntgttatagatattaaatggtctccattttagcaatcttatgaagacggctgagtatcaataatcaatatcatgtgacaaaggaccaaatgggctctcagctttattgccctctttgtcctggttatttttagctgtcaatattgtatgatcaatctgatttcgtgtttttgtgatgcaaaaggttgaaggtttgatgagactgatggaaggagaacatgtcggcccattcaacctcggtaaccctggtgaattcacgatgctcgagctcgctaaggtctctctctctctctctctatacatacctttcgatttttatatatgaccctgggttctgataattgtgatttggttggtttttgtttgaaggtggtccaagagacaattgatccgaatgcaaacatagagttcagaccaaacacagaagacgaccctcacaagagaaagcctgacatcacaaaggccaaagagcttttaggttgggaaccaaaggtctctcttcgtcagggactgcctctcatggtcggaa

SEQ ID NO: 37804 - DNA, 4631 bp, Arabidopsis thaliana landsberg
  unsure (1)..(4631): unsure at all n locations
catcttcaacccttcaacttccccacagatccattcattcactatatcatcttcacaatccatacaaagagacttcaagggactggatcttgtcacccaaggtcatatcacgtggtatcagagcaactttgtatcaggttgtgtttttctaaactcttggtattctctgttcgttaaaactgtttcgtcgttgtaggcttgaatacttatcggaatcattcgaaacttgttaaatcgtttagatcacgttctgaactataggaaactgtactagatcgtgcgatttgaataagctaaacatttcgtattctagggtttatgattatgcatctttggtactgatttggtttgtttaagaggaatttgatattgttgtgtcttctagttgcagaatcatgtcaaataaagataaggaagagcatagcaatgcacaaaacaacaagttattgatggaagctataacatctactcttaccgcaactctcactgctaatatggctaagatgatggatgagagatttgatgctgcaaggtctaaccaaaaaagggagaacagaactatgagaaatatttctgatcaggaagcaacacttagcttctacagccaatcctctactcgcaatagtcataggaggcagagacgtggacaagaagaaagacaccctccaagagacaacttagctaatcttaagcttcgcatccctccattccatggtactaataatcctgatgattatttggagtgggagaagaagattgagttggtgtttgtttgtcaagagtatactgaagcaaacaaggttaaagtggcagccactgaattctatgattatgcactaagctggtgggatcaagttgttactactaaaaggcgtcttggagataatccgattgaaacgtggaatcagctaaagaatatcatgaagagaaggtttgtgcctaattattaccatagagagctgcaccaaaggttgaggaatttgattcaaggaaatagaacggttgagcagtacttcaaagaaatggaaacattgatgctaagggctaacgttcaagaagagtgtgaagcaacaatgtccatattcatgggaggcctcaatagagacatcatagaccgtttggaggtgatacattatgagaaccttgaagaattgtttcacaaggcagtcatgtttgagaaacagattaagagaaggagtgctaagcctagctacaattctagcaaacctagctaccaaagagaagagaaatccggttttcaaaaggagtttaagccgtttgtgaagcctaaggttgaagaaatcagttcaaaaaggaaagaaaaagtagttacgaggactagagatctcaagtgtttcaaatgccacggactttggcattatgctagtgaatgttccaacaaaagaattatgatgattagggacagtggagagattgagtccgaggatgagaaactagaagattctgatgttgaannnnnnnnnnnnnnnnnnnnnnnnnnnnnatgagggtcttaagtgttctaaataaagctgaagaacaagcacaaagagagaatctgttacatacaaggtgtttgattaagggaaaagtgtgtagtttgattattgatggtggaagctgcaccaattgcaagtgagactatggtccagaaacttggtttataggagtttctgcatcctacaccttataaactgcaatggctaaatgagagtggagaaatggctgttactaagcaagttcaagtgccgttagccattgagaagtatgaggatgagatcttatgtgatattctgcccttggaagctaatcacgttttgttaggaagaccttggcaatttgatcggagagtgatacatgatgggtttaccaacaaatatagctttgagtttaaaggaagaaaaaccattttggtacctatggcatctcatgaaatctacttggatcagcttagcatgaaaaaaaaggatctcaaactgttcaatccaagctaataataggtttttgagatcaattatcctaaaacactgataagtgtatattttgcatgttttgagcatccatttgccattattttagcatcatatcatcactgtttaatatcatttctcatcatttgtcatcactttgcatgtttaggacagttttgcatgcatgttgcatatttgtgttattttcatgtgattcagagcttttggcgagctaattggaagaagcggacctgatcactgcaaaacactcgcaaccctggtcgagtagatgggtccacgacttcaacaaaccactcgaccccctggttgagtagatggcctcatcacttcacaacaccactcgaccccctggtcgagtaccgccaagataatcactcgatcacattactcgaccccctggtcgagtatcatcatgtccaccacatcaccttcactcgatcactctactcgaccacatggtcgagtaccttcatcaccttcactcgatcactccacaaccaagccgagtaccaccaaatctataagtcgactacatactcgactgccagcttcagaatcttcttcattccgcactcaaccagacactcgagcacaaggaagaaaaaaagactctagcttatcactcgactactcactcgaccacttgggtcgagcaccgttcttaatccgtcctaattctacatcgttttagtattagggtttcagaatatttcgctataagtagcatgtactttacattttcgtttatctaagtttaatttcgcatacactgtgttcttgaccttttgtaatccggatttctcttcatccattcagtattcaatatttgcttttgatttcgtttaccgttgttcatcctgttatcatcttgctattactcagttgatatcatgttttcattttattcaacgtttatgttctcttctatgatgtctgagtagtgaataggtttcttaggataggttagagtagtttagaattctcagtatgctaggcggttgagtttgattgatagatcccttctggatttgttgttcttaatgcatattgctttctgatcaactggaatttgagcccagacatttccgcgcccaaaaggtgttcgaggaaatgtctgaaccactaattccagagatttgtggccatgtaccaaggtattggttttattgagcgttttggctttaacttgtttgattcgtggtgcctgttaggttagctctcgtcaatggtgattgagtctgggactagtttaacttgagggtctctgttgcagtggcacttagatttggttaccgaacttgttggctagggataatttattgagcatgtcaattacctgtaaactgaggaaacgaaactactcaattaccccatcctcgggaattctttatctgattgatttctttgtttactctgctgttgtttactgcatcttattacctgttgtttagtttttgcatttctcttttgttactcgacctgatactcgaccactcagttgtctgactgtgcagtcgagtatctctgttacattttctatctgttactcgatttgtcattcgatcacacccaatgcttggcaacaagctgtgttggtcgagtgtttctattgttctgcttaaatttctgtctgtttctgcatcttcacttaggactgctagaacacaccaaaacctgttattgcttggcttgactctgtgaactttgattgcatcttaattgctagcatcacacccatttcgattgacaaccttcagtactacaacgacattattggtgttttaggataattgaaaaaagacatagtatcaatttggcgccgttgtcattgggtttttgtttgttacatttgagatttcagacttgcatagatcaagtattttttcaatttttatttctgttactgactttgtgattgatttccttgttgtcttcttgatccaggtacacctccattgtatgcgaactcgatcaacaggcaatcagaacctccttctcaacgacaacatcgaccacatagctcgcgaactcagagaaaggagaaacacagtcaaccttgtacctcagcaaccactcgaaatggctgaagaacaaaatcaacaaaatggccctgccaacattggtgctggagatgcaccacgtgatccctgtcagaggaaaggaattgcacctcctgctatccagaacaacaacttcgagattaagagtggtctcatctcgatgattcaggggaacaaattccatggtctgccaatggaggatccactcgaccaccttgatgaattcgataggctctacaacctaacgaagatcaatggtgttagtgaagacggattcaagctccgtttgtttcctttctccttgggcgacaaagcacacatctgggagaagaatctgccccatgactcaatcaccacctgggatgattgcaagaaagcttttctatcaaatttcttctccaatgccagaactgcaagactcagaaatgagatttctggtttctcacagaagactggtgaaagcttctgtaaagcatgggagcgtttcaagggttacaccaaccaatgccctcatcatggctttaccaaagcctctctgctcagcacactttatagaggagtcctaccacgcatcagaatg

SEQ ID NO: 37805 - DNA, 1750 bp, Arabidopsis thaliana landsberg
caaagaataccggagctccagtttctacaaaggcaatggactttagcaagtgaagccatataatcatcagacctgaaacaaatttgggatgaaaagtatcaaaaacactagaccatcgaatcactttataactgctaccaatatgctataggggttcaaacctctgcccatatggagatccacaagccgcggttaaatgaaactttgcgttttctgatttaccctacaacaagaatcagacaagtaacttaaacaagattactcaaggattgtttgtttttgaatagcaataggccaatagatgtcaatggagattgtcttggataaattcaagatcaaaagcttacctcagcttcatagtagagccctgcgtacagagaagcatagaagtattcgcttgcttgaccgctagagaagtcatttactaactgtatttcaaaatcagagtattaagatcgtttgatggaaataaatcaatgatatcaattatcaagaaacatgtctcaaaaccttttcaggatcaccaccattcttgaatagattataagcttctcgcatcacaggccgagaatctctaccaacctacaaagaattctttctaaaatctcatatccggctttattactgatcatggaatggtaagctttaacataaggaaaaacaaacctcgagaaactgtgttcgtgcaacatcaacaccatggagcctcgcctcgcagataaagcaccaaatggactcctctgtgtcattaggattctgagcaacatctatccggaactgctctgcaccttcttcaaacctgttggatatttcatcacttaatatgagaccaaagtccacaatagaaacaagcactttttaaaattttcgacagtggattcacagtcttctaagaagaaactcaaatcctaacaagagtcagtgagtaggagcttgtacctatctacatagtaaagagaaagcccgcgttgccaaagatctgtcatgaagcaaatgttagtgttcccatgaagcaaaaacaataaagattcgactgaaatttcaaagctttatagagagatcgtgttatgagataaaacgtacatgccttttgcctgggatccaaaatgattgctctatcgaactctgccaccgatccagcaacatcaccctttaacaaaaagcatctcgaataggatggtcagattcaaggatccaaaattaaaaaaagagtctcttatgttagaaaagttctgtttgtcggaatttccaatttacctgtctgaagagctgcatttccgcgtcgaaccgctgcgatggcctcacgagggttcgaatctccgccgccggttatggcacccatatagaggaacagaaggaaggaagagtctacgagcagtgcgtgaggtgggtggcgggaaaattggggacttagggtgtgacaaggcgagatcgccgtgaaacgccgaggactcactcctagatggatataggattggattcacgatctgggttagagacattctccgcggaagcagaagaatttatatttatcaccgcgacgattacagtttctctagggattaacggatttctcactttaccagtaatcgcagaagataagatgacaaatgggagggaaggaacgtaacggtaaaatccggataatcccggtttatttaatcactttgatcaaccaatggcgtccacaaaataacaagaaggcaataaaccgatgttgactccaaaagctcaacccggtcgacaaaac

SEQ ID NO: 37806 - DNA, 8613 bp, Arabidopsis thaliana landsberg
aagtaatctaaatcttgcaggtcttggaccttcgtgtctttgatactggagagtatgcacttgtaagtcagtctccacacaaattgtttatcctgtttcgtaagatgagctaatggattgtgaattttggagactttaggttggatgggttggtatccccaccgcaccagcttggctcccaacagatatgctcatcaaggtactcataattttctcagtacatgaacaataagtagcattgtcttgatgtcaagtcatgattgttttctgtgttcttggttccggttccactgcagtgtgagaaacttgtttacgagcgaatgtagagccaagaaggttccaacaagaatcctttggaatgcaactgatataccaaggattgtgttaagctgagatgaacgataacaatggcgcaccatcatgatcatgtgttcaagagtttgacaaagtatcaacgttacaattagttacaaaaactgttgtggagtgtggaatatgtcatcagactcctataataagaatgcagcttcagtaaacggatgatggtaattttatctcatcgatctcccaacataaactcatttctcacagcttcataaaatttcctctggttttgtctttggcttccactttccgaaaaccggaaacttcttcatcatcacaaatataactactgacctaatggacggatgatggtaaatttaggtgctctaaacgacgaagacaagcggaagtgtgccaacatgtttcaaattcacctcgtaatcaatgtattatgtatgtgactaggagagtaacaagacacaaagccaaataccatgataccaaagtcatctctcacaacttcattaaacaatcctttcctctgctttgtctttgacttccattttctgaaaaattcttcatcatcacaaaaatactattgacgtgatggtgatgttagtgggtttcctatgatttctccttttgggttttcccattggtgaacggtgaatgagagaatctagggtttggatttgttctccatacaaggatttaatcccattattatgtatttttcctttttttttttaaaagcttttttagattttatttatttttaatcttttggcttattctaaacttttgtattacttccttttcctattaggaataggaaatctaaacattgttataaaaacccgagtcaacaaatcaagagagaaaacaatactcacaatcttaaacaaaccatagtactttttcttctttcaagaattcccacagaatgacagtttctgttttaagattgtgcagcttcatcattatccgagtttcgcaatcttcaattagtttcgaaatcgtttaaacgtatcagcaacgatcgatacattctgcagcggctttccctcaataaaatccctcttttaccatggcgcaaccgtaaaaaatttcacaattttttcaaaagatgtcgcaagagtggaaacctagaggctatataccgtaaaggacttgtcgattactttcatcgggatagtcatgaacgtcaacgagacagaggactcaaacatatagcaaaaactgcaaacaatggaaatcaagaagcacaatattgtagaattaggtattgcactaacttgagtttattgattcacaaagtgtgatatttatacaagagagtcatcgtataaaataaactcgaatccctaaattataggacataactctgtcacaaaatatatcacaagagattctactctatccccaatactccccctcaggttggagtgtgaagattctgaatacccaacttggacataagataaatgaattgattacgaccaagagccttagtgaaaatatcagctagttgctccgaggtcctaacatgatgtgttgttataatgccatcacgaaccgcatcgcgaactgagtgacaatccctttcaatatgcttcgtacgctcgtgaaagacggggtttgctgcaatagaaatagcagccttactatcacaaaacaaacgagtaggcgcagcgagtgtgatacctaattcttttaacaacttgttaagccatttgatctctttgagagcaaccgacattgctctatactctgcttccgcagacgagtgagaaaccgtgtcttgtttcttggttttccaagaaataggcgagccaccaagcagaaccacatacgcactaagtgaacgtcgagtcaagggacaagattgaaaatccgaatcacaataaacctcgagagtcaaatccttattagaactcagcaaaatgccctgacccggtgaacccttcaagtaacgaactatgcgcatcgcagcctccaaatgagcttccctaggagcttgcataaattgggacaatacatgaacggagtagctcaactctgggcgagtatgaagaagatatagtagccgaccaacgagacgacgaaatggcttgggatcctgaagtaacggaccatcgtcggaggcaaggtgatgattttgttccaacggagtatatgccggtctcgctcctagagtgccactatcaaaaattatatcaagggcataatttcgttgagacaagaaaataccatcaggcccacgacttacttcaatgccaagaaaatatttgagcttgcctaagtctttcatggaaaagcaacgtcccaaatactccttaaatttctgaaccatatactcatcattaccgcagattattaaatcatcgacatataccaagacgcgaagttcaatccctttacaggaataagaaaagaaagagtaatcctcataaccttggatgaacccgaatcttttaagagcatcagacaatttcttaaaccaacacctaggagcttgttttaaaccgtatagtgacttacgaaggcgacaaactttgtcaggatgagagtgtcgaaacccgggaggaagtttcatatacacctcctcttcaagatcgccatggaggaaggcattatgaacatccatttggtatacttcccattgattagcagctactagacgaagaagagtacggaccgttgtcatttttaccactggtgcaaaggtttccgtgtagtcttccccttcaatttgattgttgccttgaactacaaggcgagctttgtaacgttcaaccgttccgtcagcattaaactttgttttgtaaacccactgacttccaatagctacttttccagttggcagatcgacaatgtcccatgtcttgttaacttcgagtgcgtcaacttctttatacattgcatcattccagactttaactttaacagcttctttaaaatgtttaggctcatcatttgcagtgattgcagcaagaaacaccttatgtcctgcggaaaaacactcatcggaaatataatccgttaaaggatattgtgagttaccttggatcgatgacgaggactgagatgtagaaggagagagaacgtgaggagtgtttggagtgcaagaagcattgtatagaatgtaatctttcagacgagcaggttgttgaacttgtcgttttccttgtcgcggaggagtgttttcaataatcggagtggtgtcttgctggggtggagagacatttgtagacggtgatgttgaactagaagagttagttggcgtctgagttggagtgacacttgtagacggagaaagtgggtcatcaactggagtcggaagactttgtggagtatcatgctccgtatctgactcagaaacatcagtgacacaaaccggtggatcagacaaagaattttcatcgctccccctgtcttctagagtcgtaaatggcaaccaatcttcatcataagtgatcggacaagtgaccggtggtgtgtagatcgtatcaccctcatttgttgcataaggaaacacattttctctaaacaccacgtcacgagagactatgaattcattagtactcaagtcgtatactttccaccctttttgtccaaatggatagccaacaaaaatgcataaacggcttctctcaccaaacttatctttatcccgtgtaacacgatgagcatagcaagcagagccgaagactcttaattgatcataatccggcttacatccatgaagcaactcatagggagagagaccattgtgaatagaagacggtgtacgattgattaaataagctgctgtcatgactgcttctccccaaaacttgattggtagtgatgcttgaaacaagagtgctcttgaaacattcagaatgtgcctatgcttgcgctcgactctaccattttgttgtggagttcctacacacgaagtctggtgaacaatgccttgttctttaaagtaggatgaaagacacatgaattctgtaccattatcactgcgaatgattttaacagattttccaaactgtttttccgtgtatgcaagaaaattagtaagaacactacgaacttctgactttgccaatagtagatatgtccaaactgaccttgaaaaatcatccactattgttaaaaaataaactgctccacatgaagatggcactcgatatggtccccaaacatcacaatgaattaaagaaaaacaatctgttgatttattgctactatctggaaatacttctcttgtttgttttgctctaaaacatacgtcacaagaacgagagctaacagaacaagaggatcccgaaaacaaaggtaaagatgaaagaacagaaaaacttggatgtcctaaacgttggtgccacaaagcatgatctgttgtgacatccactttatgcaccgttgttgtagccgcatccgttagataatacactccatcacgttcctccccggttccaatcaaagtcctcgaaaatcggtcctgtaaaacacaaattgtatcagtgaacaatgccaaacatttgatctgtttcactagcttggaaacagatattaatgagcaatttaacgctgggacataaagaacattagacaaagacacagtctctgaaagcttgaatgttcccatgcttatagcaaacgtttttcgaccgtccgcaaatcccacagaacacgaagggatagtaacaatgttagtcaagagagaaagctgcccagtcatatggtgagatgctcccgtatcaagaataacatcgccaagtttcatcttaccagacaatttatcggaggtgccattgtttttattctgaatcatctgcgtaataacccgcaactgatccggtgtgaattctggaaaggatgagagattggaggttgtagcgtgagccgcagtgacttgtcctctaccccgacctgagttattagaacccgagctacgtcctcctcgaccacgagaacttgatcctcgtccacctccattggttcgctctgtccaccaatcaggaaacccgactatctgccagcaatctttcttctcatgaccacttcgcccacaatgtgagcagagaacagagcggtcacgagacttgataatcgaagaatcagtccttccatcggctgtaacttcggattgacgagtaagaaacccaatcgccgactgttgttgctctctaatctgaactgatgcgagtctctgttcttctctcacaacacgagagtagatttctccaagagatggaaacggatccatcgcgataagtgtagcagagagccctccaaagcgtgaatcatcgagtcctaacacaaactgatgaatcttctcttcttctctttctttggaaggttcaagagtagcaccacaggtacacaagccacacttacaaacagtaattggtttgtaaatttgaaattcttcccaaagcttacacaagcgaccatagtagtcaataacaggctgtccatcttgcctacacgcagcaagctgagccttaatttggtgaacacgaactttgtttcccacagagaaacgttgttttaattcactccatagttgatgagcatcagatatgaaggtgaccgtggatttgacttttggttctatggaggctctaatccaacccacgatcattgagtttaccgcctgccaattctcataatccggattatccaatggtggttttgagattgaaccattgataaaaccagttttacgtttggcttgaagtgcattcaacatttctgttgaccactcgttgtaattgtcaccggttaacataacagaggaaatcatggcccctgggttgtcggagctggccagagtgtacggagacactttggttacatctggttgttgattggtacgtggatgtgttgcagaggagacttcttctgcaatagacatgatttcttgacacgcaagaaccaaggttttaaagagaaaagcggaaacgaattcgaaactatcgaataagaaacgaaaatttttataggtttagatcttcagagctctgataccatgtagaattaggtattgcactaacttgagtttattgattcacaaagtgtgatatttatacaagagagtcatcgtataaaataaactcgaatccctaaattataggacataactctgtcacaaaatatatcacaagagattctactctatccccaatactccccctcaggttggagtgtgaagattctgaatacccaacttggacataagataaatgaattgattacgaccaagagccttagtgaaaatatcagctagttgctccgaggtcctaacatgatgtgttgttataatgccatcacgaaccgcatcgcgaactgagtgacaatccctttcaatatgcttcgtacgctcgtgaaagacggggtttgctgcaatagaaatagcagccttactatcacaaaacaaacgagtaggcgcagcgagtgtgatacctaattcttttaacgacttgttaagccatttgatctctttgagagcaaccgacattgctctatactctgcttccgcagacgagtgagaaaccgtgtcttgtttcttggttttccaagaaataggcgagccaccaagcagaaccacatacgcactaagtgaacgtcgagtcaagggacaagattgaaaatccgaatcacaataaacctcgagagtcaaatccttattagaactcagcaaaatgccctgacccggtgaacccttcaagtaacgaactatgcgcatcgcagcctccaaatgagcttccctaggagcttgcataaattgggacaatacatgaacggagtagctcaactctgggcgagtatgaagaagatatagtagccgaccaacgagacgacgaaatggcttgggatcctgaagtaacggaccatcgtcggaggcaaggtgatgattttgttccaacggagtatatgccggtctcgctcctagagtgccactatcaaaaattatatcaagggcataatttcgttgagacaagaaaataccatcaggcccacgacttacttcaatgccaagaaaatatttgagcttgcctaagtctttcatggaaaagcaacgtcccaaatactccttaaatttctgaaccatatactcatcattaccgcagattattaaatcatcgacatataccaagacgcgaagttcaatccctttacaggaataagaaaagaaagagtaatcctcataaccttggatgaacccgaatcttttaagagcatcagacaatttcttaaaccaacacctaggagcttgttttaaaccgtatagtgacttacgaaggcgacaaactttgtcaggatgagagtgtcgaaacccgggaggaagtttcatatacacctcctcttcaagatcgccatggaggaaggcattatgaacatccatttggtatacttcccattgattagcagctactagacgaagaagagtacggaccgttgtcatttttaccactggtgcaaaggtttctttgaaatcaatgccctccttctggtgattgcccatgaccacaagacgagctttgtgacgttctagcgtaccgtccaaattgaactttaacttgtatacccatttgctacttatcgctttcttgccgtgtggtaagtctgtaacatcccacgtgtggtttgcttcaagagcctctatctctttttgcattgcatcacaccattctttgatgagaacatcatctttaaaatggttttgttcattactatcaagaatggccgccataaatgctatgtgatttgatgaaaaaccagaatgagttaaataatctgagatagggttttaccagagaccgttggcgagacatttgaatctgagagaccgggagaagaagtgtgaggagaagagtgtacgagcaacgtagtctttaaggtaaaccagaggatgcttgggacggtgacctttccctaacagctcaggaagtcccggagaagaagaatcatggtcctcatttaaatgtcgactatgaactgaacctttattgtgaacgatatggggagaagaaatagaagacggagaatgaggctgttctgcctgaggagtaactggttcgggtggagtattgttttcatcagaagaagtagaagtcggatctatcgaatcatgagtatttggtgtcgcaggttctgaaacaggggttatcggatcgatcgatctagagtcaactccttcgtgatcgatcgatctgtcattcaagacaggtgaaaaccaatcataatcggctacaataggaggtgtggtgatagttagctctgtggctgacc

SEQ ID NO: 37807 - DNA, 6137 bp, Arabidopsis thaliana landsberg
tcagaagatttatttcctaaatgtaataagtttttcgagacaaatatttaaaattttagtaaagacatttgtttgataaaacttggaaaaaaattaataatgacgatcgactatattgttaaacaatatcttactgacaaaattgaaataatcgcacataagatgtttaaactaaatatttcaaataaagttccatagaaatattgtaaaagtatgttaaattctatataaatttctaaaataaaatatcaatacaattaaactgaaataaaactctctctaactttgacacatcagcctttttgtgtgatgagaagctggcacatcattaaaacaagaaaccaatcaaaacatcacaaatactacacatcacattaatatcggcaacattagattaaatggatgatttcagcttgttagaaatgaaaaaaattaaaaagcttgaaaaacttgtaaattcctctttgatctttacgtctttactttctcagtctcgtgtatctattttgaatatttgtaatactcatatcagtttttaaatttacttttaggttagattttgaacttaatttaaaaactgatgagtgctaatttaaaacttttgttcacgcaaaatgtgatcatgttcaaaaggatagtgcaacgagtgctaattttcttagaaggaagagaagagagacaaaaaaaagataaccaacattctcagtcaaaaggaaaaaaaaaacattaaaccgagtcagtaaaagaaagaacagaaggcaaaaggcagtaacaagagaatcttggattgagtttagcctgagacaatatccatggctgataaaccacaagaagaatcttctaaagaagagtacctcgtttagtcgaagtagatgacaagctgaggttcttcgatgttatttggacattgcaattagctgacgctactcgaggaagcttctcaagtttcttgaacactttcatcacatcttcatcttttggtgtattgtagtacaatatcacttgttcaagatccggcattgtctttaggaattgcttgacctgctctatgtgatccgctacatcttcaacaatttcccaaaactcacaatcttcttcaatctcccaaaactggcaaaaatcaccagtgtcaccaaagttcaatatctttataacctttaccgaacttgatgataggcaagcatcaatatccttcttcaccctcatattatccagatttttgcacatgcacggcctattctcgtccccgcaagatcttcttttcctatatatatgattcagtccctgaaacataaaagaattagtatcaaagtctgattatgtgtgtgtttcaaaagcatctcagtcgttgatttataggatgtatacagtacctcgaagacaagggtttgtagatttggacaattcttgagtagaggtggtaatgatttccatcctacatgtagtcctgtcttaatagttaactgaatcaggttctcgaataccggcattgtttcacggcagcaaccaagtacctaaaagaaaaccaaatcaacgacatatataattactcacttgtcaatatctgagtagaaattaaaaagattaggagaaagatgtgactaaccttgagagcatcttcagtcaagtaaagaatcttgacattacatattcccatgaaaagctttgttacattattattgtcatttttaatctgtttagaggtcgtacaaagaccaagacgagcttcaacaagggagtcaaacctcacatgttgatacttgtccgcaattgtatccaagtactctagaaagaatagatttggaatatcaaatgaccataacacgatcggtttaaaatctttagccttcacaaaattttcaaaacgagaaaattttagtatcttcagagttgggacagacacggttaagtagcaaggttcaggttctgaagactcctcccatatgaaattcatcagcaataattctttgagcatgtgacagccagaaagaagtttttgaaacattctagtatccatcttaacataatcaagatggagagtcttaagcattggaagagaaacatcaccttccacattaacgttgacaccatcctgaaactgtatcttcagcctaaccaatgtcttgctcacaaagatctctgaaggtagaggataaaaagtcgagttggaaccaaaaccgcgagatgacggtatatgtagatcaatatctaacacaccacgtttcaacactttatgtatccattcaagcaccgagttttgctcaacaccttgacactcaacgtacaatttggacaacgtagcattcgcttgcgcttgcaaacccaatacactatccacgacaagcataaaactttcagaacccttactcctctctacacaagacattagaggatcgaaacggaaggattcatcaaagtcaaggtttggcataaaagcaagcaaaggcttccatcttttggcaagaacggtagttgaagcagctactttagctggaagaaatgataatatgtgacaaatcattgtatcgtgtaagccgctgattccatctctagaaccatcaaaacacttctttttcgaacccattctgtgacagaaacagaccaacagttacaacctgaacaaagacatgtaattcttgtaagaagaagtaagtgctcacaaaaccaaaatcgttgaagagacttaccaaatgtgaatgagtccataagaagaacaatggagaaaactttcttaagtatcaatgaagagttttgacatcattggccaaaccaaattcagggtttttctatgggatagagtaagggaagcgagaagacgagatagaggaagggaagcgagaagacgaaaagtttagggcccttttctttgaaaaaattagggctcggcttatgggtaaaccgtcgggttaaatgggtaatggtccggttccggtccggttcgggtttgagaacccgggtttgagagcgccgagaaatctcgttcttctttgaaggtaacatattcttctattacttacgtttttgattttcctagatacttgtttgtgtttacatagtctaatctattccttgggttttttcaaatgagtgttccctatgatgttcttgccggttttgtgttgatgtatgtgtgcaagtgctctgtttggtaatatgaatataaatcttaatgcaatgttatggcacttgtttttttgatgcggatatgtgtgggaaacttgggtcatttctttgtaatgaactttattaggatgcaaatttctacaacatctatattgttgactgatcttctaattgatatctttttgtgctattgatctactttatgatctataagctgaagagtcttgtgtttgagtcttgtgttatgatcaagttgctgcaaataaaagttcatgtcatgtcttgtctcttcaaagttcggttatttgttaagatctcagaaaaagataaagccaatgtctcaagaaaaatagtatgctcaaagataaagtatacaaaaaaaacaaagacaaaaaaaacaccttaagtttagatcaagttgctgcaaataaaaaaccattgtaatatggagggtagtgtctatggaaatgcaagtttgaatccttatgattcacatcctcaatggaagaagacttggcatgtctctggaccttgaaaagaaagtgacaactcctcgatcatctcatctcttgtttctttagcataggttgtcggaaaaaagattgtcgcagactttaagcatcgagcatttctcaagatatatttagccacatccatctggttctgcagcaatccatacatctcactccacttgaacgtttcgagactcgacaacaaacatttaggaacacaattcagctgattgccccactgatttggtagatccacacgcctatctggatgatcctgtgatcaaacatgagaagtttggcttaaacaatatagttaattgaaccaagagtataggtctctaaggaacaaacttacttctatcacgtaagcctcgagctctcgtaaattgggagagcttttgagtaatcgggcaagtaaaattgaccaatctgaatcacatgaacatatcttcaattgttcaagctggttgaagacaagaccctcatgatataaagactgcataagatgacaaaagattcaacttcaagaaaacctggtttattgttcaacaatgagatggatagagtgatggaaacagattacctattcggtgtagactcccaagcataacgaaagacgcttaacagatgtgattgatccaaagaactttttgatattttggaatgtcaatacaaaatctgcctcctccaacttaggcatatcttcaaaatcgtagaagtatcgaggactatcactgtcactctcattatcactatcactctctagcctttcatcagtgactttcaaatacttcaaagaaggagtattcatcataatcccatcaagatgacaaggacgagacatctttagggttagtctctgcaaggacttgacaaccacactcaatttccccaaattgtcaattttatctcgttccacaactagatcctcaagaacagggcagttggaaagaagtcggtgaagagaatttgcatccgagtaagtcacacgtccaaggaacaatgttttcagggaggggagacataccttacgaggaacatcaacgagaatctcgtctttcagtttcaagatcacaatcgatttgcatttacataagcttttgggcaatttagttggaagctccgcaaaattaaaaagctttagacttaactcacggacgttgctaacatgaactgcaagtgaaacccagagataaatatctttaggtttaattgatccaattgctccatacctaaacttgagactcaagctttcaatagccggagctttatgtactcgcagactcgaagtaataaatctagctaacccctggccttcagacactgaataatgcctaaaattgtactccagtttaggcagccacatccaaagagacttccatcgcatcgataagatactcgtgcttacagcatcttttgttgaaagaaatgatagtaccttcacgagcaattcatcaggcaactgactgatcttgtccattaaattcttcacaatctccacgtttcttttcgttgatgttaaccaagattcatttatcttgtagaataagaaacttggaatctgtccgagtaaccaagaaaagagtgaacataagtaagaacatagacaaggaataataacacaaaggaacataagatgtattgccttgtctagggcaaacgaacaggtttgttctcttaattaattttcttaatgaataatcaataatgaaggaaatgtttttaaagaaattgtttgtaataaacatgaattccacacatttcgttggaaaatactcactaaaacattagatctaacatttactgtgcacgttacattcgtaccatccattcatgtaaatcttgaataagcatacacctacaagtgttcaagttccatatattcaataagttcgaaataagtaacacttttgcaatgtaaaaggcgtccgaatacgaacatgtaagaatgtaaatatcttaacctaaaagacattttcatgaagcttacatggtcccatgtcaaaaaagttttaaaaacatgaaaacaataaatttttgagattcatttcatcatagaaccttaagctattatgctcttggttagagatgtgttgtaattcgatctaaattctcccttaatcgaaacgagatcaaaagaaaaagcaacaaaggaaagcaagaaaactgaaaatcaacgaataagcgaggaggaagtcctttcttactacataatatatggagtttctgttgtaaataaaaaatcaataaaacttttcatgtgaatcgaaagtctcactcgatgatagctatgattatataacaaacaaccctaactcacggatttgatcttgattgcctcttaattgtgggaagattgtagaaactactcccttctatccattgaaatcgtcacctttttctttattttattttctttggggaaatttgtttcttcaacctcgtcttgagagtaaagaaaattaaacatatacgacgtcgtcttgttttattagatggcat

SEQ ID NO: 37808 - DNA, 2376 bp, Arabidopsis thaliana landsberg
atatatcttaatcccgggtaaaaaaagagggtttaaggttcaagataacagtgtgtgaaataaataaaatttattcatggcattccttagatccatatctgcaaagcatataacatctcttaattttggtatatcgcgcaggtcaactggaagtaacttgtaatgatcactgaggacttgtccttcgtgtgtacagataaacagcccaacgagttaagagtaagcaactgaaactagacgctaacggtacaaagtaaaagggggtggttgagttagtagctagtagaagcggaatgaagacaaatatgagtgcacaagctgaaatgcatcataatgaaaaggatcattctacataataatacatggggggaaaaaaggctcttaccaatagaaatagatgcattggctcctagtttgtccctgagttggctggagttttgtataacagcagccttcttgctagtcacctaacgtaagaagcaaatccatttaggcattagactcaaaacacatgatggatacttttgtcagcacgctcatccagtagtacctccttaaaatcaagttccacatagagattgggcccattcccctcatcctacaaaatgagaagagaagaagcgagagatccctggaataagccgaagaatggtgaatttggtaaaagctaacaaaaaggagaagaaaaagaagacgcaccagcaactgaaaataggtagtatcaaagccagctccgagagacagtatctgtttcttagaacttgtcccgcttagaagaaactgagacataagctttcggaaggcagcccaacgggaaaagtaacctcgattaatgatgggagatcttcgaacaggtcttttcacaaagagatgaacatagtcgtctttcatatatccctttttgacacaagacctttaaccgtattgttttcgttcaaggatacacagcgtcttcttgatagaaggtacagccataatcactcatatgggctgtgggtaagccatcaaagctctgagaagcacgaagaagcttggagcgtgatccgccgccctataggagttaaagtcatgtgtatgattgagtataagaacttaaaccgcaatcttatcctaaaagcctaagtagtgtttccttgttagaagatacaaagacaaagactcatttgaacttttggctaaaccatcaaagctttgagaagcaagaagaagcatgggtagttttttggagtcgaatatgacttgatgtcatgtgtatgtgataagtgtgtattttgcttgtcttgagcatccatttgtcatcactttagcatcatatcatcactgttttataccatttcacatcatttgtcatcactttgcatgttgaggatagttttgcatgcatgttgcatatttgcgttgatttcaggtgatttggagctgttgacgagctatctggaagaagcggacctgatcatgacaaaccactcgacccagaggtcgagtaggagcttcaagatctcaagagaccactcgaccaccaggtcgagtagaggacatcaccacttcacttcaccactcgagcccgaggtcgagtgccctcatctccatcaccagaccatcactcgatcacttcactcgaccatgaggtcgagtgtcttcacctccatcatcagacaaccactcgacctcttcactcaacctggaagtcgagtatctcctgaccaacactcgatcacgtcactcgaccccgtggtcgactgccttcaccttcactgccagaccactactcgacctcatcactctacctagaggtcgagtatcaccatcacaccactcgactgcatactcgatgacaagcttcagagccttcttcattccgcattcaaccagacactcgagcacaaggaagaaaagaagactccagctattcactcgacctcccattcgaccacatgggtcgagtacagttcttaatccgtcccaatacttcgtcgttttgagtattagggtttcggaatatttggctataagtagcatgtacttcacattttcgcagagaagaggtttttattctagttttatttttgcagacctggtgttctagacttttgtaatccggatttctctttatctattcagtattcagcttttgttctagatttctttgattgttgttcattctgttatcattctactgttacactgttgttatcatgttttcaacttgttcaacgtttatgctttctgttatgatatctgagtagtgaataggtttctgaggatgggttagagtagtgtagaattctcagtatgctaggtgattgagtatcgatatatagatccttctggattagttgttcttaatgcctattgctttgtgataactagaatttg

SEQ ID NO: 37809 - DNA, 3549 bp, Arabidopsis thaliana landsberg
cactacaccttctcaataatcacattcctaccaaccactgtatcatttccaccattagatctattttttcacgcaagtttttccaccacttgcttcctctgacacaaccattatctcttccataaccaaaatttgatggcaaccaagacctcgtatccatcatattgcttccacggtcaaatctgtttttttctcattaaatctccacaaccacttacaaacaaatatattatcttgtaaaaattataatttcaagaggttaattgacgcatggctagttacttaattttcttgcacaattggagtactttctaatattattagataattaaatttaatcataaatataagtttttaactttaaaagtatatttctattatttcatttttttttaaagataatttgtttatgttgcaaaatctaagaatgaaagttggtttttgactatgatagtcgtaacctatggatagaagtgtgtggatcattgtgtggtttttcagtcttgatcatatttgtatagttaacaagttgacattttatttcgaaacatgtttcttatgtatttaagaaatgattctcttattcaatagaggtaagagaaaattgtaatatcttcaataatgtctcactctcatatccatgcttttgataaactgcagggtcatatcggaatgatgtggaggcttgagatgtctttaaaagacaacttgctttagccatctatctcattgatagattgacttttaaagctggataagaaaaagatggtgatgatcctctaaccgtttggtgctgcaaactcagagttgaagatgtgcattgtctctctccaaacaagttaaaggtaatgtatgtttatcctaagtaaaacttatctttttcaatctgtcaaacactaagtgaaacttacttgtctttttttcttctcaatttgtcttcttcggtgaagatggtgatgatgctttaaccgtttgctcttgtaaattgcctaatttcgactctgataatatcacatgctgtttttatttacttcaactaatcatactattaatgttatgtttttcgaaatgtcatgctatttttacaaatgacatggtgtttttttccaacaaatgataatatcacatgttatttctatttacttcaaacaattgtacggttttaatcaatgtcacatgccatttacatgataaattcatttaatttttccatgtttcatgttatttgaaaaaacttcaccgttttcttcccgaatctctattgtcggaccttgatgtaggtcaaattgccttaaaacctctctctcaaataagagatcgtcaatagtatttaagggttgaattccacaaagttcttttgttcaaacaatgagttaaatgtcgaaattaagctagcagggtataagaaaataaaacgaaaggaaagtaagcaaatagaattttggttggttgtaaatcaagataataaaacgtcagtttagggtattctcaggaaacaaatgattagtggatctaggaataactaggttgttaacgaaccattcttaaactcaaactctaattatggaataatcggtgggcgtgccgcaaaactccctatgtctatagcttataataaccggagaagccgagaaactatcaacctaaatatgcattcttaacgagttcaattgttcatcttagtagataggccgattcttattacacacctataaaccagactcatcaaataatagatccaactacagatacctatggcgggcatatctattgtctggattcaagatctagtgatcaatctagatctaaaattaagcacaattaaagatgaagaattatacagataacctagcaaggggcaatctattaaaccatatgaatccctaatgagaaaccttaaacctaacaagcggattacttagacataatcaaagaaacacaaatcatagtctgaataagaaatcaataatagcaagagaaagagtaaagaagatcttctccaaagggactctccacagggttttgctcccaacgtacaaaagagatgaggagaatagcctctccaagcttaggtctaaacaatgaccttaaaaactatatatatgacctaaaacacgtgatgggccttatttagaaatagaagaaagttcagggccgaatttggaaatcttcaaaacatcaataagttgcgtctcaaaattgccgtcaggtattggtgtcgctcgacaccaggggtggtgtcgttcgacacctacgtgcattttcgtctccggatttcttcagcaacttaagttgttttttaatctccagaatactccataatctccaaatgcatcccaaacatgtaaaacctgaaaaggactagaaaagactctagaaataacaattagactctaaaacctatacctaaaacatagttaaaaaagtaaaaatagggatatatcaactcctccagacttagcttttgcttgccctcaagcaaaacacaaaagccgaacccgtggaagaggttttgaaaacaaaggaactcccaacattctctagcttattgccatgatcatccaaactaagtgcatatgcctaacaagtctaatcaaatcctaaccaacatgtacttgtgtgcaagcttacacaacattctagattgcatacctaagttccacaactacatgcaccaggctttcatcgctggatctcatcaaacaagttaacattcaagatccttttagactcatacctgtactataccatgataaatcgaccattctttatatatatatatatatatatatatatatattttgctttctttggtgttcattctctccccagacttattctttttagagagtaaacaaaggagaactcgcatactggatcgacaccctgggcatttttgcaacttttgtaattgatcattccaaataatgtataataatggaatcatagtaaatattcctacccctatacactatctgaaaatgctatcaatctctcattattattatttttttataaggggagaggaacacattctttctattacatttttctcaatatcaagtatgaacaaggagtcaagatctatcaatactaaccgtttgaagaggtaaaaggaagagcagcgagattagctccggccttagtggttgtgttggaaactaggatatcctcaagtctgttggtatgccatctagattttccaatagtcgaattgagtcgaacctgcaacactcatcaatcaggcaatagttcataactaaactaaactaaacgttttttttttttaagagtaagaaaatgagtcaataaactcaaaaacaaaaataataagaatcaaaaataaaagctatattggtaagaacctcccccagacttaaatgacattgtccccagtggtattcaaatccgaagaaggcggaaaaaataaatcaaaaataaaagaaaatgaaaagaaaggggaaagaaaaatcaaaccaatgggaaacactcccacataagcgcttggtttttagtcaatagcttgacttggcagagtacaggatgggg

SEQ ID NO: 37810 - DNA, 4202 bp, Arabidopsis thaliana landsberg
accctccgtgtttctctgtaacatgtgttatggagatagcttgagatccaagaaacgcaacctcagcattcgctagccctagcttgcgcaaaaagtcagcttgtgttgcaggagattatatatcacccattattatggtcaaaacttaccaaccatagccatagatctaattttataattaagacttttttggcataaaattttatctgcataaatatatgtttatgtaaatacaatccgcacatttttctccaattattatgctccaaacattgaaaacaactctttatttaaattacattttgaaaaaaaaacatcatcgtcgaaggagcaaatatgtgtatatatgttcatatatacttgatctttcttaaaattattttttcttgatttttttcagtatatataaatcaatcttactagttttcttattttgatttcatgaatttttatttatttttggtaaaaagtgaaattttataccatttttgatttgtgacagaagttacaaagaaaagtagaaacggataaaagcactacagaaaatttaagacaacattactactcaaatagattcggatcgaaacatagtgaaaaatggccaagtcgcgaagtgaaacaccgattccgagttcgtgaaacccagacatttgtgtgattgccacaaaaccgaaacttggaatcctcatcgttgttgccacgaagctaactatctgagccccgtccacaaaacctcaaagatagaagtctaaggcttctccgaaaactaacgcaaaaaaaaacacttagatctatgtatcgcctctattcaacattcaggaaaccttgccatagcacccaggagctcacctacaccaattgaaccaataccaactacaccaattgatttcatgaattttatatactgacatcatacatgatgaagcctgtttaccataggtttgattttcagcatattcaagtcatatatactagttagttgtgaagatgcgagagttaacacattcgctttgaggacatggagatgtagtggagaactcaacacgtgattggcacgaactaagaggtggttgctgaattggaagcttagaagaaacattggaagatttgaagagttttatttgtcaatgaagagagatgttgttatacatggcatgtggaacatgcataacattgagattgaaaagcacatgcattattattattctctcgtctccttcagttaaatctgtgatatatatcctccaattggctcacaacattcctcttttattcttaactttttgtctgccataatcatacccaattaatagtttttttttcctgcattacttttacttctatttgatattctaattttctaaagtggattttgctgccaaaacattatgaccatcattcttctttatctattattgattttttttggcttgataatgcgactcaataattatcaagaacagtgatccagccataagacgaggatgctatatgattaaagattatttatttttttgttgagttggttttaaagatgattatggtattgttttggttttgtttaatttcatttttgttcaagacaaagatacgcgacaaaggtctctggccccaataaacgctccatgttgactagtgagccccaggtggtcaatatttatttatcttgttttgtaaaatattttattctttctaactaacacaattaagaaattttctcatcaaaatatctttaaataaaaatttatgtattacataatattaaaagcaagtatatgttcatctttttattagagttttcagctaggggcgggcattcgggtaagcgggttggattcgggtaaaacccgatcgggtacgagtattttgggtagaaaagtttagaatctaataagataaatctaaaatatcggtttggtttcgattcggatctaatcggattcgagtcggttcggatatagatttttgggcctaaattggaaccaatacccgaatttttggataaatacccagatttttcaggtaaatacccggattttcgggtaaaatttcgggtttcgggtaaaatttagattttcgggtatttttggattcgggtcgggtttggattcggttttttgggtagaggaatttaggatccaataaggtaaattttggattggggttcggtttcgaatccaatttttcagatcgatttcggttcgggttctcggttccggattttttgcccagtcctattttcagctttgtaattaaataaacaaatttgtatatacttagatacttgttaggtgtgataatatttttttatggtggtatttacaagtaacataaaaaacttttatggtgtcctcaatttcagatattttataaattatagcataaatatcaagttaaacttatattctttcacaaaaaaataataattaaatctatattatgtatcataatcgtgaatcgtgatgcttccgtgcttcatttttctgtttgtcaatctcggttctatctctttagttatgaaatattaacattagtatattcaaagatctacaataaatagaagaaatgataatgataggtaatactatttaaaaggaaaaataaagttgtttgatatgaaaaatatgtaaaacaagttgccatagacccattatcatgatcattcattcatttgttaaaatgtacgctatatcttcgtatacttctgttaaagaatgatttatatttagtctttgtgatatacaccaatgatcatggaattttctcatatacttgatactttattctttttttacggaaaatgacacatttgctaaacacccaaaaagtcacgataacaactacgggccattgctccaatttgtaacaatgcatattgacatattgaaaagtcgttaatttaaagaagaagaagaactactacataaaatggtaaactcgttagcccgaataacttaaatggagtgttgaatcgtataatttttcatttttattataaaccaaaaagagaatgttgcaaaaatacaggaataggaattgaaatatccagaagtctaccaaaccatgtaatttttacaaatgataatatcgtagaaagattatgacttggctccgaatggtaacgtgcggtttaactgtggataaaatgcagtgcggttctaataataataaaaatatttatatatatatatatatatatatatatatatatatatatatatttttttgttactgttcgaaccgcaccacatcataccgttcggcctgcattcggaacctcaatctacgacgaatgataccatcatttgtcattacaacgtgtatctatcaattcatcccaaaaagcgttaagaatattgcataatattcatttttatatattgtatttcattaaaactgtgggttccagtgaatcaacacaatctcattctcatgaaccaaaaaaactttttgggcccatatctctctctctcttttctccatgatgaataataaataaatcactcatacatacgcattacacatcactattattatttttctttgtatcactatttttttagcctattagcaaaaaaataaaacatcactatttctcatcaaaacttattaacttgttaaaataatattgatagccgatataatatctttttcatagataaaatacacataatgtatggctttgatgacaaatccaaagaaaaaaaaaaatcaatagaaaggagatcttcgagaaattccttttctcttgagtattctcaagagtggtctaaatgaaaaatcactcaataaaacttcagaatcttctgaaacatcagtgagggacgatgtgcacgattttttttcttctaagcttccttcttgagtagagtgttctttctccaaaacactctgttctagttttggagaaaaacaaaatttatgcttttttgaaggagttgaaatctacaaaaagaaaatatattaaaaaaaatgtctttcaactattagagagcatgctctaaactcaaaagcaaattcttatagttgacttcaaacaatatacgcaaatttaacgttttaaagcgtgtttatacaactcacatgtattaagtgatttcaatttgtattaaatgatacttgttaatgtagattacgtttttcgaaattatatattgtaatttcaaaacaatgatttttaagaaaagtattaaaatgaaaca

SEQ ID NO: 37811 - DNA, 5074 bp, Arabidopsis thaliana landsberg
  unsure (1)..(5074): unsure at all n locations
catctgtgcttctatcttgtctagccagctcaatttggctctcaatttgatttagaaaatctgttttgtgacgctttcttctatgagtattcatcacctcagcaactttcgcattatttggaattcccaaatctattgttccccgagaccccatgtgttgatgcagtctaccaagcggacaccaatgatcatgccaaaacgaagtgaaagttcctgaacggacctccattcggtgaaacaaacgagctttatctctctgttttagaatttttctccacagccaggaacctaaccccgtgttctccttgacagaccaaaacgtttctctgcgtatcaaatgtttgttaacccattttacccacagagagtctctagccgacaatattctccaaatgagtttcagcaaactaacttcattcgcctcctttagtggctttagtcccaagcctccttcctccttcagcttacacacctccgaccaagcaatttttgctttcttagtatttagatctggcccagaccacagaaaagctgaaaacatcttctctatctcctgaagacaagcttttggtaaccgaaaaacagagagccaaaagtttgtaatactagatagaactgacttgatcaattgtaatctacccgcaaaagacaaaaaccggttggtccaggaggttattcgtgctcttatcttctccatgagagggagataatccgactgcgtcattctcttggtgagtaatggcaaaccgagatatttaaccggtaaggtacctaactcaaagggaaattgttgaagaattgaagttttggcattaggagatatccctgccatgaagattgttgatttctctagactaatctttaaccctgacatggcagcaaacttctcaaaaattgcaagagttccctgtatggatttagaagtaccatctgagaacaccattatatcatcagcgaaacacaaatgtgtgagattcatgttacgacaacggggatgatagctaatctttttttccacagcagccttatcaagcatacaagagaggacattcatacagatgacgtagagatacggtgataaagaacagccctgtcgaagacccctttcactacggaaaaatcctgaaagttccccatttacttgtaccgaaaaagaagcagtaccaatgcaaagctcaatccaatgaataaacatttccggtaagtgaatagccttgagaacgttgatcagaaaaggccactgcacaaagtcaaaagctttcgatatatcaatcttaagagcactcctactagagattgattccttatggtagtcttttactagttcagaagctaacaacagattctccatcatcaagcggtctttaatgaaagcagattggtttggtgcaatagatgcagggagaatttctttgagccggttagccataagctttgagactatcttgtataaaacgttgcagcaagaaatagggcgataatctttcattccactcacttcatgcttcttggatattaaagctagaatcgtggtgtttattccttttggcaagaaccccttcaagaagaaagactgaatagctataaccaagtctcttcccaaaaccggccacgcagtcttgaaaaattcaactatatagccatctggacccggagatttatgctgcggcatagagaataacaccttcttgatttcatcctcagtgacttctctcattagtttttcatgatccacggtggagcttcgataggttaatatattttggatttcagcgacacttgaaccctcgaaatcctctggcttagcctgtaggaaggatttaaaaaaccgcactgcttcctccttgatatcatcatgactcgtgcacactctaccatctgtacactgaatttcacggattgagttcatggctactctggcctttacactattgtggaaatacttgttgttcttgtccccaacatctaaccaatgcaacttagatttttgcttcaaataaccttcctccaaatctgccaaagagttccaatgagtatgagcttgagtttcttctgcaattgcttgagaggaagctgtttccagagttttttgctgcttctcacataaggatgtgtaagcttcagccactcttacagacagattatttaatttttcagattcgagtctttgtaaaagtgtaataatttgtgattttttaaccaatagaaacgtagtcaatttaataagagccaacatgtcaagtaaggatgtcaaaatggatcaaaattcatgggtcaactaaactcaactcaacccattgagttaaaaattttgactcaaatgagttgatgggtcaaatgagttgatgagtcaattggtttgatgagtaaaatgagttggattgtaatggttaatggtactatgagatcatttcaaattttttgatacatggtgttttcctcccaaatatatgactataatatcactaaatactatgagatctcgtagagttgttgagtacgataaaagaatctatgaaaaaagaacttaaataaagaggtgtacgtttgacaaaaaaaaaagaaaaaaaaaagaaagaggtataaaaaaaaacatttgagttgggcttatatgggcctgtttgaaatttggtgacattacttttcgccaaaagaattaaaaaggcccatataggcccaactttaaacattactctaatatttatatctttctcacttttgctttattctgatttcttctcctatctccttctccggcgaagaaattgaaaattcattatccctaaaaccctaataaaggtccagagagtcgtcagaaaccaccgattagcttttgaaatggacggtgccacataccaaagattcccaaagatcaagatccgtgagcttaaagatgattacgccaagttcgagcttcgtgaaaccgacgtttctatggccaacgctctccgtcgcgtaatgatctccgaagtccctaccgtcgcaatagatctagtcgaaatcgaggttaattcatctgtactcaacgacgagttcattgctcatcgattaggtctcattcctctcactagcgaacgtgctatgagcatgcgtttctctcgagattgtgatgcttgtgatggagatggacaatgcgagttttgctctgttgagtttcggcttagttctaagtgtgttactgatcaaaccctagatgttactagtagggatttgtacagtgctgatcctactgttactcctgtggatttcactattgactcgtctgtatctgattcaagcgagcacaagtaagtcccttttcatcattgtagtgattatttgttctttatgaattgattggaattgctaagcttagatattacacaatgctaaacaaaatttgacatctttagatgccctttgcatgagtcttccttttggtagttctgtggcttttttttctgcagtttcttagactgttattgttttggtttcaggggaattatcattgcgaaactacgcaggggacaagagttgaagcttaaagcattagcgaggaaaggaattgggaaagatcatgcgaaatggtctcctgcagctactgttacgtatatgtatgagcctgacattattatcaatgaagagatgatgaacactttgacagatgaggaaaaaatcgacttgattgagagcagtcctaccaaagtctttggccttgacccagtcaccggacaggttaaattcgaagttctgtaagaataacatctatacaagtttatatttgggagacttcaatatgattgtactactttataggctaccatgcttagaaatatatgtatgtgatgtggcgaatgaaatatctttaagtgtttagtgcgtttagctcatttcttttgcatactattgttcgaatcatcacaactgtatttatcatactatgcttcttaggttgtggaggttgatcctgaagcatacacttacgattaagaagtgatcaagaaagctgaaacaatggggaaaccgggactcattgagatccatccgaaagatgacagttttatattcactgttgannnnnnnnnnnnnnnnnnnnnnnnncaactggtactaaatgccattgatcttctgaagcagaagcttgatgcagtccgtctctcagatgacaccgtagaagcggatgatcagtttggtgaactcggtgcccatatgcgtggaggatgaactcaagtgattaattcgagctctttgttatacctgtttgtttcaggttttgagtttcttctggagcagactgatattaaccgtagtggcactgtcttgtttgataacatgtgaagtggcagtcttctatttgttctggacctctgatccctctgttcctgaatcttgttaagtttggttgttgttagttgttagactcgctcgtaacgaaaataaacgcaaggattaaattcaatacattgaacaagtatgattaaaatggaacaagtatgtagtttaatcttaaaattcgtaccattaactgaaatggaatgaaagacttttgcatagtggatacccaatttaaagctcttaagttcttgaacttcgatcacacaataagttatggtgagtagcttcccttggaataaaacaagagacaaaaactcaaaagttttcgagctaattcataggtccgaaatgatgtcatggatcttagataagagaattccggcattgattacttgcactaattattaacaatcagattcaatcaggaaatctctcaattctgcttccaaagtggcagtgatgaccgctcgtatcgctagtccttacgccatgagaggggatgccacattttcacgcattgctgagtggtgagtcgaaagtccagtggtcaaataggtccagcttatacccgtgacaaacctttggccgaaagggcaaatgcccaaagccacaattttattttttaaaattataggctaccacattttcgtaagaaagtaagtatatctatttagttggatcaattatggaaaaacacgttaaagtttgtgcttttgtggagatagaaaaatttcacagtatgcacaaattaaaaaacttt

SEQ ID NO: 37812 - DNA, 11358 bp, Arabidopsis thaliana landsberg
caaagcactgcatatgaattaactttgataaggatgaaaaaattgcaccgtgctaaattgacatagccagcatacatagttaactaagaagcttacagaagaccagaaaatacaaacttaacaaaccaactaccaaacacatggaaaggtaatgaaactcagcagtaagaagctagaacctggtatgagacccgagcaaagcggagaaagactcgcctttaagatcttctggaagtggacgatcctgttataaaagaggaaacttgtcatattgttgagatgtaagaaaacagacgatttttagttttattttgaacagctgaaatgtaccttaaatgaataatttatcttcaaaacatattgttcgccagcaggcacatcaggcctctcaaaagcatagtttctctgatattcgtacataaagagcagaatagagagtcaaaagaaaagtattgctgctagaatacatgaaaaagaagtcaaatatccaaaccttgacaggcgccatgctaaaatttgaaacattgagctgtaacaattcctgagcaatttcgtttttcagttttgatgccatttcctgagaagacacagccaaaaacaatgaacaacagaggaaaatagattgcttcctcttagcatgtaacaaaggtagtcaaactcacatgcaatttcccacggaaggattcaggagaaagtcgagagtctttcacctcttgctcgagcatgattagttcatgggaaggaaatatggaatcatttggaatagcataaacacacctctggatattcttaactaccacacagcaactcttgtgagtatcttccctttttaacctgaattgttaaaaaaagagagaccgaattcattctctagattaaggccaaaagaacaactttaaaaatgaatgaaaaatctagagattcaccttcccaaacagatatattgtgcccatgctcgcaccaaaagcctcctcataagcgtcaagaatgaagaaacgaagtgatccgtcagcatccaaatcaaattccggtttcccttcagaactagaaccaagcaaagccccattctcagttccaacttttcccatcgcttccttccaaccagcagtggcacttaaagccgaatccttctctttcatatcaatcgttgcattcaatgtaaatacctccttgacacctaactcactcttcacttcagttttccttatcttgtttgatccatcctctttgacaatatcacttccaagtaattccatagtctcagaaggaatgacttcagattctttcatatcttcctctttcatcaattcattatccatggaaacagaatcaccctcataagttgaaggtgttggttcagactctttcattcccatactcgaggcaacagaaaacagttttttattcttgaagatggtaactggaacagtacctggtagttttctcctcgtatgcttttttctatccgactcatctggagtaacctgagctattatctcgtcaagaataccctcatactgtgccttatcagtctccttaactttcttgaaactcgaagatgtgaacatagacgaaagtctaccttcaccagtgatagtagccgcagcttttaacgccggattcaccttcttaacctgaggttgctgcgtttgctctttccctttcttcttcttcttaagtctcccactaaacctaccaccgtcgtctgattcatcagtcgattctggtccacttggcttcgaccaatcctcctcctcaccttcgtcgagatatcccaaatcgccaccttccccatcttcaactacaaacccgcgagcctcctcgcgccgccgggaaacaagtgcgtcgtactcttcgtcatcaacggtatcgaagattggcttctgcagcctaatatcgtacccaccacctgacgcagaacggattcctccttgtcgaatcgccttcagacgctcgagtgtgtctttcctactcgacgcctccgcgcctcggctacgtcttcgtccagtttccgttgaattatcgccggacatttttacaaatccggtcaatttggtggtttggtgaagctgagtatctgatttaggtttaagaacccagattaagaaatggagatggcgggaaaatcgacacgattttggcgctatccatttgccaaatccgaatccaacaaacaaacgggttctcttaatgggcctcactcctctttaataaagcccaaaaacaaaaacaaaaaagaagcaattatgagacatctatttgaacgagatcaagcatcagagagttgtaggagttacctcggtctgtgaagtaattgctgatggagtccaccaattgtagaatctagctaaatacagtaaaagaatcaaagtttcagcctgagttctaagttactgatatttaccgattcgaaagtctaaactattgctgaaactactaataagttcatatccaaaatcattgttctctatgataaagcccaattgaaagagaaaagaaaaaaaaacaatgatgagagatgatgtgttgccgaccacctaaaaccactttaacaaaagcaaaagccaagtaaaggttacaatctctgcaacttttttgtcataataaaaactaaacatctattaacaacaacactataattgtttcttactaacaccaaaattcatttcagtttgaagagaccagagaaaaaaacttgctcagacatggggatgaccgtcgtaattattctggtgttctcatttttcgtagcgattgtaacggcggagacctctccttacatcatccacatggacttatccgctaaaccgttgccattttccgatcatcggagctggttttccacaactcttacttcagttataaccaatagaaatccaaagattatctacgcttataccgattcggttcacgggtttagcgcggttctcaccaactctgagctccaacgtcttaaacacaaacccgggtatgtctcgttcaccaaagatttaccggttaagcttcataccactttctctccaaagtttatcgctttaaattcgacatccggtacatggccggtctcgaattatggagctggtatagtaatcggtattatagataccgggatttggcccgatagtcccagctttcacgacgatggggttggttcggttccgtctaaatggaaaggagcatgtgaattcaattcttcttccttgtgcaacaagaaactaatcggtgctaaggtattcaacaagggtttgttcgccaacaaccctgatttgagagaaaccaagattggccaatactcttcaccgtacgatacaatcggacacggcactcatgttgcagccattgcagctgggaatcatgttaagaacgcgtcttacttctcttacgcccaaggaaccgcctcaggaatcgcaccacacgcgcatctagcaatctacaaagccgcgtgggaagaagggatttactcatcagatgtaatcgcagcgattgatcaagcgattcgagatggagtccatgtgatatctctgtcgctaggattgagttttgaggatgatgacgacaatgatggtttcggtctagaaaatgatccaatcgcagtcgcatcttttgcagcgattcaaaaaggcgttttcgtggttacttccggcggtaacgacgggccatattactggagtttgattaacggagcgccgtggattatgacggttggagcgggaacaattggtaggcaatttcaaggaaccctaacgtttggaaacagagttagtttcagttttccatctctgtttcctggagagttcccttcggttcagtttccagtaacttacatcgaatctggcagcgttgaaaacaagactctcgcaaacagaattgttgtctgtaacgaaaacataaacatcggtagcaaacttcatcaaatcagatccaccggagctgcagcagtagttttaataacagataagttacttgaggagcaagacacaataaaattccagtttccagtagcattcatcggctcaaaacaccgagaaactattgaaagctacgcatcaagcaacaaaaacaacgcgaccgcaaagctggagtttcgtaaaacggtaatcgggacaaaaccagcgccagaagttggcacatacagctcaaggggtccattcacaagcttccctcaaatcctgaaaccagacattctagctcctgggacacttatactctctgcttggccgtcggttgagcaaatcaccggaactcgagcactaccgttattcagcggattcaatctcttaaccgggacatcaatggctgcacctcatgtagctggagtcgctgcgcttataaagcaagtccatccaaattggagtccatcggctataaaatctgcaattatgacaacggctttgactttagacaacccattagccgttggagcagggcatgtgagtacgaacaaagtcttaaaccctggcctaatctatgatacaactccacaagatttcataaacttcctttgtcacgaggcaaaacaatcaagaaaattgatcaatatcatcacgagatcgaatatctccgacgcttgtaaaaagccatctccatatctcaattacccttcaatcattgcctacttcacgtctgatcaaagcagtcccaagatctttaagaggacattgacaaacgtgggagaagcaaagagaagctacatcgtgagagtgagaggcttgaagggtctaaacgtcgtcgtagagccaaagaaactaatgttcagcgagaaaaacgagaagctaagctacactgtgagattggagagtccaagagggttacaagagaacgtggtttatggattggtgagttgggttgatgaagatgaagctgagtttgaagtgagctgttctgtggtggccacgagccttgtccaagagtcttgatctttactttgcaaaagatttgttttttttcttctttggttaaacttattctcttattccgtgtgattatgtctgaatatacgatctttattcacattcatggagaaagataatcgagataatgggctcatgagtcatgaatacaatttccatatagtactaaagagaatcaagatttgagatcatgaatacaaaactggtatttacatataaataaataatcaatttctaataagaaatatttatacaacgaattaaattagaattgttggatctgactaggaattaaaaaaaagctctagtctttctctgcaactctgtttttgtcccctgttttttaatcactatcgtcaccgtacggtgacccagctattggtaacagaccaatcagggatcatatcagtcaccaaactagcaactctctcatccggcgaatcgatcgtttgtgaaccggaagaaaccgaaacccaatcgggaaattcgaatgggcatctcggcgatgtcgagacgtcctctgttttcatattaacaacgaaatcttcttctttgactaaaacgtcgtgatcaacatcgacggttacaaatggatggtttagaagcatctcagccgtccatctctttttgggatctttaacgaaacactttgacaaaaaatctcttccttgttccgacaactcctcgggaatcatcggaacctcgtcaccaacaccgatgcgtaacaacaacgacatgaagttcgacccttcttttaaactccatgccgttttaccactaaacatctcaactactacgcatcctaaagcccacacgtcaccttctgatccgtactcgttatcgttaacagattccggcgccatgtacaacggcgtacctctaatctgcacaccgtaatttaacgccgttaaatccccaattctcttcgccaatccaaaatccgcaatcttaacggcgccgtcaccgaacaacagaatattcccgagttttaaatcacagtgagcgaatccgttagcgtggatgtgtcgtacacctctaagcaccgatcctgtgtggcgacgcacggtggattccggtacaccttcaccggctaatttcttaagataactctctaagcttcctctagaagcgtattccaagaacaaattatgcatctcttcaccgttttcgaccgtccgatcctcgccgaaacaccgtacgatctcgttgcaatcgtctccgagattatctagaactgatttctcgtttgccagagaagcagcgccgtatgagtctgcagatttcacagccattaacggaggaaactcgccggaatcgttattagaccgcgtcgctagacttactgtagaaaaagttccgtatccgatagtttctcctcgaatccactccattgaagcaaatctccgacacggttgaatcagatttgattaaaagattgaatatttaagcgtgtagagagaaaacatgaaacagagcatgaaagcttgtgacggttaatggtgcgagttcctcaatttatactgattttttttggtattattaaacaaaaaaaatgaggttacgatttttattttttaaaataatataattaaatgtagaaagactgaattttgggagtaattaatgcacgtgacgagaggaggtttttctttgttgagctgttaaaccaaaatgaaattttaagctacgtgatattttcgttattatattggataaataaatattgtagcacgactattgttttgtataaataactttaatattatcacttacgaggtatatattaatttttgaccggtagtaaaattagtaacatgcttgatattcaatgagatcatgatcgttatattgttgctaagagtagtcagtttctattgaatttgcgttgaatcaagtttaattacgtaactcatttatgtttcaaaacaagcgtgatatgatttattcaaaatacttgaaaacgtactgtagatttttttaagtaacaaaaaaagattgcaatgaaacaatcactattagaaacaaacactataacatatgcatgtgtatacatgaagtttaccgtaattttttggtattcatatattcccgattgtagctgtaattaacaacaaaatataacttagattgtatagagataatattcttttcttggcctatgctctggactctcttccttcgcatatgtcgtgtgaataggcatggaatagaatcatcctctcgcatatgccaccccttcgtagctgtccctgattataatcacactattagtaattctctaattacgtcctgaactcataatatatacacataacatgtttcttacattattttatggagatcagtattagttttatctttgttaataataaagtagatatgtggatagtcttggaccattaataatataaaccataccaagcaagttggagttgcaatatttttttttcttgatcaacccacgaagcaaatcctcctccgttgtaaacgctttaatatattggttttattttctgatattatgcgacggtatcctccacaattatcgtttactaattagaatagttagctctaaagtaaactaattagcgacctattattagggcaccaactgcgataagcagaaaactaatatgctttcgaataatacgactaattaaagatatgtgtgttataagcttacaactaagtccgataaaatcacaactctaaccaatagaactaaataaacaaagttaatttagaaagtagttgaaaaatacagtttagactctatttagatgtttgcttacgactattgattataacattttgtatacaacagaaatttaatacacaaactttggcatgtgagctctaagttttactttaatgttataaatttaccatttcccaatagacgcaactgttttcaatgcttcaacaaaaggaaaggagaaaataaaagagaactttatcagacaactctccaatcatttttcttatttgatttatcacatatatctattattatagtgctcttatgtagtttacttcatggccaacttgcctgctcaagtctggatccctatgggcatgacttcattaaatcaatttaaattttaaattttttaaattgatattgagattgatattttcatttttaaaatggccaataaaagcgcgggagtggaaggggtgcttcgcactgaagtcattcgacccccaacagactttcgccaagttgccgggcggcttctgatttttattctaatttccagtaccgtaaaacaatttgatacgtatattccaaaatataattactgtgttctctgtgatatttgtgtaataagaaaaagaaagataattgacgttgtaacggagcctaacaaatatcgagacgaagacaagttgaaggaagaaagggaaggttgttttgtaaattaaatttgtaagcagtaacaccgttaccatcacatgcttcatttatttagaatcgagaaattaaacttttgagaataagtgggaaaaccatatgaaccaatcatataccactattattttttcgttttcacaattttttgtttgtttgaatattgtaagaaggcgtcacatggacgtgatccctagccattagattgggtggagttgcgatctctacgagcatgtctactacaacttgctttagctattaaataaagaatctttatcaatgtaacttaaatgatttttatttttttgtatatatactattggaaacgcagagaaatgtgaatgtaaaatggatatgatgaaccaacaccgtccaggcgacttggatgattcactgaatccgaggaaaaagagcaggcgacttgcgaatgctatcctattttttttgtagcttattatactattattattgtaaattgggaaataaatttatggcagcccacagtttatttcttagagatttccaccaataattttttttattttttttatttttttggttttatcagccctcttaacaactacttagttttatgtgaattctttaaaattatacaatagtttgcgaggcatcttcctacacgaagataacgtcaaattctaggtcttttatatatatggtgtggtaccacgaaattaactttatcttctactatagtggaagtatgtagtatagtagaagatacaaaataaaacagtatatatcggtcggggtcacacacgactctattttaaaattgaatcaaaatagttggtttactattatttttgattagcttacaacgtgttaattcaacttcgacgcccaagtggaattaaccttgcaggtcagtcaataagggtcattcgatgatatccacaatcaaaagttttggaatattccttgtaatatggaatttagattgacccctttgaattagggagggagagggcaacgtcatatcacaccctttatcattgcataatctttaattttttgtttctacgtatatactaaaagtcaaactaaaatatatatagtatcttttaggacaaggacgattagtcttttattaaattcaaattttggtcatctctaaaccaaacgcataatcagccgccaaacacaagttcatgcatttcaatttaaacatgtttcttataatttgaactatcaaggtgggtcaaaggtcatcctaaaacataccaaatacaagtcgtttaaaatttgtcttccatgtttgaaatttggagagaaaaggcaaagagccgtctctggactattcaagataagatcatgagcttttttaacacgtgcatgttttatggtatacacatcatgtttttttaggttgcaaaacttaagtatctggaagcatgaaaacgattttcttctgtttattattacgtggtagaactaagtgttgacatatgtgtatgacttttttcctgcaataacgcctccacagtccacatcatatcctcatcagacgagaccatttctcgactacaacgtgtttgagaactttcgattatgatttaacattgaagcttacaatgcatgaaacgtaacattctatttagcatatgaatattaaggcaaataacccatgtattgttttgctttgttacaaagacaatctctaactcatgaattgctgtttgttgtcttcttaccatatgcactttttcgattcgtgaattcagattctcataaactttgtttatacattacctagaccacaattcctcaattgggccaaagtaacagcccaccaacaacagcgatgcaatgataacaaaagcccaataacaaatcgaaacaacggtcgaaccatatttagatggatgatgaaattggaacattgtgaaattcaaataagtccaaagacatgtgacccggatttaaattcataaacagtacaaacaaataatttaaaagccaccgacaaaaaacccacaacgatccctaaaattaccaatccacccctcacgactctttagtacttaaccatttatatagcaagaactcgaaattataatcaccgggtttaccgtttaacgaacgtaactaatcacggtttacaaacaaacatcgaacattacaaatacaaacatcataataataaaccatggttggcaaaattacgaaaatgcccatggagttttaagctttcttcatctatctccggcatcgagtgatcgacgagcagcctcggctatacggatgaacgggacctctagctctgaagcagttatgagtgtagtacgatcttccagatctgggaggacatggcactctattcgccgacaatgcaccgtacgatatgtaatacttcgtcctccgccagtacaatgaccgtcgatctgttacgccgtcgtcttcctccgtaacttcgaagctttcttcaccgtcgatgatatcgaattcatcggagtgagagatcggccagtcgaatccgtcgggtagaagagtgagagatggattatcggaaagagattcagatctctggagagaaatgaaagtgagaagagagagaatgaggaggagattgagagacgaagctgccatggcgattgttgggggaaactagagcgaagaagaagaggaggaaaataagaagaagagagtaataaggaagtcacatgtaaagaggtgattggggttttacagttgtgaagagattttgggggttctaattaaatgcgccatttatggacctcctcgagctttgtgcttttgagttttttttttggtgagtgtgttagtgtgacgatgagtgatctggtgggacacggtgtaggataagagaagtggaaatgattggttgtgagcccttggattgttggcctgatttgatgagagattaatgggccaggctttcgttggttttttttggtatacgagtaggtctttttgggcttcatcaaaacagcctttgtgatagctaggttgtgtttttaaaaagattcggatgggtccagttgtttttgggtc

SEQ ID NO: 37813 - DNA, 4918 bp, Arabidopsis thaliana landsberg
aaaaacatcaaaacaatagaagaaggtcgttagtcacaattttagacattttaggtctcaaaacgcttactagaaaagatctacacaacaaacagaagtttgagatcctgatcagtgtatgaaatttcaaaaacctaagcaggaaactcaattgatatttgatgaatcctttattaaacaaagtagaagtgttatttatcaaacataataactaggattaacaaaatagaattgttattgaaataaaataatagaaaagagggtataaatggagagtgtttggggatagttgtcgttgtcccaactaataaaccaacaacatgtgacgcgagtttccatgaatcgtccgtgtttggtactaatatgcttagcgacctcttttctctcatcattttttcaagtcgctcacctatttttcattatcttactctttttattttcatatgtttttatttattatttttttataccatgtcaatcgtatgcaaattatttacctaatccaggatcacataagttctgtggatttttaattcatattgcaaaaaattgattttaaaaagattagttcctttctattcttttaatttcagatttttcactaaaaaagtttcggattcatgtctttatttgaataagcccctataaggaattaacactgagaaattttataccttttgcatgtattttatagtctcatggatcaatttacccaacatatgtagttttgggcttatacacatttatatttgaggggtatcacatcacatgtcatgttcacaaagtcgttatatagtttacttttctacttgaaagcctgatttttctccacattatttcttaaattgcaaaattttgggcccaaccaaacgatatccaagagtaataattttggaaatattaagatttcaatgatataagaagatatttcgtaatagttatgtgttagtgttattgctatgtcacaacacaaattcaaacttgcacattgcatgttgtttgacaaaaaaaaacaaacatttcgcaatcatcggtgaatgtattctctctaactatgggtttatgttagttgtagctatttcatcatcacctagattcaaatccgcatattgtatgttcttgaaaaaacataaacatttcgcaatcatgagtaaatgcattctctcttacaaaatagtatttaatatatactttagaaaactctattcttttataaaaaaaattgagaagtttgtacatatatagattggatttaattttacacctactccacaagaaaacatttaatttctgcgtttaattattaccaaacctacaaagtacaaaccaaagttttaaacatcaaattggctatcagttttcactttcagacaactcttcctttgcagaagaagaagaagaagaaccattatctaattcacagagctcttcatcttcatcttcatcttcggaactagagtcggtatccgaacaactcagaaaaaactcattctcatggtgttgacgtgattccgatggagaatcatccaaaatcgaaagagggtttctgttattcgggtcatcgtagagagcaacatgcctgtaatatagttcaagttccttctctgcaattgctataaaatgtctcacagattcaagagattgttcgtacttcgatttttcatatgcctgcaaaagaaacaagaccatgttgagaactagcaaacgaaacatagccgcattccaatgagcatacttcataatgataaactatttgaggacttacccttttcttcgataatgtatcgatcggagacataacttgtggctgcacataacccttccctctatagaatatgatcgtatcatcgccaattatgttaacaggcacaccaccactcagtttagcaagctcctctgcatattgttgcacttggcctggcttactattattgcaaataaccttaacagtttcatgctttttccaatgcagatgcatgttcagaataacaccaccaaatactcctcttctaccaatcggtacataattggatcttttctgacccattttcttcaagtagaaacgttcttccccggtaatctcatgaggtcgaacctcaggtccttgcacttttgcaacttcataccgtttaagtctctcaatcagcaatgcttctttgatcttagcctgatacacgaagcaacaccaaaaacacacacttcaatacattaaactcatagttttgctattgaatttagactagactctcacaagaccttttcaagcttatacttgattctttcctctgcattaacaaacttcttcttcttccctttaacagtaagtcgcctcgggtctttcctattagctgcattcctttcctctctttctttctttctctttaacttcaaccgctttttcgtcaaccacttatacttctttggaggatcaagttccctagtttcaaactttggtttcccttctgatatcactagattcaccgtaccataaccatgactaaaattcctacatatcggtcttgtcggtagaacaaatgtcaatgttgaatcataaaactcttggcttataggaagcaacctagtgggggaaatttgacaagaacataatcacattttgggacaacatactaaactaaatgttgtatagtgacaactatacgaacctggaagaaatgagaagtggatatgaagatcgaagaaccgatgcagcttttcgcaacccacgagcaaaaacaaaaaccatagtttggctaaatcatctcaagactcgagcttttttatataatctgctacaaaatcgaacatttagccaaaagaattcactaaggagcatttcgtcgaacaagtggtgagcaaaactacgaaataacaaaatactttgagaattgaatactcgtagacatttacatacaatcgtaatccatatcggagataaaggatgaataattgaatatcaaacctttacctgagaaacctctatggtgctggtttgagaaagtttttgctttgaaggattcgaagttggcttcctcaaatcagagtgatagaagagtggagtgcgatggattaaattctcagcgatgtggtttagagaatcagcagccggcttcgccggaggtggtgacggctaggagaagctcggcgacagagagaaccaaaaaagagagagatgagtttttttctaattgggcctcggcaactaacaagcccattatgtggatcagattctttattactaacataaactatgggctttatagaaaaagtagcagtgttggtaacaggcccattatttgtaatcaaactttctcacataacatgctttagtggtcacctttattaatgttatttcaaagaaacaaaagcatacatccatacatactcatagttataactacatacataacatgctttagtgatcacctttattaatgttatttcaaagaaacaaaaacatacatccatacatactcatgtttaactacatacataacatacaaaaagaaaccctttcacacattcctcaaacaaagcggtcgctaaccatttcaccaacatgcgggggagctgccgctggcgtagggagaataacagcctctctctgcgcctcaatgaaccgcctcattgtctcttcatcgactccaaacgctatggacaatgacgtcagattcaaagtcctgagtagtgagtttgatccaactaggaactgaggtctattcttgtgagctgatgtggtgaatcctacaaactcgaatggtccggtccgagatgcgatctggcaaaacgcgaagtatctagggatccagaagacatctcctacggagactcttgtgttcatagcagaagttccattaggaaatacaacttggatctctccagagccagctaaaactataccatattctgttgctgttgggttcatgtgtggagccatcattgctccctgacaattgttgaaatttcaaattaaatacggtttaagaattgtttttttcctaaaccaatccaatctagacttaaattggtttaccctataccaaaacaataatttttagtaggtctagtttatccaagaattacgtacagaactatgtaactaacaaattctactcccatagatagaaaatttgctagaagttgctaatatacttgactattgaatattgatctaattttagagtagtaatcataccgcggtgagatttacgaggtatactccgatccccgagtgtttaagaggcttgtaatcgtcataatcaagagctatactccatccatatttgttatcaaaacttggtttatctttcttatcataaatgttgtacgagtcctcacattcagaagatcctgaccctttattcttttcttctgttagatccaaaatcgatcttacaatattcctccaagaccaccctgaactgtattgttgatcttgaggggatccttgtttagtctccaagagtttcttgagttgcttatgtttctcttcccctctcaaccccaagaattgggtccatatcgtctgctgtggttgtggcccttccgtgacgtgtacaatcggcccacggaattgactcatcatcatttgttgcagctcaggtagggaaacctataatataagcatagaagcgatatgagaatatatcgacagttgcaaagtcctaattaatcctttctccgttttaagatatatacttgatttttgtgcttcatagaaaaaagactagcttgggataagaaaatttaatatatttataaattatgtcaaagtgtcaaaccaccctttttgtgtgtgattgaaatgaatgaaataatcatttaggctcaaatgtacccacgttgaatgctgaagttaaagtgtgaggatcaaatccagctagaacagacgaaggccctccacctatacagacaggctaca

SEQ ID NO: 37814 - DNA, 4243 bp, Arabidopsis thaliana landsberg
gagggaacaccatgctgcaccttcaccaccaagacaatcatccttcgaacctagagaaaatgataagaggagcaagttgaaaaagcgaagaagaacaaggaaatcagatgctggagcaagccactctaccgcaccacttgaggagccactcaatcaacaacccgagcaaagggtcgaacatccagctaatccaagttcagcacaacccgttccttggagttacacaaaggagagcatggacgattttttctcctcctacttcacctgatcactaaggtaacagcacctcaaccattttatataccatagcttctttttatttttctttgtgtgttttgtgttttggtcttgaattctttctcagatttttattacacaagggattgtgtaatttaagtttggggggagggttcaagacacgtttaacaatgtgttctcttttcttatttcaaattttgaatcatgtaaggcatagaaaaaaccataaaaatttgaaaacacatcagaaaatgatttcaccaaaatagagtgtcatgtagattgcatatcacaataggaaagtatatagtgtatttgcatttaggattcctcatttgcataggggataatgattatttcaaagcgataagcatgttttgattcaatgaagtaagttcaatgcccaggttgttagttctcggttgcataaccgactgtatctatgaagtaagactacaccctgctttgaatttgtaacttgactatactgctttgattcgaaactcgcttatctgatgccattccatatctattagaacctgaactgaatttgcaattatcatgtctatgcattgtttgtgaactcatggctaccatatacatacttggattatcttattcacttcaccaccctctgttaatccaagtagctgtctctcatttttagagcagcttctcatacctttagcctagctttatttcaagccaaagatcatttgtgtgtgattgtgaggtctttttcgattgagcttggtataacgtgttacgtatgaaccgacaagagcagtctttcatgtagacctagtccacgcttttagggttagctaggactaggtggagacttgtatttgggattcggaatgtgtatggaatgaatgagaatgagagtcagaatgaaaaggaaagaaaaaaaaaaaagagtaagagtttagagttcttaagggggatacaaaagtgttaagtctagtaaagggtttggaattcaaagaagttaggaattgtgattcaaaaaaagggtaaaacgccctatgtgctaagattagaagaaaagccttaagtttgtcaaagtataaaaccaaacccgctagactcttaaatcgtttcaaagagaaccccttagaacttgaaccaaaaagagagaaagaatgagaaaaagggtagagttaggacatctatgggactaggatcatcttctgagctatcatactatatcattgggtagatgggagtctgttcttgtatgtgtctgttggcttttacctttagcattctactggagctcaatcatttctctgagagtcccctgttactcgaccaaaccattagagagaccatttttgtctcttagcctgagcccgaaaccaagtgagttcataaccattgcattgcttgatccactgttcgtgcttaatgaatgttaaagggaattggttgatgagaatgcttgaatagattaaggcaagttgttaggttgcattgtgacgagtatggctaacgtttttaagtaagggtctatcatcttgcaacctagaattagctacctggacattgagcttacccgttttatatgcatgcttcggtttttgaatccccaccttcaaacctctccttcaacttaagattttttgtttgcttgagggcaagcaagagataagtttgggggagttgataacactgtattttactcattttaggtgtatgtttatcatcatttagccttgcatttgctcattgtatcatatcattttgcactattttagcttgttttgcatacttaggcatctaggatcatcttgcattcgcattgcatgttttggtgtgttttcaggtgcagaaggagctaaaaaagactctactcgatccattcactcaatccacacagctatagacgaggcatcatttcactcaacctctttactcgatccaggatgctacagaggaggctgtagtttactcgaccctcttactcgatcaaggcaacctctgatgaagcagcaaattgatctactcgccctcctactcgatccactactcgatccactactcgacccatttactcgaccaagggtgaccatctctacaagacttgttgagctatcaaagcgtcttcggatcctcctcattccccactcaaccagacatctgagcatacggataggagaggatgaagcatctactcgaccaattgatcactcggagcatagacacaaaggcgcagactttgcagcaccctctttactcaatccccaagatcgagtattcgcccaaacctcctcaagtatcttgtcttttagtgaatctagggtttccaacattttagtataaatagatcactttgggatttgtccaaaggatctatgctttatcttttagtttttctttgtgtttatgaatcttgaaaccttaattactcttaatctatttcgtttttgcatttgattgtttaagtaaagttgtttagcttgtttagatctacattttggtattattttagtaatttatgggtttgtgttcttgataatgttgcttgagtagtgattagggttcttcaagatggattagattagggtaatctctaggttagttaggtggttagtgtttaggtttatacccttctggattcgcttggcccctatgcgttttttggtggctaatgtggagattcgatcatagacgtccagcgtccaaaagacgttcaaatggatgtttgacctacgaattccagagatttgtagactcgaccaagggattggcttgtctgcctattggctttggtagattatttcttaaacactgctctgctatgtttcatcaacgagagttgagattaggaagtggtagagttatgggggtgtttgtcacgagagtggattgacccgtttttgaatctatcgtcatgggtatctaccttttgcctattagccatttgatgaaccctagagttacccttatcaattaatccatccttagaacttctaatagatttatttgtatcccatgtcgattgcacttttatttacctgttatttgcatcccctatttgcatcccctgttgattgcattttagttcttaattttgtaacctgttgattctactcgacccaatgatcgagtagggctcgtaagttctcatttttacttgtttgaatcctgacctaggattgttactagaaacccaccatcattataatctggcttgacttagttgtttctgtgcacatcttgattgctagcaatacagtggactagatagacaccccctataactgcatcgacatgtttgtgttttaggggaattgaactgaactcacacattattcagcatatataagtaggcgtaaaaacctgcttatcaatttggagccgttgccgattcattgttgcattgttacgttgaagataccagaaacttttaagatcaagttcttttacatttttcaagttactaactcatattttcgtctgcttgtttttgtggtataggtactaatctttgtgcatgcaaactcgatccaaaggttctgcacacctattaccattcaaagacagaattgacaaaatagctcgtgagttacaagaagccaaaacaaagacaacctgtgatcagaacagaccagctgctatggatcaacagaacagaccagttgatgttcaagacccacctaatgttgatcaaccaagaaacattggtgctggtgatgccccaaggaatcatcaccaaagacaagggatagtgcctccaccagttcagaacaacaactttgagatcaagagtggtctcatctcaatgatcgaaggaaacaagtttcatggattacctatggaagaccccctggaccatcttgacagctttgataggctctgtggccttaccaagatcaatggtgtcactgaggatatgtttaagctcacattatttcccttttctttgggagacaaggcacaccactgggtgaagactttacccccagactccatcacctca

SEQ ID NO: 37815 - DNA, 2100 bp, Arabidopsis thaliana landsberg
  unsure (1)..(2100): unsure at all n locations
atccctctctcgggttattaaacgtagagattcataataaattgccttatagtggctgcttactaggaccaacaagatgtttttgatggtgttgttatgcatgtgctgcttcttaggttgcagagtaagaagaactagctgttcaaattcaaaaccagctcaaaggactataaactgcaaattgaaattaagaggcgggaagttaaaaaccgagtttgggatcccggaggttcaggtttcagaaatttgaacgtcaatcagaagctacaatgacattgtggttatgtttaaatagtcaaatgttgatgagactgagttttttcttttgggagttaagaatggttcatggcaacttcttcttcttgcgggcaattttcacatatcaacaaacttcttcggttcaaatggttaggcagataatgccactgccacaacggtcttaatcacgtgggagaatgcatatgtggataacgccattgcttgtcttatcaaccatgagggcatggttgttttgggaggaaaggatttgatatagtaaaaggagtgctaagagaatacacacgtggacggtggtgattaaagaaagaagcaacggttaagatgaaattattagagaattgttgggtttaaaagaagttgaagatcagaattggattttaatcgttaaaatttgtgaattttgttgttcttcctctttgaggttttctgggtttagaataatttgattcatcctatatgaagatccatcaagagatcttacaaggtgaatctgagtttctcatgttttatgaacattagattctctatcgtgtaatccgtttcgtgattgaatggagtattgatttggtgagaataagtggtttaattgtatcaactagaaagaatagtgtaaacgatcaaacaaaaccatagaaaccgccaacctaaatttgatctaaagttcccatgaattcctctttgaaaccacctcatcctaannnnnnnnnnnnnnnnnnnnnnnnnnnnnnnnaatcaaaagttgggttgagtaaaccataactaaaagatgaataaaactagaaaacgggttagggattacttctttgaatgtagaatacaagaggcaaagctccaccttaaagagtcttacacgaaaacgagaaagagaaagagagagatggtgttcttcaagcttaaagaggtgtggcggcaagtgggcagctcttggcgacagctagggtttgatggtgatgaaggcacgcctagggttagggcttagaacaagtatttatacttgagggccaaaaattaggtttaggggtaagaacgtcattccgccggataagtaagtgatcgggccgagtagtgggcttcaaggcaagagactaatgacggcagtgcaaagaggaaaggacttgggcgtgacctaatggtcggtggtgagctactaggagctgcccgtgttcaagtctcatcggccggatgtgttttggacttattatttccaaacagccagttcttgacatgtctttactctttgggtcatatcttctaaacggcttcatggattgctatgatttgacttcgacgtgaatcttgactcttctagctttccatccataccgagatatcatcatttcgaatctgggaagaccttggccggatgctaaacttccgaagcactggaatgatcgtcttttgatacttttagcatcaaaactcttaaaaccttcttggcacctagaatgtgtgtttctcctcttactggctctagaatggcaccaaatgatctctgaagcataagaaaacaatagctaaaatgggctaaaaagccgtgttatcaactcccccagacttagactttgcttgtcctcaagcaaacaaaagaacaaatctggtggagaggtttgaaaatcgcgggaactctcctgttatcagtgaccatgtcttgaatatatcctacagaccacattaagcaaaagttgcgttagaacggacgctcaatagtcttatgcctttctcgtccttgtccatatgccttgatcctgcagaactgtgaattcatgtcaatcaactctttacattctttaaatgttttggcgtggactttctcattagaag

SEQ ID NO: 37816 - DNA, 1884 bp, Arabidopsis thaliana landsberg
tctaccgttttaatacgagttaaatcatttatttattattttttaaggccactaatattaggcatatgggatcaataatacttttttaaatattattaatatgttgttttaataagagttaaaacttcagttttttaacaattgtctcatgtattcgtcgtataacgttacttaataacaattataaactgtaaaatataaatattttataacaaataaaatttgcaagttttaatatatattaccttcaaaaaataaattgtcctgcggtgtaccgcaagttaaaatctagttgggatataaatcgggaggatgatgtttaggccaatttttataaaacaagtgtcctgagtcttattgtatacaataggagtgtcaaaatgggtcaaaattcatgagtcaactcaactcaactcaacccatgaaccctaataagttgaaaattttgactcaaatgagttgatgggtcaaatgagttattgggtcaattggtttgatgagtaaaatgagttagattgtaatgggtaatggtttcaatggtttacccaattaacctatcaagttttgtaaaattgaattaaaccaactaaaatctctaaaccaatgtcaatttaagtttaaccaacacatctaaaccaatctaataaaatcaatattttttcaaatttcttaaatatacaagcgatgaattgaaaaaaagtaaactcgtaatttttccaccaaaaaacataatcccgtgattttcccgccaaaaacaaaaatccgtgattttttcgcaaaaaacgtaaacccgtgatttttccgccaaaaacgaaaatccatgattttcccgccaaaaacgaaaaacccgtgattttcccgccaaaaacgaaaatccgtgattttcccgccaaaaacaaaaacctgtgatttttccgccaaaaacgtaaacccgtgattttcccgccaaaaacgaaaacccgtgattttcccgccaaaaacgaaaacccgtgatttccccgccaaaaacaaaaacccgtcattttcccgccaaaaaagtaaacccgtgattttttcaccaaaaaacataaacccgtgattttcccgccaaaaacgtaaacccgtgattttcccgccaaaaacgtaaacccgtaaatatcagaatctgtaaatatcctaagtttgatgataataaattaataattattaataatgataattatttatcattgatttataaaaataattaattaaattattacttaaatgggttaacccatttaacaactcaacccatcaaattaaatgagttgggtcaacccataactcatttaaccctaaactcatttgattatgagttgagttgagttgggttacccattttgacacccctatatatatatatatatgggtgtgtgtgtaaatatagtcttataaattggctaaaaattatatgaaaccctaatatatcaaactattgtttgtaactgtagaacatgacacaaaagaaacagtgattgtttaagcaaggtaaaaacaccactaattggatcactgttttaatcaacactagattttaaccctcggtacaccgcgggactattttgttcttttaagaataaaagtataatttgtttagtcgattaaaaatatataaaatttaatattttgtattttctaaatgtacaactcttatatctatatattatttagcatacaattactatgtttaatttttactgttaaaagttataggaagaataacaaacagtttattaagttaaaatttagattataactaaatcattcaaattttaattatatttgttttaaaaatataattgtattttgatttttatatatatgattagtgaacaaactatatcatgtattgatatatatttg

SEQ ID NO: 37817 - DNA, 4388 bp, Arabidopsis thaliana landsberg
  unsure (1)..(4388): unsure at all n locations
gatatttatttagcttagggctctttacccttcttcattagctaacaataacccaatctctttctttatcattttcaaaccctttactagactttttctaacttctttagcttacttctcctagaattcttttcctttttcttgtaaacaatgaactcaacccttttttctcttttaaactcttcccaacccatagaacaagtacccacctagtcctatctagtccggataacgcgaactagaactacatgagatactatctttgtcgttacaaacctaacactttctaccaagcttaatcgaaaatagacctcacaacactcacaagtgatatatggcttgaaagaaggcttaggttagggtatggggaaactgctctaaagatgagagacagctatttggatcaacaagagtggtgaaatgaataagaagatccaaatattttaagggtgaccatgagtttaacaagcaatgcatagtatgataattaaaagtcaaatttatggttcaaattgatagggaatagcttcaaatcacagcaagtttcgactaaggaaagatcaaatatatgaattcaaaagatggtgcggttttacttcaagatcaatcggttaagcactagacaactaacaacaagggcattgaaactatctagtgaacattgcaaatttacaaggctatgatcatcattatcccctatgcaagtgcaaaatgcaacaacctatatgataacattcttaaaacagccctattaatgcaaatgcaaactacatgacactctatttttttggaatcattttcgaaaattttcaaatttttatgggttttctatgccttagatgatgcaaaaatttgaataagaaaacatgaaacaatgttagatacatcttgaaccctcccccaaacttaaattacacagtcccttgtgtaataaaaattcaaagaagaattaaagagaaataaccacacaaagcaagaaataaaagaaatgcaataatatgtacagtgaaatggagtgatacctcaacatttagacgaagaggttctggacaaactcgtccaggcggtcttgtgtgtactcaggatcacgtgtggaggtgttggggttattggcgttgtactcggttgaccggtcgagcatgtatcccgagtagtactcctctcggcttgggtcagcgttcagaaccaactggttcactggaccgggtgggcggctgttgaaacggcgatctgaaaaggtggagctcctcccgagctcgtagtttgaggctcttggcgggtcgaaacgagcgtcccttcgcggcgccacacttgttgagttacttctcctgaactcgggtcgaggtggtggtgannnnnnnnnnnnnnnnnnnnnnnnnnnnnnnaccgccatgccatccattgctctcttcatctttctcaccttcttcttcaacccactgaacaacttcctctgaaacttgcccagacctttgagcattcccaacttcttgtgaacttgaccgggatctctctctggatcggactcagcataatcctcaaagaaaaactgctccgctgcagcttcgcacgaatcttcttgttcatcaaactgttcagcttgactgaactcagctggctcaaactcgtcatggccatactcggcctgctgaaagttactcgggcgagtataagcttcctgctcagcttcttcttcattccactctgctccttcttcttgagactcacttcctatgctcggctctgcttgtagaggcgcaaggacattgactaagatcgattgaggaggatcaaagtcaatgttgttcccaatcctaatggtggtgaacttcttgcaagggagtgctagcctagagagacctagcgtggagtgcttgaacttgaaatagagttgatccgctggagcagacctatccaagtagcacttcctcttcaaatactccatatcgatgtaggttgctgtgtgagtgggggtatgaagaggaactccagcggctattaggatgggcgtgatcactcctccagcacataagcttcctccatagccggattggtggattccggctgcatactccctaaaaccaatcaagtgatcaatcaacaccaccgaaagggatgtatcagccctatccccttccatctctatcccattcctcgtgtgccccaaaatgaagcataaggtgagatcaagcaacttcagctctccctcattaacatggccggttgtcttcttcgggaagaaggcacttgcaatgcaaaggtggagatacctaagcaccgggctccttatcaacgaactcttggccctagatgacttgtaggggagtggaccggcgattgtcaaccatagatcaaggagctcgtccttgctgaagttttggcggattccatacttggtggggaacttgaaaatagcatccaactgcctaatgggaaccgagtattgaattccaaacaccatgaaagtgatgtaaccaactcccttatgcagctctctctccctttcttcagcatagaaatggagcttcaaagtggctaggaattggcagctctcagttttgtatccttcatactggtaggagaagaaggtctccagcttggccatctccatgaggtagtcaacatctctacatatccccaaagcttgcatggtaggtctatggggatatcttgtcccctcaaaactcagctccatgagatattggtagtgctcttctatggtaggttctttctttctcctcatggtgttccttcttctacttgtaggaactatcgggacctcttcatcaacttgcacatcttcctcagatgcttccttctctatctcaggcacttcttcttctgcaactggctcggactcccagaccctcttgcctcttgctatttcctcttgagcagccgcagaacgaccctcagaggactccggggccatactcggccattgtactcggcctgtcatccgagtaaaaccaggactcgcagctttctgattctttgactgattcttctcattaatcatctcaaaccctcttgccactgctcgagcagaggctctccttcttgattcttcgggattcatgatcttgaggtgatttactgcagatagtcaccacaaaataaccaaaggtaggtcaaagtagaagagaaattgatgtttaaaaatgaacaaagagtgtaagagaggctttgaaaaggtttgtaacaagagattttggcaaagtttctgagaaatctagagaagtgagagtaagaacttaaaatgtttggagagaaggagtaaaattcgaaatttttgagcaaaaagagagtgtgagtgacttagcttgttgagtgtggttttatagacaagaagatttgatcctagccctccaaacaccttagatcctcacccttcatttggtcaaggggacatgtctcactatttgcagcagaatctttgaagggctttggggagcaggatttgattggtggggcccagcaaattcgaattcaaattcgaatttgaattgtgttgacctcgcacgtgtgaactcggccgacatactcgacgcgcgtgtcgagtacagtgttgggcctgatgggcttctttttctgactcggcttcgggccgagtgctgcatcttgttgggcctttgaacagtgaggtccatactcgaccttgggccgagtggtgtgggccgagtactattcaatcttgggcctttggtcaattgaagcccacactcggcctgtagccgagtagtacggtcgagtgtggcctgaaattctctagaagtctttttccctgaaacacttaaacaaaaacatcaaaaataacaagaaagcaatatatacaaggatagacatgggacttcctcccaagtgagcttgtttaaagtcactaagcttgactctcacaatgtttaggtagagaagagattgaggagaggaactaagaagtcctcatcttcacttgctgaatcctcaaagtctgaatcatactcttcattttctctagatagctggagagtagagtattcattagatcttttctcaaagtaagcctgtttctcatctgtagtctagtctccttctcctgaatcaggttcctcaaagtattcctctacttcgggacttggataccccttaatcatttccttaagctccaagatagtatagtttagttcttccatcttgaggtccaacttgtcaatgatgtcctcttgagcttcatactccttcccaagctccataagctctctagcaatagaatcaatattcaataggtctcccttagtctctacccttgagcttgattctcctttcatcatagaaggctttttgggctgcttaggctctcttaggcagtgagttggaatggagttttccaacccagtcaacaactcagc

SEQ ID NO: 37818 - DNA, 3515 bp, Arabidopsis thaliana landsberg
  unsure (1)..(3515): unsure at all n locations
aagactggtttggttgataagggttattaatacaataattgcgttatgtggtcaaactaatgatagatattcttatttcacagatggcgtgatgtgaagttgcgttcttttgagaatgcaagtcatcgaacctatgtggacttgaaggtatgagaacacatatcagaaactggtcaaacacacttttgagtcttagccactacataaatggttccaataactttgtgatttgttgcaggacaaatggaaaacgttggttcacacagcaagtatatcacctcagcaacgaagaggagaaccagtgcctcaagaactgctagacagagtcttaggagcacataggtactggacacagcaccaaatgaaacagaacgnnnnnnnnnnnnnnnnnnnnnnnnnnnnggttgaagcaggttcgtccatgtaaagaaggagaatggtaataacaataactttcacttgacgactaaggaaccaaagtgggcaactgtacaaagggaaacaacaaaatacagaaacatacttaatttctgaaaagaagagtctatatttttattttttttaaatcatagctggtagaaacaagacgttccttgacacttttggttacttttatggtaagtctgttcattccaaatttctaattgatttgattatgtaatttggtggtaggaccatggaaaaaggggaaatgtaattttagacaattcttttatttttttgttcatcattccattcaatctaatatctatggactatggcagtgactggttttcatcaatctctaaaccatttgacaatactttgtcggccatcgtctttccttcgttcacattgggttctaaatattttggattctattgagaatggggttttggattaacagggcccaactactaaagttggcttgctgcacttttgccacaatccctctcaaattattattttagcagtaaaacaccaaatttaatcttggttacacaatataatattaaccaaaataaacaaagaagattcaatttaactaaacaccaaaacaagaaaatcctcgattgattgtcacattaaaaaaaaaaacataatgtttttttatctaaataatttggattcgaaatttttagccacttacataatagaaccatcaattcccaacaaattaggtctactaaatagattactttcggaagacgactattgcgcgcgatttttcaatatctgcatagatttgatccacttctccacgagtatgatacatttgccctaatggatcataaaaatactgcacattgaaaactaaacaaatattaaaatctgttatattataatgtacattgaaattaaatgataaaaatgtgtgatatatataaacacacacatatagaatgaaaaatcatatatgcagtaaaagctaagagttgacaaaaaagaagaagtaaaaactaacatttgagtgagcttgagatttagagaagaaactatatgcatgtgcatacatttttcttgactcgggtctcgaaactatactttaatcatacttgccaaatcaaacatatattatcttgaaaactgaatacaattctcatagaaagagagattctatcccaaaacatagactattaattcttaaaactaatgaattttttgcggtgacaatagaaggtgagtctagtaaaaaaatctaaatcaacatgacaagaacaactaaactactaccacttagttgatagcatgttaattttccatcaaaagaaaataatagttacccggtagagtcggtcatagaccttaagacgctcctcagcgatccaaccagaacgaagccagttgtaacgaggacatgtattatcaaacacagtagaagacgtattgnggattttattcaattgtcttctgcgactcacaatcatcaacgtctctttcccttctcttgacagatttgcaacgctgctctcataactgatcacatctgatgatctcttttgtcgtggacgtttctgtcgtcgatgtccagaactactagattcagcctccatatcttatccttgtattatcgtcttgttacacttttatcttaacgaatttcaagtctttgtatttacacaaaacttatcaccttaaggatacaattgtgccatgtgttttctcatcttcgttggttttgcacattgtatagaaatatatcttaaggagattacaaaatctccaaatacattaatgtatttcttttttattttcgttattctgcactatatatagaaaagtatcttaagaaatttacacaatgtccataatacattaatgtatttatttccataaataaaattatgtatttttacacttaataccaaacataaaataaatatcaatttaaaaaatggtttaatgaatttctctttaatttgttttattgaagttttgtttttggaaaagttgagttttctttttctgaatttaattaatattatttaaccgttaaattaataaaatttcacgttgagaaaatggttacattgctgtaaaacaaaattaattagaagattaatcaagtatatagtccaagttaagttccaaaggatttcaccaatataacattaatttatcatatattattagatgagtactcacatatatgtaaaaacctctctaattataatttttattggtttatcttaggaggggttattggtttattgatttgtaaatctatatagagtttgaaaatctctattaattatgaaatcaagatatatgaattttgaaataacatgtgtttacccatggatttgaatccttctatttttctcttttaaatccattcaattccatttaaaacataatttggattttcaaatccaaaaacaaatgactaaacgaataacaaatgattttaactagtatttataaatcatcgaatcaataacacatgattttaattagaattttaaaatcaatgattaaataataaatgatttttgtttggattttcaattccttataaatctataagccaataacctttcctaaatttcgaaaaaatatatatatatatataggaaagtattattgtataaaaaataaatgacttttcaaaacaaaaaaaaaataccttaatctgcctccaatattctccgtaaggggagaaaaccatttctcgcccaccgttgaaaattttctccaccacttttaattgcgggcggttcgcaaccttaaggtcgtgtgttttcatgaggtcatgagctacgtcagaggaagagactacgaggaccgggacacggccaaaatgaaggagcatgagtggaccgtagcggtggctaagggaacgaagggagcggtgagggtggaggcttagctgatggaggtttccgattaccggaactcgccacggagacggtggtaggttgactttggcagtgtacgttcgattcagaaattgttttaggagaagaagggctaggattgttgctaggcagagagagatgattatcatttccatttctttctttgaacatgaaaaa

SEQ ID NO: 37819 - DNA, 2721 bp, Arabidopsis thaliana landsberg
gtctccaacatgctaacctggctgcccaggcggctatcttttttatctggagacagaggaacaacatgctacgtgatagtaccacaatcccccaacgatcatatttaaaaacagcgacagggatgtgaggaacaccacactgcaggatggtcccaaaaacttttcagggacttgatggctctctcgatccgctaatgggttgattgacactcaactccacttttgtaatctttatttttggcctttcttttttgggcaaagtttacagacttaggttcaacattttgcaaaaccccaacacttcattctaatgaaattcacattcttatcagaaaaaaaaaaagagctttgatttttttccatatcaaattagaaggcccgtactcaaaaagccttctaaggtccaacctcaatgtttgaggactcatgacttttggttcatgagattgactgtatatgaaggggaaattacctaatttttttatataaatttataatttttcaaaaatacaaaaatgaatttaatatagaaatatataaaaagacaaaaacctagtcttcataaattgattctaatataaaaagttgaaagaaaaaaaaaaccaaagatagtacaatcatatagtcagagtcaataatagattgagttttcaaaaagaaaaaaaaaactgaaaacgtatgacgacgaccgagtgtactacatctccggcgattccgcctccgcaggtggagcattcaccaccacaggagaagccaggcaacgctgaactcttttcccccgctcctccctctccgccgccgccaaaaattacggtactctctccgctctctctgctctttcactgagtaatttacacgatctataaaactccgattgtgttgcagatgatggatattgtgaatagcaacggaattttaacagatcaattggttgatgaagacccatctttttacaagtaattttgctttcatgaattttgaaattttttaggctttgtggtgcagttgaagaacctaaatttgaatgttcacaaataccaatttcattgttagatatctggatagcgaagagtatgctgagaagtatcgaagctacgaagctgattttagaaagtatctcatggataagcacttctctgaaggttactttcaatttgtctcgaattgttgttcttgaggttgaattttcataaaaaattaatctttttggctgtggttttgttgtttgtttcagtggatgaatatgaggagacaacaacaattgatggtgaaaccattttttcaagcgtgtaagtaatcagataggtgttagaaacagaggttttgtcataagtttttgtatttttgataatactgtttatcttggtttttggatattgcttttaggttgccttgtgcacgttggtatgcagacccggatgcttcgtttgtagacccgccacaatgcattgttgaagaagaagaagtaggagaagtagaagaaatggaagaggtagaagaggttgaagaagaagtagatgaagtaggagaagtagaagaagaacaagaagaggtcatagattcagcttctgcagaaataccaaatggtgaaatctccaatggaggtactgtcttagaggatacttgtgatgttggcgagaaaccagattttcccatttagtttctttttctttgttctgttttcggtgttaacaatgtttgaatggaaccctttacttcagttaatttgcttctttagaccaataatgtgatacacaatctcggtgttaacattgttgttatctagtatctacatacaaatgcaagtaagtaattgctactgtagtagtcactagtcgcatacatggcatcaatcatagtactactggcttaagttaacacaccaagaactagaagagtggaagatgaaagtttttttttttacttaccaaagggactgttggtgggacggtttgatggttctcctcttagataattcacattgcggtcattgatgttgctctctgcatttctcatgggtaatagcacatctgccatgagcaagtgaaaggaagagactttctctttcagctgtgagttctcttgtaggatctgatggttgctttccaacaagttgatgactttctcagacaagtgatgattcaacatcatgagttgttcaacttgttgttgcagctcttcgatctgcttctttttgcgcatacgtgacctccttgcagattcccggttagagaccattcttcttgctcttctttcttctggagcaagaccttcgttatggaaaatgttttctgcatttgggtctaagtgagactgattgttgatgcgggtcgatacgtttgactgcaaatgaacattaaagtcagtgtttggtaggaatgccgagttgaaatgatcgtcgtgtagtgggactccatcaagaatatcgaaacaatgagagcgatggacactacacgactccatgtagggttttagatgtctaatcatctaactgaattctctgtgatgcaggaatcagaagcgtcaaaagtaagagatcgagaggatagggtcatagggagagtgatagaactagagctagagagaatgaggaagatagagaatgagagaagagataaaagatttgtgtaggctcatgcttgaggtttatgggtgttatataaatacacaagattctacatgcacgtagtagtatgtactaacattttttgtcctagccat

SEQ ID NO: 37820 - DNA, 1079 bp, Arabidopsis thaliana landsberg
ataacatgaaacatgcggattacatgaacaaagcaaaattttatttggtagtaaagtggacataaatatagaattctgggcattatttaacatagttatagttgcatgcttcaccagcgatgaagagttggtacgagctcaagagagactttcttggcgatgacaaaagctccgtcttcttccatgtcaatatctttagtggtcattccattgggcaaactccaatcgaagaagtaaagaaggctaagaagcccaagctcgacgatggtgatccccgtggccatcccgggacagaccctacgtccggctccaaacggcaatagctcaaaatgttgacccttgtattcgatagggttatcgacaaacctctcggggatgaactcgtcgggttttgtccagtttttggggtcacgtccaattgtgtacgtgttgatttggatcatggtgttctttggaatgctgtagccttgaatattgatgtcggacattgttagtcttgggagtaagagaggagccggtgggtgtaatctgaatgcttcctcgatcaccatcttcaagtactcaactttctcgaggtcttcttctgtgattttctctttgttgggtccgagcgctgctcgaatctcttcttgaagttttctcatcactctcggatgtctacttaactctgtcatcgtccatatcattgtgatggaacccgcgttcactccagccaaaaacacatcctgatcaattgacataatacctatcaacaagagaaaatatttttctataacttaagttaacttgcttcccaaggtataatcttgttcttcaagttagaaattcaaaagattttactataattatatgtactcactgacatgactcctttaagatggtcataagtgactttaaacgaatcagcttttgtgggtttattgatcatatccaacatgacactgacgatgtccgagtgatcttgaggttgtccagtcttcaaatgatcatcgattacatgtttatagaaattggcgagtttgtaaaaggctttgttcacccttgaatgttgacccgagatcctatctataggccacgct

SEQ ID NO: 37821 - DNA, 2505 bp, Arabidopsis thaliana landsberg
  unsure (1)..(2505): unsure at all n locations
agatcctaaaacagatgataaaagatgaacaacgattttagaagtaagattagcatctttcattctatggcctaaagcagaggaaagttcattatttcttctatgaaagtttaatctcaaaaaatctaaccttccgatgcttagcttttagctctccatcggaaccaaagacacagcaagtgttatacaaacgatctccaactctttctggtatagatccaccaatgattgtaatcttgagacgtttggaaacttcagaaagcattgccgttgaaggagaagcatcaccacctgcatcaatctcctccgcataaactggaaaactatcattgnnnnnnnnnnnnnnnnnnnnnnnnnnnnncaaacccattgaatggttttaaaccccatagagacgataccactagctcatactttttgtaaattttacacatttgagcaacagaacattagaattgaactcacaaagagctatgagctaagatacaaagaagaaaaacttacgggtaagagaacaagcttagctcctttaagagcagcttcttcaatggcttttttagcatgagagatgtttctctttttgtcagatgtaacagatagctgacacaatccgatgttgaactacaaaataccccatggaacgaagaaatcaatcaaaagctgaaatgattgaaaacccaaaggtaaatgaaaagaaaggagctatctttggtcaacggaggagctgggagaggaagagcagagggaactctagcttgttcagggttgaaagaagaagccatggaagaggaaatggatcttaaagctgaggttgacgaagatgggagcttcaaggtgtgactagtgatcgatctcggagataatttagggaggaagttagatttgagagaaatgaagcgagaaagaggattagggtttaaaagattcttcgaattgaagaagagtgacgatgaaattgctgacttcatttccctttagtccgatgatcatataggtaggtagatgatattgatacttcacctcacaaaagccatgactcatgaatcctctgcgtttgcgtttcaaccgtattgacgcggttcaatcaattttatacactaaattcgaatgaaatcgtaccaaaccggataaatttaacatccttactaaatccaaaacagaatacatatgggcctgaaaacgaattggtcttgggcctgaccgaatcaatcgcttttctctacattcgtctagaaatatccatctacacttctccaacgatcaagacgtttctcgaacgttagagaagcgcttttaagttctataacaccgaaacaatcgctctctctacattgctctagaactatccaactcaacttctatttaatactttcttacatcaaaatcaaaatcaatcaaaccaaagaaaaagccaagaagcaagaaagttaacacaacagctaagaatggatttggagtttggaaggtttccaatattttcaatcctcgaagacatgcttgaagcccctgaagaacaaaccgagaagactcgtaacaacccttcaagagcttacatgcgagacgcaaaggcaatggctgctacaccagctgacgttatcgagcacccggatgcgtacgttttcgccgtggacatgcctggaatcaaaggagatgagattcaggtccagatagagaacgagaacgtgcttgtggtgagtggcaaaagacagagggacaacaaggagaatgaaggtgtgaagtttgtgaggatggagaggaggatggggaagtttatgaggaagtttcagttacctgataatgcagatttggagaagatctctgcggcttgtaatgacggtgtgttgaaagtgactattccgaaacttcctcctcctgagccaaagaaaccaaagactatacaagttcaagtcgcttgagtttgtttgtgatcgtgtttttgtgttttaatgaatgtaatcgataagcaactacctcttggtgttcgttgtaaaatgaaataaaaatagttttctctgttcatatttgtctttgtgttcaatcttcaaatcaatgaagtttttgctctcttgaaccatccatgcttatgaggcaaaaataggaccacaacaaaaaagacaccgaatggtcattcctctgttttnnnnnnnnnnnnnnnnnnnnnnnnnnnnctaatatcattggtgctatttagcacattggccatcaaatccacatttgcatttcacccttatctctgcagtcagcaaaatatatttttggagttatgtcccttgaagtaatttatgggtatgagatcagtaacacagtgttattatatctgcaaaaactcttacatattcaattttatcctttaagtattagatgaaaggaaacaattttgttattctgattttaaaatccaaacaactctttgtacttttttcatgttggataacgtaactgaatcttcagctactacatctgtagtataatacgaagtctgatatctcaatctgctacattatt

SEQ ID NO: 37822 - DNA, 5367 bp, Arabidopsis thaliana landsberg
  unsure (1)..(5367): unsure at all n locations
ggatttagaccaacaagactataaagctcagtcaaaaaaatgtacgacacgaaaactgtccacttctaccgaaaatgcaaatgatcatttcaggtaaaccaggtctcatagattagacccagggacaacctactaagactgaacttatttatatagtaaaaaacaacaagagaagtagagaatgagatctcttgaacacagattcaatctgaaaacatatgattattagcttaactaattaataacgttacatttgaaatactcattaaatttcacctgtccaataaccactttcgtttgctaataatggagccttctttttttttcttttttttactatagagataattttgtacacggtaaaatagaaagaagaaacaaacgacgaaggattaatttcatgaattattcgatagtacttaaactgacgattagtgattggttgttagcaatgagtgattaccaaagaacaacaacgatttggtcctatatatatatatatattcgactctaaattcacccaattatgcaaaatatctattcaatgtttagactaattgaaattggtagaaaagtcacttacatagttgcagagagtttgagggagatggtgaagactacaagaaaacacgtcttttgcgagggaagaaaccgtagctaatccctcgcaaatagacaatcgcgagggaattgcgacgaaccacagttcctcgcaatacgcgtgtcgcaaagtcaaattggtagcatttctctcgcaaattttgcgacgaactaacttactcgcgaagcactcacaatttgcgaaggacaaattcggtagcaaagtagctgcaaatttatggtctcgctcattcttcgcaaattttgcgatggagttgcgaggctccgttcgttccatcgcaaatccttagcaatatttgcgatggacttgcgatgtgtcaacgacttatttgaagttttttttagcgtgattactatttattttggctccctcattcctcgcaaaagtttcgatggagttgcgtgtctccttcgtttagtcgcaaatacctcgtaatatttgcaatggacttgtgacgtatcagcgacttatttgttgtttttgtaagcgtgattactgtttatatttagagattactgttgtaattagctttattcaatgattttcctaatttgatctgattactaagctttaaatttgaaaactgattaaaaacactaaactcataactgaaagctgaaattttaagattcaagtacacaatataagaaaccacaaaagattgtcttaagttttgataaattgtcaaactgaatacagaaattagaaagtatgagatggagaggatccagtgttggggtcagctataacagcctcaggtttgacagcctcaggtccgacagccacatgtccgatcccagcagatgtagcagctgcggcattaggctcctcgggtctcagattggagttgaccgattcaggtcttgtagaggatctgtctcgaaacagcgtagcaaattctggatccttatcggcaaggtagtcaaagtacgcatcaaaactggtgatcttcttagcctggtttgcaataagggcttcagcaacagccagcttctacgagagcacaactggatcatctcgaggaagcaccggaccggcatgagctgaagacgcttctgctacaatgaaccagccccataaatcctccctttcttcttaggagcaacctgtcacaaactcacaaccaaaccaagcaaacataatcaaagcaaagtagaaacacttagacagaatggaaaacacgcaagcttcagacataatgatcttaggcctaatggaaaacaagcaagcttcagtttgaaacacaatgacacaatgcaagccacaacagacaaacacaaagcaacatacaaaactgaaactatcccattagacagtttttagcttctgacatagtcatattaggccgacaatacaatgatttcattcaaaccaacaacaactgaatcagatcaaaaacacaaagacacaacatattcaattcagtttgaaacacaatgacacaatgcaagctactacagacaaacacaaagcaacatacaaaactaaaactatccgattatacagtttttagcttcagacatagtcatattaggccgaaaatacaatgatattattcagaccaacaacacaactgaatcaggccaaaaacacaaagacacaacatattcaattcagtttcacaacataatcatatccatttacacacactgccaatttgcaaaccaaaaacacaacatattcaattcagtttgaatcacaatgacacaatgcaagcctgaacagaccaatccaatgcaagccacaacagaccaatccaattcaagctaaaacagacaaatccaatgcaagccacaacagaccaatccaattcaagctaaaacagaccaatccaattcaagctaaaacagaccaatccacttcaagctaaaacagacaaatccaattcaagctaaaacagaccaatccaaagcaccaaaaacagaccaatccaattcaagccacaacagaccaatccaattcaagctaaaacagaccaatccaattcaagttaaaacagaccaatccaattcaagccacaacagaccaatccaattcaagctaaaacagaccaatccaattcaagcgaaaacagaccaatccaaagcaacaaaaaaaagctgtcttttatattgagttgaaagagataagatacatgtgcatagatcttgttctttgcctgaacagataacccgcctgaacccgtgctctccgtacagtcgtctaaacacaggagtgactcttcctcttgaatcttcgatgacacttccttatagatctcctctgactttctgttgatgaaactgcaatcaggttttctgagtgtttgatctaaaaggaggagaaaatctggagtactatctcctgtcatctcacagtgaaacacataaacatataggtcagttttttgaaatacaagttttttaaaggaaaaaatttgattaacttacacatttgcgggctctggctttgtatgaggtctgcccagaccggtgtttatgtatcccgaggccgtccggatcatgataccttgcattcctactgttgatactctttctttccgacttcgaatccctccaaaagctaaccagaactttccaaacttctggatctatccaccgcggttttgcctcatctcccttctccttccactttcccttccaacgaccaacttgatcagacatcctatccttcagctctgcctcaaactccaatctaactctctggtttattgcagagtcccagttatatacttgctacaaaacaaagacaagacacattagaaatagacaagaccaaaagctgtaccaaaaaaaacacaacattatttcacttacagcaaaggtttcaaaccatctatcgaccactgcaactgatgtctgtgaccaatttgcatgacgctctttgaaatctttttcaaaaatgctccggacagtggctgcaactgaggtgtcatcgtcaaacctacaaatcaagactccatcagacagacaaaactaaacaatcaagtaatagtgaagagaacagagcctagtggcttaccagagagtaccaggaggtcgattagggtctaatctaggcaaccttgcacgaccagggcnnnnnnnnnnnnnnnnnnnnnnnnngtcattgagccgagcagctagaggagtagtgtgattggcaaaaccgcgaggagactgattggcataaccgcgaggagattgattgataggcggaggagaagcaccatctgcttgattgttggaattgattgggggtttgaagattaccctgagtggctgaaccgtttccttcactaggagaacgacgatgattttgttgctgagatcgaaaccgggaataatcattgccattgaatgacatcttgcaaaaaaaaagagaacattagtaaaggttaattcgaaatacaacgaaaatcaacaaatagaaaaccctaaacagatatacaatgaaaatcaaccggaaacaagaaatcctaattagatctacaatgaaaatcaaccggaaacaagaaaccctaattagatctacaatgaaatcaaccggaaacaagaaaccctaattagttctacaatgaaaatcaacatgcaactagaaacctaattagatctccaaatataaactcgaataagatagattaaaaccgattcaacactaggttttgaaagaccaacacaaaaaactaatcgataatcctaacaaattgaaacattacctttgggttccagacggcggcgaagaagaggtagacacggcggagaggatgaacagacgtcgccgaagaagctccaggtacacggcgacgaagaacaggcgtggatgagaagctccagacggcggcaaagaagatgaagacacgacggctctctgtatcgctgacgaaggtcaagacggcggcgactagcttcggcagtcgtcggatcgagagagaaacaaagaagaaatttttagggtttggaagagagacggcttggcttggaagagagacggcgaccagcttcgctcaaactcgcgtggttgtatatataaacttaaatagcctcgcaaagccctcgcaacattgctagggctttgcgaggaatcgactaaacaaccaatgaaatcgcttcaactttgcgagggacttgcgagtcctcgtagcaaatccctcacaaagttgtagggttacacagagattcgattagggtttctagacaaagttgcgacgagattgcgagggccgtagtaaatccctagcaaatttgcgagggagttgcgtgggacagtagtaaatccctcacacagcataggttacaagtttgcgaggaagttgcgagtcgccgtaggaaacccctcgcaaattgctagggttttgcgagggactgggaaaaaaattaaaaaaaaattataaaattataagaacaatccaatgcaaaattataataataaactttataattctatatttataactttcgatattaataaaaaaaaattctgaatttatttattatacttggtaaaaataatgaaagtagacaatataaaatacaacatttattctgattcattttcttaatcattataatcattttcttgctcaacgttttcatcagattcgtcgaatttgtcttcttgttcttcttcttcggaaccgtctgtggtgatgtcttctaactctctgttctgtaggtcaatgtgaataacatcttctgttgttatgtcttgaatggaaacttctctaatgctttcttgttgcatcacaacatcatcaacgaaaccca

SEQ ID NO: 37823 - DNA, 2895 bp, Arabidopsis thaliana landsberg
tttcaatgagcaaaatggtaacttcagtaaaatgattaaaaaaccttgtgaattgttgcttgagaaaagggagaagaagacacaagtaaccaagaagattgcagcaaacttcatattgttttgcaagtttcttctctcttttgtttttctttgcttatgtgatgtttatgagcttgtgattgtctccaagaaagaacttattttaaatatatacacagagcatatctatcatattagaggcctaaggaaaattcattgaaatttcatgattgttttctatttttaacaatattttcatttattttattaaattattattgttaaaaaaaagaagtagattataatattatatttatggaaataatgtattacaatatatactttgctattcaattgtggagttaaagtcaattccttaagctttagatttgttttctgatattgctttaaaaaaaatgtttgtatgaatttcaaaatctctgcaatatgtcttggatttcgattctaatgaaatactcatgaaactctaaagaggtttcatttcaaatgaattaatatacaaggattttacaagtttcttagttttgaataacattggattttaatgaaatatttaaaatcttaattgaataacaccaaactttaaaatctattaagcatgatttacaaatatgagttccaataacactagattttaaagctggatttagaatcattagttgaataacagtggattagtattggatttcaattctattaaaatccattaacgaataacacccccttaaagtttatgccggattataattggaagaaagaaaatattggtttttgagctatagtgtatatgttcttataaatttagtatttggtattttagaatgtatcaacaatatttaccatgctaaaatcaaataataaatcataaaaataaaaaactactttcataaatttaaaggtctacataagaaaactctacaaagtaacatattgcaaatataacaaaaaactcaaaacatgttttaaccatatgaaaaatcttaattattatattatggattaggatattcacggaatttttctgacttttgtttgttccccataaaattccgcaaaatgggttgtggtggaacaaatgggtgggttcttgttgactcagacaagttggtacataatgacccgggccgtgagtccctaccggttcactcccacacggttcactaccaccttactaatgtgttgtctctaaaaaccattcttctccgcatgaagaaccgaatgaagaccatcaacactattgggaggaaggacattccgaaaactatgattagaaagatcaattgcatccaagtaattgaagttgccattgcaatcaactctagagacagcgcgaactgctccgtcggccaaattatacactcggaaaggaagctttctaagttcgaggtaacaatccattagatactttttcgattattttagtaattttttatttattctcggctttcttttaagtccgaggtagcactccgttacttttgctttaatactgattatcaaaactttcatattctagcaaaatcttagtagcaagatcagattttgtacaattattttttcaaatcaaagacacaaactactaacataatcgagaacagatggaagacttcttggagtgatggaatgcctctcatcccacgggctcagtacttattcacaagctcataagacctgctaagtcattagattaaggagctaatagcttgcaaggaaagtcacgtccatggttcaacacaatccgatgaaaaccaaagtaaaaattagtgttgagccatatgaaaaattaaaagatacatcagtttctagtattcaaataagtggcttactttttcagagcttccatctttttttgtctctaataaatcacaattcgatcgtcattacagagttaattaagtattctctattagatatgtgttaatataattttccttgcaattttataataataatatttgataattgaaatgaatatttgattatatatgaaaacattacaagataaataaaacaaaacaattttacatgaatatatatatatatatatatatatatatacacatatattaacttagccaagagatacatacatgacattccacttatcatttagacagtagattttaaatttgtatttacaatttcaaaactgaaaattcatttgtaatcaaagaaaaacaaaacaagaaaagggaggaggagtgggatttgggttgcttaacagtattatatatacacgtcgttagttaatcaataaattatgagcaggtgtagtagctatgaacatggtttaaccaagtggataaattcatgtcattgttgtagcactttagcgaggccagcaaaatggcgttcttggaaagggcacggcggaccgtggcccccagggatatgtgtgcagctagaaggattagaaggagtaacttcacctttttgtagaaactgtaaattgccaatacgctcgtttggtaaataccttaacgcttcgtttgctggaatgtgtaccaccattagtagaagaaagtgtaataagactatcaatgcaagagattttttcatattccttttcttagagtagaatggaattaataaatgaatgaatgaaatagggtttttcttgtttagatcctgtagcacccgagaatactagaagctgaattaattggtgaagagttttatggtggcgatgttgtatttatagagggaaatgatttcaagtttacaatgggatttttaatttggtttttaattatttgttgaattttgttgactattatcttgcggagggatcttgactgttgacatgtatgtagtgtttgttataaaataaatgca

SEQ ID NO: 37824 - DNA, 19642 bp, Arabidopsis thaliana landsberg
  unsure (1)..(19642): unsure at all n locations
tgaaaaaatatgattcatttcagcgatttctaatttttgagtttgctcttcacaagaatgtatttcgttccttaaagattttttcacgttccacctcttggaaatgttttttcatttcggtgaaatctaagtgttgagttcgctattcacaagattagatttcatgcctcaaggatttttccaagttccagctctcggaaaaatatattcatttccatcaaatctaagtgttgaactcgcttnnnnnnnnnnnnnnnnnnnnnnnnnnnnnnnnnnnnnnnnnnnnnnnnnnnnnnnnnntataatcatttcggtgaaatccaagtattgagttcgctcttcacaagattagatttcatccctcaaagatttttccaagttccacctttttgaaaaatatattcattttggttaaatctaagtgttgagttccctcttcacaagattagatttcatacctcaaggatttttccaagttccacctcttggaaaaatgtattcattttggtgaaatctaagtgttgagctcgctcttcacaagactagatttcatccctcaagcatttttccaagttacaccttttggaaaaatatattcattttggtgaaatctaagtgttgagttggcttttcacaagactagattgcatcccttaaggatttttccaagttccatttcttggaaaaatatattaatttcggagaaatctaaatgttgagttcgctcttcacaagactagatttcatccgtcaaggatttttccaagttccacctcttggaaacattttggtgaaatctaagcgttgagttccttcttcaccagaccatatttcatccctcaaggattttccaagttccacctcttggaaaaatatattcattttgttgaaatctaagtgttgtgtttgctcttcacaaaactagattccatccctcaaggatttttccaagttccacctctcggaaaaatatatccatttcggtaaaatctaagcaaaatataatgcaccatgcagaatgcatgcagactcgaatttcctaatatgaagcggacaactaatgcaagcatgcttctatcaacctaggtaaggccttctacgaatccatgatctcccaaggacatgcctccatactcgtagacacaaagtctataagagacataacattcctttagactacatcgtcatgtagcgcccagtcggtagcgatccagccctgaggccttcgtatgccataacggaacggagttacacgtgatgcacaacatgcagacgggattctcatgattcggctaatgctagccatctaattaaagactaactaacatgacaacagactcacatactatcatgcattcatcatatatgcaaaactctactaatcaaacaactaatcgcacttaattattactaatcacggttagtccccctaatcatggtttaactaaccctaatcatgcttaagaaatacttaccctaattaatgaacactaatcctaattaacaattactaaacctaattaactatcctaatcaaggattaagcgaataattaagctaagtaatcataattaacctcctaagctatattaaggaaataaatgaataaactatcgtattcacgtgctacttcacgtaactcaagactcacttggatttccgagtggtttggcttctgaatgttttctcccgcgaactaagctgttctaagcgatttttgggtctgaggagtcaaatgggcggagggggtatttatatggtccaaggtcggtgattaggtcggccaaggcaagcacgaggtggcccggaccaatcaaaacgttaaaattgtcgaccaacagccgctctgggacactaatcggcctccgattggttccttcccttttcggataaaaatcatccaaaagtggataaacacgaccttaaaaggataaagatgatcggaatgtggataagcatcggccctaacggataagcttgagctgcgattcaatccttgccatccattctctcatttcggaggatcctacgatctgtcaccggaccgcaagaaaattgagacggcattctccgtcactaatatctcaagagggtacgtgacacaagtcaagggtttctaaggactataatacattacatgccagaattaaccgagcaggccagttatcgtcacttatccgcattgtccgatcaataccttgaccattcacgacccatactcatatcccactgcccaaatggattcccctatggtctcctagtccttctaaggtttcctagtccttctaaggtttcctaaaactaaggttttcttaagctatcctaggtctaagggctagcttaatggtttcgaggtttaccgatagtcgcatcgtagctaagcttagtccgtctgatggagagtcattcctttacccgtagacttgatccattgcaatgctccttacccatgacttgccccatcaannnnnnnnnnnnnnnnnnnnnttttcatggcttgatctcgcattttactggatagactgcacgtccggccgtatagtcaaggtcaggggcattacagtcaatgtgatatcaagggagttacacaccctcaactctcaccccggagattggatcgaacttggaatcgcagaatttgctcgcatcccggattgtatgatgctcattcttgacatcgccagtcaaggggtccaagtgttttgcaagacgcgaagagtctcctagtttgaagtgtagacatgccgagaattcatttttatttgtcgtttttaataaatgtaactttgcttcttgttttgtacgttcgcacagccaaacttctttcctcttgtttgttcgcacagtcaaacttcctttcaaatgaataaaacaattttcattaatagctgaactcgtttccgagctgcctacgtaccctttttcgggatcaagccacaccgtagttcatgtacaaaaaatgcgtgtcacttttaaacataaaatttctttaagttgaccacattccaaggacgctggactgatctatcttctaaatccttcaatctataaacaccattccggaccacttcggtgacgatgtagggaccttcccaattaatgccgagctttcctgctccttcttccttcttgttatcaaacacacgttttaaaacatagtcgcctacaaagaatggactgcttttgattttcgaattgtaataccgagctgctgcttgttgattattctgaattcggattaaggcttgatctcgcctctcgttgatggtgtctagcgagtcgtctagcattgctgaattttcatcttcatttaaaaagtgataataggtttttcagccaattatcctaaaataccaatcatgtcgttgtagtattttaggttgcaatccaaatgagtgtgatgctaacaatcaagatttgatcagaactcactaagtcaagccaaacaataataggttttggggtttctagtaggtctaagtgaacatgcagaaaacaaaaattcaagcagaaacagttaaaacactcgaccaacacagctcgttgccaagcactgggtgtggtcgagtgacaggtcgagtaacagacagaaaatgtaacaggtattctcgactgcacagtctcttgccagacaactgggtagttgccaaacaactgggtggtcgagtatcacgcaaaaaatgcaaaaagtaaacaacatgcagcaagatgcagtaaacaaagcagattaaacaaagaaatcaattagatgagaaagtcccgaggatggggtaattgagtagtttcgtttcctcagtttacaggtgattgacatgctcaataaattatccctagaaaacaagttcgataaccaaatctaaatgccaccgcaacagagaccctcaagttaaaccagtcccagactcaatcaccattgacgagagctaacctaacaggcattacgaatcaacaagtaaagccaaaacgctccttgtaaccaatacctttgtacagagccatgaatgtctgggctcaaattccagttgatcagaaagcaataggcattaagaataactaatccataagggatatatcaatcaatactcaatcacctagcatactgagaattctacactactctaacccatcctcagaaacctattcactactcagacatcataacagaaagcataaacattgaacaagttgaaaacatgctaacaacagggtaacaaaaggatgataacagaatgaacaacaataaacgaaatcaagaacaaaagctgaatactgaatagataaagagaaatccggattacaaaaagtctagaacacaaggtctgcggaaataaaactaggtaaaaaacttcttgtctgcgaaaatgagaagtacatgctacttatagccaaatatcccgaaaccctaatactcaaaacgacgaagtatttggacgggttaagaactgtactcgacccaggtggtcgagtgagaggtcgagtgaatagctggagtcttcttttcttccttgtgctcgagtgtctggttgagtgcggaatgaagaaggctctgaagcttgtcatcgagtatgcagtcgagcggtgtgatggaggtactcgacctctaggtagagtgatgaggtcgagtattggtctagcagtgaaggtgaaagcactcgacctgggggtcgagtgaggtgatcgagtggtgtcagaagatactcgacttctaggtggagtgaagaggtcgagtggtgaagtgaagtggtgatgtcctatgctcgacctgggggtcgagtggtctcttgggatcttgaagctcctgctcgacctcttggtcgagtggtttgtcgtgatcaggtctgcttcttccagatggctcgtcaacagctccaaatcacctgaaatcaacgcaaatatgcaacatgcatgcaaaactatcctaaacatgcaaagtggtgacaaatgatgtgaaatggtataaaacagtgatgatatgatgctaaaatgatgacaaatggatgctcaaaacatgcaaaatacacacttatcacacttcagggtcgaattccactgagctctcgctgttcaaacaatagacttatgatgttattgaatgaagtaattgaatgtaaatgacaaataaacaagtaaacgagttgtagattcaagtgattaaagcatcgggtctaaggaattgtctcgggagatagataaattgtagatctagctaatattaggattgttatagcacagataaataactcaaactatgattctagagtaacctgtggtgttctgcgaaactttttatacttagagctaagataaccggagaagccgagaaatcttatactaaagcatgcatttttatcaagaatgattagttcacctagtatctaaactagagcccttctatgagcctatctgttctttcttaaatgcctaggctcatctatgatggatcaaatagcaagtacctatggtggacatacctattatctaatatcaagttctagttagctactctataactagcattaagaacaatcaagataaagaactctacagataacctaccaagggggcaatctactaaatcatctaaatccctaatgagaaaccctaaacctaacaagtgaattactcagacatgatcaaagaaacacatatcatagtctgaataaggaatcaataatagcaagaaaaagagtaaagaaggatcttctttaaagggagtctccacagggttttgctcccaatgtacaaaagagaaaagaagattagcctctccaagcttaggtctaaacaatgaccttaaaatctatatatataacctaaaacgtgatgggccttctttagaaataagggaaggttttcggccgaatttggaaatcttcaaaacttaaataagttgtgtcttttaattgcggtcaagtattggtgtcgctcgacaccaagggtagtctcaatcgacacctacgcgatttttagtctctagatttctttggcaacataaattctctgttttcctccagaatgctccattatctccaaatgaatcttaaacatgtaaagacctgaaaaggactagaaaagactctacaaataacaaatagactctaaaacctatacctaaaacataactaaaaccggtaaaaatagggttatatcaataatgttcatatcaatgtggaatggtgtaaccaaaatggctccataaaatatctatttaagtatatcaacaaaggaccagacaaaattttctttattgttgagcctgttaagcagactacaggtggggagtccaaaactcctgggcaagaacaaggttcaactgagaagaagaacgagataaagattggttcgattgcaagttaactaattactttgtaatttagttaataatttcttttggtataacattgaatcactaattcatgtcaaccagcataaattatttgcagatacgtttcagcatccgaaactatttggaggatatttaaatatccaattcaacatagatcaactcctgtttagaaattatcttctcatttagaagcaaaacaaccagcttattttgatctacatgctaatattgaagatgttctagaacgattagctaatgaagactctcagtttatggcttgtttcactttgaatagaaaaaatgcagttggaaggaatggtaagcgtgccagatattgtttatatgctcaaattcctgcctatttcacatgggatgaagaaaataaggcgtttaaaaagagatccaattgtttttctttgggtcgtattcactatattccaaggaaaatggaagatgaatactttcttagagttctgctaaacattgcatgctacaagaaaacagacattttacgatagatatttgcaaaagaaaagtttcctcgcaaatttgcaacaatattgcaagtatattgctaggcactccgccactatcgtaaaattgtcgcaaatttgcaatggacacggtcgtcgcaaatttgcgatgaaccttcgtgaaatggcaatgaatttgcaaagaacgcctgttctttgcagctccgtagcaaatttgcaacgaacttacgacgaatgttttcatagcatgacttacgacggaattgcaggaatagttaggtacgcacgttttaaataaaaattagtaggtgggtggcaggtagattggtaggtgaaatccctcgcaaatttcatgcaattccttcgcaatattttttgtttttcccctataaatacaatacgttagttgacggaaaatcacaactcaaacaaacacaaacacaaagaaaaaatataaaaacaaacacaaaaaaaaaaaaaatgtttggaagcggtggagaacatgatatatattcactccgacagtggatgtataatcatagagattcagttaccggtgatgtcacgaaggagtttaccgatggattgcgcgggttcatgtaccaagcaacaaatgaatcatttgctcgtgcaaatggttcaatattctgcccatgtcgtaagtgtctcaacgataaatatttggaatttaatctagtgaagaagcatctatataatagaggatttatgccgaactattatttatggttgcgtcatggggaaggttgtagagatagtgcgggcagtagtaatatgaattatggtgttgttgaacctactgattattatgaaaattatggtcatcatcaagaatctgatcaagggtataaccatgaaaatagatttcatgatatggttacagatgcatttcatgaaactactgctgcatttcatgaaaatattatcgaagaacccaacgtagatgcacaacgcttttatgatatgttagatgctgctaatcaacctatctacgagggatgtagagaagggcaatctaagttatctttggcatctaggatgatgacaattaaagctgataataacttaagtgaaaattgcatggattcttgggctgaacttattaaagaatatttaccagcagataatatatcggctgagagttactatgaaatacagaagttggtttcaagtcttgggttaccatcagaaatgattgatgtatgcattgactattgcatgattttctggaaagatgatgaaacctgcaggaatgtcggttttgcgagaagccgagatatcagcctactggtggaaggacgcgagtaccatataaacgtatgtggtacttgccaataacagatagactgaaacgcttataccaatcagaaagaactgcagcaaaaatgagatggcatgctgaacattcaacagtaaatggtgaagttactcacccatctgatgcaaaggcgtggaaacactttcaaacggtatatcctgactttgctagcgagtgtagaaatgtgtatcttggcttatgtacagatggatttagtccatttggtatgtctgggaggcaatattctttatggccggttattgtgacaccatacaatcttcctccaaatatgtgtatgcaaagcgaatttctgttcttaagtattctagtgccaggcccgaagcatccgaagcgagcactcgatgttttcttgcaaccgttgattcatgagctgaagaatttgtggtacgaaggtgtccagacgtttgattactcgagcaagcagaatttcaatatgcgagcaatgctaatgtggacgattagtgactttcctgcatatggaatgttatctgggtggacaacacatggaagattatcgtgtccatattgtatggatcggactgacgcgtttcagctaaagcatgggcggaaatcatgttggtttgattgtcatcgtcggtttctttccatgcatcatccgtatcggaagaacaaaaaattatttaggaagaataaagttgtgcgtcttcccccaccagtttatctttctggaaatgatttgtttgaaaatattgattattatggtgctcaggaaacatgtaaacgtgggggtaactggcacactccggcgaatatgccagacggatatggaagtgcccacaattggcacaaacagagtatcttttggcaactcccatattggaaagatctcctcttgcgccataaccttgatgtgatgcacatcgagaaaaatttcttcgataattttatgcatacgcttctgaatgtgcagggaaaaactaaagatagtatgaaatcaaggttggatttggcggagatatgcaacagacctgacttgcatataacacgagatggaaaattaccggttccgaagtttcgattgactacagagggaaaaaaagcgttgttcgaatgggttaaagctgaagtgaagttcccagatggatatgtgtcaaaattttctagatgtgtagagcaaggccaaaagttctcgggtataaaaagccatgattgtcatgtcttcatgcaacggttacttccatttgtatttcttgagctgttgccggcaaatgttcatgacgccattgcaggtctgataatttaattactcagtacttttattatacgtatattaaccaataattaggttaacaattataaattctatttgtaggcataggggcatttttcagggacctctgcacaagaacattaacaaccgacggcatacaacagttagacgagaatatcccggtgttgctttgtaatttggagaaagtctttccgcctgctttttttgacgtgatggaacatttaccgattcatctaccacatgaagcagctctaggaggaccagtgcaatttcgatggatgtatccttttgagcggttcatgaaaactctaaaaggaaaggccaagaatcttgctagagtcgagggatcaatagttgccggaagtttaacagaagaaacaagccactttacatcgtattactttagtcctaccgtgagaacaaagaaaacccgtccaagacgatatgatgatggaggcgttgcaccttcatataatgttcctgatgtcccagatattttttcccagataggaagacttgcgggaaagttgaaggaagtttggtgggaagaccatacctatttacgagccgcacacaattatatcttgcggaatttagattacattcaaccgctcgaaaggtatatatgctttcttaaattttaaattctaattaagttattttttctatttattaattatggaaactagctaataaacttttttttataggatatttgatacccagattcgtgaagcatatcctgatttagaagaaaaagattatgaaacttataaagaccgggattttgctggatggttaaaatattatgtaagtattttatatactcagttacaataatacttatacacatatcgacttaaacattatgatatgtgcgtataggttgaaaatggatgtggaaatgaacccttacctctttggttacatgagcttgttcaagaaccaagaggaaagataaccactgctccgatgtatttcactcgtggatatacatttcatacgtattctcatggaagtcaaagagctacagcaaattacggaatctatgttccagcgggtgatagcgatttttatggcgttttacaacaaattatagaagttgaatatccaggactcctgaatttaaagtgcatacttttcaagtgtgattggtacgatccaataatatggcggggtgtccgagtaaataacttgggagttgtcgatattaatgcgaacagaagatatgggaaatttgaaccttatgtcttagcatcacaagcagagcaagtgagttttcttccatatcctcgtttacgtgtaagacgtgaaatgtggttatcagttgtcaaagttaatccgagaggtcgtataatcggggtaattgatgatctcgtgatgcaacaagaaagagtcggggaagtttccattccaaacatttcaaccgaagatgtttcccatatagatccacaaaatagacaacttgaacaggtccaagatgtctctgacgaagaggttgacataaacgaattcgaagaatctgattacggagaagattctaatgacggagattctaatgaggatgaaaattctcatgaagaagattatgaatccgattgaattgtattactaaggccaatattatataatttaagtaaaattatttgcttcttgacaaaaaaaaaattaaaacacaagaaaattttcttgcaagggttttgcgacggaatagtagaattaataagttggttaagtaaaccatagcatttccgtcgcaaagtcaacgatcgaattgcgaggaaataaatatatatatatacagcagacctagtttgagctctgctcaaaccctattcgcagccgtttcatccagaaaccctaatctctccttctctcccccgcgtcttcccttctcttctccggcgaatccaaacgcttctccggtggatccaatctcttctcccctcctttatcatcgaaaccctggttctctcctccttgctcaaacccaaatcgcagccctaatctcttcttctcttctccgcgtcttcccttctcttctccggcgaatccaaacgcttctccggtggatccaatctcttctcccctcctttatcatcgaaaccctagttctctcctccttgctcaaacccaaatcgcagccgtttcctaacgaaaccctaatctctccttctcttctccgacgaatcccttctattctccagcgaatccaaacgctttcaacatagatctgaggtttctccactcaatcgacgtttttctcaacccaatcgaaagatttgaaaggttataacttcttcggttcaaatccttcttctttggtttataggttcttgtctgaatgtgtatttcgatttgttgttttctttgtctaatccgatttatgttttcgttgaagatgtttgggggaaacgattatacccgatggctctctcagacaagtggttcaaatcctgtgggtggtgatgctacttctccaggtaacacatcggcggtccaagataatcgccaagcccactctcgccattcctgtcgtcactccggttcgcctgctatgtccaccggttcgcctggtatgtccaccggttcgcctgctcaatccaccggttcacctgccatatccaccggttcaccagttcttttcagtggttctccgtcgtcaccagccacaggatctccttctacaccagccagtggttcacattgttcaccggccaatcaaacgtctcagccaccatcttcacggctcaacaatctaaccttggatgagttactcgttagtcctggtcgtgagcatttaaaaaaactgcatccaaagcgtcctccaggcactctttggtaagatgttaacttctatttttagtaactgcagtttagttaagtttgttgaatgcttggtcagatgttagttttgtctgtctctgtcagtaaatgattgttatgtttgtttgttaaatgcttgctaaactcaatgttacaactagggctgtaaaatattattgtagatgtaaagctataaatactcatcttattgttttgagaaaggtagtcgtttttgtataagttgataaatactcatcttatactcatcttacttatcttacttagaatactcatcttatactcatcttacttagaatactaaaacacttagaatgctcaagtttctctaaccttcaattaaagctgtgaacctcaacaacttttatatgctaattgtattgttgatttctttctaggtttggtgaagatggggaagtggctgccacagttcgcagcatttttgaaaaagatttcaaagagcctcatgccaattggacacagacccctagtaaagtgatagacagatggtttgaaacctttgcggtaagtcactagtcacttgtgtcttttctctttgtcttgctttgacacagtctaagtaattttctttttttttaagcaaacatacaactgggacagatctataaatgcaagagttagaagtgagtttgatagcaagctgaagtctaggatgtgtgatcaagtgtgtcgctggaagggaaagtggagggaaataggtgatgatgcaaagccgaagtggatagatcctgaggtatgggctgcacttgttaagttttggctcgatcccaaatcagaagcaaagagtatcaacagtcgtaaagcgaggtatcatgatcctgatggtaccggcatatctaaacaccgctcagggcaaacatcttttaaagctcgtgcccggaaacatgtaagttgtttcagttactttttcagacaatgaacttatgtccactaatgttgactgattaatgaactctcttttgcagtctgaaaaaaccggtgaactaactcctgatttccttcaagtcctagaggagactcatagaaagcctgatggttcttttactgatggaaagtcggagtccatatacaaggaagtctcatcaaggatacaagagctggaatctgagctttgtgctggggagaatgagagtagtgggtctggtgggctgtcgattcatacaaagaacaagatctacacagaggtaaaatttaaagttaagattatggctgttctttgagtctttgttgtctggctggaataactattgttgctgttctttgagtcttgttttgtttctggaaaaacagcttgagctttgagtcttgttgtgtctgaaaatagttgtaagtagttgtgttcttctgtctcgcatatagagattgttagtgctagttgtgtctgaaaaacagttggtctttgagtctttgttgtttctgaaaactagtgtaagtacctgtgttgacctgacttgcatatatagattgttattgctagttagttcacagatttttattgcccttattatttaattgtctgattttgatgatgatgatgcaaatagttaggatgtatgcttagcagtttacttgttgtaatgctccatcgatttaaagattgttagttttgaatcaaagcttacacatggattgttttgttggcaggttgctccgagaaagaaaaatagaatttatggtgttggttctttgcagcaagaagcagcctctgcccatagcggtcctcctcctccagctgaagatcctgttcttcttgcggagaagcttgcacacgctgaagcagctcttcaagctcaggcgacacaactacaaaagagtgccgagaagatgcaccaagtctttgagtaccttgccaagaaagatcctgtgtttgctgcaatgttagagtctgaaaacgagtcaacggccaccaacacagaagcaaaccgagttagcactcctcagactacaccggtgacacctttgacgggagaaaacatgggagacaaccccggtaatggtaccgcaaccgcaaccgcctctttatctaagtccttttaaacaatgtcactctttcttaacttgtttccttgtaaccaactttctaagacttttgaatttcagtttttgtatccaacatttgaattttcaatttcaatttcaattccagttcaatttcttctcagcttttgaattgttttctcagcaaaatcaaattaccaaataagagaaacagactgtaacagttcagcttggccttgcatattcgtcgcaaacacatgctacgagattacaatagaaaacaaaaacctagcaaatgcctcgcaatatttgcgacggacgtacgacacaaaattagcaatgacattgcaagtaatatattcgtcgcaaaatacaaggcgtttgcgacgaaacaccggtctactgttcatgaatttgcaacaaaagcaatgtcgcaaatgcctcgcaatatttgcgacggatgtacgacacaataattagcaatgctattgcaagtaatatgttcgtcgcaaaatacgaggcgtttgcgacgaatattcttccttgcacagtttgcgacgaaaacttttcgtcgcaagcgtagcgacggattagcaacgtatcccgatttgcgagaagcgtattgcgatgaatagtatattgttgcaattcccttgcgaatgaccttttgcgagggattacctacatattcttccattgcaaaacggttgttttcttgtagtgattatcctaaaacaccaatcatgtcgttgtagtattttaggttgtcaatccaaatgggtgtgatgctaacaatcaagacgcaatcagagttcagagagtcaagccaagcaataacaggttttggtgtgttctagcagtcctaagtgaacatgcaaaaaacagaaaatcaagtagaaacaataaaacactcgaccaacacagctcgttgcagaacactgggtgtggtcgagtaacaagccgtaaaggaaacaaagacactagactgcacagtctgttgccaaacaactaggtggtcgagtatcaggtcgtgtaacaggaaagaaatgcaaattctaagcaacaggtaacaagatgaagtaaacaacagaagagtaaacaaagaaatcaatcagataaggcattcccgaggatgggataattgagtagtttcgtttcctcagtttacaagtgattgacatgctcaacaaattatccctagacaacaagttcggtaaccaaatctaagtgccaccgcaacagagaccctcaagttaaactagtcccagactcaatcaccattgacgagacctaacctaacaggcattacgaatcaacaagttaaagccaaaacgctccctgcaaccaataccttggtacagggtcacgaatctctggaattagtggttcaggcatttcatcgaacaccttttgggcgcggaaatgtctgggctcaaattccagttgatcagaaagcaataggcattaagaacaactaatccagaagggatctatcaatcaatactcaatcacctagcatactgagaattctacactactctaacccatcctcagaaacctattcactactcagacatcatgacagaaagcataaacgttgaacaggttgaagacatgataacagcagtatgataacagaatgaataacagtaaacgaaaatcaagaacagaaactgaatattgaatactgaatagataaagagaaatccggattacaaaaagtctagaacacaaggtctgcggaaataaaaactaggtaaaaaaaactctcttgcgaaaatgagaagtacatgctacttatagccaaatatcccgaaaccctaatactcaaaacgacgaagtatttggacgggttaagaactgtactcgaccaacgtggtcgagtgagagctcgagtgaatagctagagtcttcttttcttccttgtgctcgagtgtctggttgagtgcggaatgaagaaggctctgaagcttgtcatcgagtatgcagtcgagtggtgtgatggagatactcgacctctaggtagagtgaggaggtcgagtggttgtctgatgatggaggtgaagagactcgacctcaaggtcgagtgaagtgatcgagtgaccgtctggtgatggagatgatggcactcgacctcggggtcgagtggtgaggtgaagtggtgatgtgctctactcgacctggttgtcgagtggtctcttgagatcttgaagctcctactcgacctctgggtcgagtggtttgtcatgatcaggtctgcttcttccagatagctcgtcaacagctccaaatcacctgaaatcaacgcaaatatgcaacatgcatgcaaaactatcctaaacatgcaaagtgatgacaaatgatgtgaaatggtataaaacagtgatgatatgatgctaaagtgatgacaaatggatgctcaaaacatgcaaaatacacacttatcaactcccccaaacttagtctttgcttgccctcaagcaaacaatcaagaacaagctggaggtgaggtttgaaagcggggactcagagcgaaaacactagataaaccagatgaaatcaatgtccaagttgaaagttctaagctgcaagatcgaattctacttaaaaacgttagccatgcctcattaatcaatcaatccgactcatatgctcgacctacataagttttcaaatccaccaatccctttaacattcattagttctggaacgtgaatcaagcaatgcatcatcaaagaactcatttggctaaggtaaaaggtcaagagacaaagatggtcccttacagaataggctttagtaacaggggatctctcaaaaaaaatgattaagttttagtagaatgctaaaggtaagtcccaagctatgcatacagagataagatcccatctacccagagtacatcaaatgaagctctaatggtaatcccatctccaatcccaatacaagaactaaactctaccctttgcattcatgaatcttttaaaccctttttctaatcattcttttcttttctcttaactctaggcgaagcttcaacactttgatatatctagcggatttggatttctttaacaactaaggttcctgtttttatcattttaaaaccaagggcttttgcccatcttcaatagctaacaagaactctttcttttctttacaaatcccaaaacctttactagactttttctgcttctttagcttacttcacctagagtcctctaccttttctcatcaatgaatcaacccccttttttttcttttaaacacatcccaacccaaagtataagcactcacctagtcctatctagtccaaaaaatacgaactagaactacatgagacgctatctctgtcgttacgaacctaacactttctaccaagcttaatcggaataaaacctcacaaacactcacaagtgatatagggcttgaaagaaagtctaggtttgggtttgggttaactgctctaacaaggagagtcagctacttggattaacaagagcgatcaaaataaataagaaaatccaagtattttagggtatccatgagttcaaatttgatgcagacatgataattaaagatcagattcatgttcaaattgatagagaatggtatcaaattgattataggttttttaagtcaattatcctaaaacaccaatcatatcgttgtagtattttaggttgtcaatccaaatgggtgtgatgctaacaatcaagatgtgatcagaagtcactaagtcaagccaagcaataacaggttttggtgtgttctagtagtcctaagtgaacatgcataaaacagacaatcaaacagaaacaacgaaacactcaacacagctctatgtagagcactggatgaggtcgagtgacaggtcgagtaacaggcagaaagtgaaacagggatactcgactgcatagtctgttgccagacaactgggtggtcgagtatcaggttgagtaacaggaaagaattgcagaaactatgcaacagataacaagatgcagtaaacaacagtagagtaaacaaagaattcaatcagataaagaattcccgaggatggggtaatcgagtagtttcgttttctcagtttacaggtgattgacatgctcaataaattaaccctagacaacaagttcattaaccaaatctaagtgccaccgcaacagagactctcaagttaacctagtcccagactcaatcaccattgacgagagctaacctaacaggcattacgaatcaacaagttaaagccaaaacgctccctgcaaccaataccttggtacagggtcacgaatccctggaattagtggttcagacatttcatcgaacaccttttgggcgcggaaatgtctgtgctcaaattccagttgatcagaaaccaataggcattaagaacaactaatccagaagggatctatcaatcaaactcaaccacctagcatactgagaattctatactactctaacccattctcagaaacctattcactattgagacatcattgtggaaagcataaaggttgaatggattgaaaacatgataacaacagagtaatagcaaaatgataacaggatgaacaactgtaaacgaaatcaagaacaaatactgaatactaaatagataaagggaaattaggattacaaaaggtctagaacacagtgtctgcggaataaaactagataaaaatttgttctcgaaaatgtaaagtacatgctacttatatcaaaatattctgaaaccctaatactcaaaactactcaatattgtgatggattaagaactgtactctacccatgttgtcgagtgagatgtcgagtgaatagatggagtcttcttttcttccttgtgctcgagtgtctagttgagtgcggaatggagaagactctgaagctcgacatcgagtatgtagtcgagtgctggtgatggtgatactcgacttccaggtagagtggtgtgatcgagtgatggtcaggtggtggagctgaagacactcaacctgggggtcgagtgaagtgatcgagtatcaatcgtggtggtactcggccagggggtcgagtgatgagatgaaatcgtgaagtcccatactcgaccagggggtcgagtggtctattgaggtcttgaagcttctactcgaccttggggtcgagtggtttgacttgattaggtctgcttcttccagttagctcgtcaacaactccaaatcacctgaaatcaacacaaatatgcagcatgcatgcaaaactatcctaaacatgcaaagtcctgacaaatgatgagaaatggtataaaacaaaaatgatatgatgctaaaataatgacaaatgga

SEQ ID NO: 37825 - DNA, 6130 bp, Arabidopsis thaliana landsberg
ataccaaaagatcaaatcaagttcaataatttatgcatccactgataagattcaaacccagaagaagtatgagataaaaagctcaaacctgcctacgcatcaaatagttaataccaaaagcgagatcagcaataggccatttgcctagagtctctgaatacgtaaaccgtaacgtctctgacaaagttgaaatagtctcaagccaagtcgccggtgcttgagccggtctcctaacaatcctcctccttccagatctccctgatttacccaattcacctcctgaatcatcttctccatttctcgcccacacgatccgacggctcagtaagtacagaatcaccactgctcccgtggccgttaccattacacccgccgccatctccgatcctcttcctctttattcagaaatcgattcaaaaatccaatttcactcctcagccgaatctagaaaacgtaacacgattcagcgattcgaaagcaaggacgaagatgtcttcacgaatttcgaaactaatcatcagagatcctcataaatgaatgaatcgaagctccaatttctccaaggagttcaaggcgatttgtgaattccccgggaacgttgcgagaaggacagcgagaatcggtatgatatcaatgtatcatgatttttttggactttttaaggtttaaaattactaatagggacatgttctggtcggcatgtactgaggtgaatgaagggtattatcgacgttctttacataagtaggtaaccatttacggttcagttaggagggaagacgaacgttgggaataatatatacgtaaagcaatccaatgatattaacactctaatcaggattagtacactaatcattttattcatgtaacctaaatagttagctccacgagccaataatataatcgaatttatggtggaagataaacacgatcaaacacgatggcttttgagtacgcaacggtgtttcttgtttaatgtattaacaaaaatatccattgctttcacgactttacttcacatttatataaaacaactagccaataacaacaaaatgaagaacttaaatctattaatgtatctatatgttcttgagtccacgaccacgaccagtgcgttgttaaacaaaaatagaacctcataattttcttttccatgtaagataacatatagtttaaccacgaataataaatttgagtacacacagcataatcttgcataactagtgaaggacatgtaactagagtctagagagacattggggggatccagtaagggaggactatttgttccgaggaggaacttggtgtagacttgggtgtgaaggaacgtggggatctagtggcgatatcataaacaccgtagccttcaccatagccttcaccgaggaaatagatggaattagggtttagtcccgggaatgagctggccttgacacaaaaaggctcgttgttgccgaggaatatgcagagatcaccaatgtcttctgtgtaacacatgttcatgtcttcctcttctctaaacaccatgaaccgctttgtgccgccacaattgaatactaacgacttgttcgcagggctttcaacgtacctaccaagcagagccaaaaagaaagaacatgttataacatgaaaccgcaaaagcaaacagacaaccctaacatgaaacctcgtaccacttgattaggaaacgttggcctgagggagactccacaaggtatacagtcttggaacatgagtccaagagctcccactcggactgggtcaacttaggaacgttgcaaaaccgcaactcaaccaactcagagccggtcatatcctcttcgaagaaagaatcccaaaaaaccaagaagtgccctccaaaactaggagtgtagaacttttcatctctctttgaatacataacctttgattgatcaaaatattgaaaaggggttttaaagatgaccgaacccgagtccttgtgtgtgccaccaggcctattgaaattgatcataggtcctaaacacttgacagcaactgcaaaatctttgctttgatcaggtgaacaagtcattgcggcgttagtgatagcttgttgttggatagctataggtttaccaaggggatgcaaaggaatgcttttgacagatttggagccacatggattgtagtagtcagtaacatatatggctttatattcattataatcacacacggccttgaaaactccccaaccatgggacattccgaccagacaccctttacgcaactccattggtaataccttgtctcggacaataacttcatcttccttcaccgggtcaaaatagtggatattacttgttacatgaatatcatccatagaacttccatagtttatgacacgatacaacaagtaagggttggtggtagagaaggaaaacatccgaagagtgtggcatctctggtgaaaagtaagaaatagacatcagaagaagaagacgaaggaaacagagattatatacaaaaactagaagagatttaccagaggaagtttacggagagaggccttggaagagaggcttagaagcagagacgacatagcttttgctttgatatgtgaaaaaatcaaaaagaaacaaaagggttttcacataggtcatcaaaggaaaagtaaagaaaaaataattggtgcaaagtaaagaatcttgtgcacaaatttgataacaaagatatttcgtttccattttcataagattatataataagggaaaaaggaaatgtggagaaacgtggaaacaaagataaaaacgagagagacattattcttgtggccaggcactttggtcttagatcgagtcaagaagggactttcttggttgactaactcgaaaaccctttctttatttctttttgattcttcactatcaacgcaaagctatgtcgtctctgcttctcagattctcttccaagtcctctctccacaaacttgctctcgtaaatctcttcaatctctctctgtttctagtttttatataatctctgttttattcttcctcttcttctaatgtctacttctttactcatcccacagagatgtaacacctttaggatgttctcctcctcaaccaccaacccttttttgctgcatcatgccatcccttgtggtgaagaagcccaaagaacagagttcctcatgttggacccggccaaagaggattatttcaccaccgttgataagccacttcccaaaaatttgattaagtctaagctagtgggaagttcccatggatggggtgtttatctcagctcccctgattacatactaatcagcaactatccctcgagctctaaatcaaatcccaagatcattgatctgcctcctcgtcctagtctaaatggttctcaaactgaattggtaagtggtgtggcaatgtcctcttctcctgaagaggaagaatgcattattgctgtcaaatacatgggacgtccggtgagtatatatacgcctggtcaagacagtcaggggttcctccttgctatgtccactagattattcgattattttgagcaatctaagttgatgtattccaagagagatcaaaggttctacatgccaagttctggtggccaccacttgtggtcttgggttggtctcccatccaccacgcctcagtaccatgagttaaagtttcataaccttcctcagttttcgcattccgagttgcagcttttcgattcttgttacagggcacacgagcttgtggagtctccttcaggacaacgtttcttactcaaattttactaggtttcatgttagggttgtctgttggcttgggcggattcatgttataagcatgttctttctttttggctctgctaggcagggacgaacaaagccctgcgaacaaggcgttagtatccacatgaggcggcacatagcggctcatggtctttagagaggaggaagacatgaacatgtgttacactgaggacattggagatctctgcatattcctcggcagaagtgagcccttctgtgtcaaggcaagctcattccctggcttaaaccctaactccatctattttgcaggcgatggctttggtgtttacgatatcgccactagaaaaccacgttcctttcgtcccaagtctccctcagccttctccacaacaccactcttcccttactggatccctccaatgcctctctagttactatgcaaacttcattagttattctcttcttgtattttagttggtggatccaatatagaatccagtttcttgtttcactttgtgttatgtaaactcgaaagaaactaatgaagacatgttcacaagccacacactgacacaagatgagaaaagaagaagttcacaagcagttacgtctcacacactgaagataaagtcaattaacaaatgggatttagtatcttttcatattttatttcgttaattggctgttttcaacgtaatacatatggtcagattgtattactaagaaaataaatagaaaatggagagaaaaatgaagaaaaggtttttcattacatgggtttaatataaagtacaagtagacgtgttcgttgaagcaaatgcttaagaatatatatttagtgtgattttatttctgttcactttctaaaagaggatgaagcgtgaagccattcctggattgcagatcgaagagcaagatttggaactaactttgtatgatgaagcttcgtgtttgtcattggggaagtctcatgtcctccctgaagccatgtacttatggcttctgcttcatatgtaaatccatctgctgctagttgtggatccttcatcacttcctgaaacattgaaaacaaaggttttaatttgtgaactgattcgataaaatcttctgtttctctccatattgacttttttatttaccagtgaaatgggacagatgaagtactgaggagcttcacggtgctcatcagatcgagagacctcttttcttagctcctctacttctataattgctatgtcgcgtcctttaatcaataaatctcgttcttccttggcttttctcaacactttcgttgccaagttatacttgtcttgcaacttttgtaccaacatataagactcggttattcggttctcagatatatacctcatcttttcgagtttttctctcactttcttcagctccatctctgtttctttcctttgtttcaactcctccaaataggcactttcccattctttaccctacatttggtcagaaaacttcgttatcatcaggaaaaaaggacaacattcccaatgggcaatggcaatagcttatgtgagattccaagaagatgttacccttttgattgcttcatttttctcttttacaacttcttgatgcttgaaagcctccaagcttgcttcttttttcgatttctcagcttcaaagacagctaactgatacacatttccatttcctctagatatcgcgaattggcgcgaaggtataacagatcctcgtgaacggactgaatcttgaccagaacttgtagatgcatactctagagaggtgttgcccatgatagcttccctgcattataccatcaccagatatattagagcttgtgacatgtgattgttctcacaatctcagttcctgttaaaactcacaagagtgtgacaaaacacaaatatcatttaaaaaaaaacttctgaagtagtatttacagttgtacagagattacagggactaggggtagaccttttatataccaggtatcctttgcaagtaaaccatatacaacaagtagcaggcgcttcttgacgaatgtaaatggctttcgtggacaacagatctgccatcctcctacaaattaagattaatgatgagtccatcggtgaaataacaagaactatgagaagatgaaaatccaaaactatttagttatgccggtgtgctttgtacattgaatagcgtgtgtctgacgcagctcccatgacgagcttcttgacattgcgctctgagatcaattggatgatccctttctctaccgactccattttaatgtgtatcatctcagcacagacctagaatatcacaatcggctctctttatctcttgtatcatcaaatcacttattcgcaatagaagtaacaaaaacatacctgcatttgcctgcatttt

SEQ ID NO: 37826 - DNA, 1699 bp, Arabidopsis thaliana landsberg
aacaaagacgaagaattctacagataacctagcaaaatgggcattctactaaaccatatgaatccctaatgagtaaccttatttcttacaagcacactactcagacatatttattgaagcaaacaacatatttgagtatgaaagcataaaaacagcaaatataaaagggaaaagaagggatctcttcactgtattaagaactgtatgaatctctgaaaacaatcgatgaatagcttatgattctcagtaacagggtttgcaaaaaacttgatgataaaaactggataatgaaaacttaggtctaaacaatatatataaaccctaaaaacgtccagggactaataatgcaaatagggaagttttctggggcaaatttcctcttctgtaaactcgaaagcatctaggacttttgctgggccgaaaccggtgtcgatcgacatacctcgttgattcctggatccaaaatcgtccttagcttccttttccttagctcttgctccaaaatgtctccttatctccattgttgtcccactgcatagagtacctgaaaagacactaaaaggacttgagaaataacataaagactcaaaatcttatacctaaaacatagataaaatcagtgaaaatcgggttatatcaactcccccagacttagcttttgcttgccctgaagcaaaacacaaaagcaaaacccgtggaagagattttttaaacaaaggaactcccaacattctctagcctattgccatgatcatccaaactaattccatatgcttaacaagtctaatcaaatcctaaccaacatgtacttctccgcaagcttacacaatattctagattccatacctaagttccacaactatatccaccaggctttcatcgttggatctcatcaaacaagccaacattcaagatctttctagactcattcctgtactataccatgatcgattgactattctttatatattattttcttttttcggtattctttctctccctagacttattttttttgaagagtaaacaaaggagtactcgcattacttgattgacaccctcggcatttttccaacatttgcaattgttcattcctaataatgtataataatggggtcataggaaacattcctacccctatacactatatgaaaatcttgtcaatctctcatttctatttatttttataaggggagaggaacacattctttttatcacattggtctcaatatcaggtatgaacaaggagtcaagatctatgaatactaactgtttgaagaggtaaaaggaagagcagtgagattagctccagccttaatggattgtgttggaaaccaggatatcctcaagtttattggtttgccatctggattttctaataattggattgagtcgaatctgcagcattaatcaaccaggcaataatctaaagaatagagatcataattcctaactaaattttaactcaaaaaacgactaaaaaaaaggaaaataagagtaaagataagactcaagaaagaaaaacgtagttagtaactgccttcccagacttaaacgtcactgtctccagtgtcattcaaatctaaagttagcgagaaaaattaaagaaaaacgtaaactaaaagaaaaataacaagaaaatcatactactgggttgccttccactaagtgcttatttttcagtcattagttgggtcaa

SEQ ID NO: 37827 - DNA, 3095 bp, Arabidopsis thaliana landsberg
aaactttgagaagcagggagaaacttttttagttttttggagctaaatatgacttgatgtcatgtgtatgattacatataagacttagaactgcaacctgatcttaaaagcctaagtagtgtttccttgttagaagatacaaaaccaacgattcatacagacttcagctacacaatctaagctttgagaagcaagaagaatcttggttagtgttttgaatcaaagagaacttcagcaacggcgccaaatttaattgagtcaaattacccctattgagtactctctcaaataaagagattattatggcacatagggatcaaatttgccaaagttctcacatcacataatagactaacagttttgaatgaagcaaaatataaaatattataaaaataaaagacaagaaagcaactaaaattggttgtagattcaaatgattaaaacgtcgggtttagagaaattcacagaaaatatcagaatagtaaatttagcaataaattaggattattatcgaaccattctagaactcaaatcacaattgcaaaggtaacctacgctagtgcgcattaactaattatgcttaatagtattgatcccaactctcttgtaaatccctagaactaagcaagcattataatcaggtttgataagttcacctaagtaatgaacgctagcatgcatctaaatactaggctcatctaaaatagttccagtaatagatacctatggtgggtatacctattatcctaaaatcaagttctagctacttactctagaactaattagaactagcattaagaataatcaaagatgaagaattctaaatatattatcctaacagggttttcgatatactaattcatccaaatccctaatgagaatccctaaacccaataagagaactactcaagcatgatcatagaagaacaaaaaatgattgaataagaaatcaataatgaaattaagaaaagaaaagagtttagaagaatcttctctaaaaggagtctccacagggttttgctctcaaatacagaatagataataagatttaggtctaaaacaatgaccataaaaatcaatacataagtcttaaaaacgtgttgagccttcattagaaataggagaaagttctgggccgaatttgtaaatcttcaaaacatcaataagttgcgcaattgaattgccgtcaggtattggtgtcactcgacatcaggggttgtgtcgatcgacacctacgtcaatttttgtctccggattgctgctgcagcttaaattgtctgttttgctccagaatgctccataatctccaaatgcatcccaaacatgtaaagacctgaaaaagactagaaaagactctacaaataacgaaaggactttaaaagctatacctaaatcataccaaaaatcggtaaaaatcgaggtatatcagatgtggcacatattaatcaaactcacaactctctttcgtatcgggattcggttatgccacttgctttgctttctcatttctttatctcctctcaatgttagccttaatactatgtaatcgtcaactacgacatattgaaaacaaaacctaaccaacacacaatacttgaacttgagaatatattaattcaccaaaaccttgcacgattattatagttattcgcataaatgtctaaaactattatatgtgaagcaatttacccatacaccaaacccttcttactatcctaagcattctccttcaaacgcatatgtgaccctctccatatgtagttcgttcttgggctaatttgttcattggtatggtaatcttttccaacgtctaatcttcttccatgccgttaacaccctcaatctttgaaagctcattatcctttttctcctcctctgccttgacacatattacaagcactaagcacaagcacctatcaaaaatgtagaaatatggttcgctaattaaatccaaactcacaaattattttttcctagtgagatagaaagctcttcagaagaaccataacatgtagaaataaatactactaataaaaagaagctcattgaggccacatcaacaaataagaggattttaaaatcatgacacatcaacaaatttaaaattatgacttaattgtgtcttagaacttaaataacaaactaaataataaatgatgtatctaataaatggaatatatgttagatcctgctctctattctgttgggttgttgctggttgagccttcggtttcgttcttcttcgggatctcctgtcctttggagtttgcatgcttggttggttcttcttgtggctcatgtttcttggtttcggcccgacgccaactgttactttgggattggttgtaggttttgatgttttgagtttcagatttagatcttaagttccttttaagcttaccttcttgtacttttatgcttatagtttgcttccctcttttgggcttaggtttccggggatattgatgtattcctccgccttagtttctgacagagtttcgactcttgtcgttgttgtatttcaaaaatgtattctactttcgtataatataatggaatcattcagtcgaaaaaaaaaaaaaaaaaaaacgatttagccgcatgtttgacctattttgcccacatatttctaataattgttgtcactttaaaaaccttaaaaattaattttttgtgatggtaagtggtacgtttaacaactatttttactatgcagttcttatataaacgatttagctataaaagatacaatgtagcagcggtttaggattatcactctacgaatcaacgtctcattactttttcataattccgaaatttcaaaattcataaatgtgcaattgatcactatattagttgaactgatcaagaagaaacgagagagtctctgaagaggccaaagtgtcgctaactgctgagctcatctattttgtcgggaatacgccgccgtacgtcatacactcaacctggtcttgtcccacgtagaacatttcacccacttctgcgtatctcatattaatagatattacgtagctttctttctttctatgaatatcatgattggagcaccaattatctttttgtgggccccattt

SEQ ID NO: 37828 - DNA, 5041 bp, Arabidopsis thaliana landsberg
agtagtaaaaacggagtcccccacttcccgcgaaaacctcagtctctctctctctctctctcgcaaccgcttctctgtaatcgttatgttttgataaaatcacaaaacaaacaaacaaacaaaaattaaaagagtgtaaatatgaaaattcaaataattctctacaaatttttctattaataacaaatgtctacgacggaaccgtcgcctgagaatgatcgggatccacaaccgaccaccatatctactccgacttccaccaatgcgaagcttctgaagaagatccctgcgattcctttccgccattcggataaggaaggagaagatgaacaagcgaagacggacgaggttactacggaattagctggggaaggtccgatgagtcacgattcgccggaaattcttgctccttcttccttaggtttgaatcatatcagaacgaaatcgtctcctgcgccgtctcctttgagattttcatctgccacgcctttgatatctccgggtcaagatgataaagacgtcgccaaggagaaaccgagggttggtgttgttgatgctcgtgctgatgctcgtgccagatggccgattcctccacatcaacccgatcaaggtagatttctcgttgattcgatttaggatttatgaattcgaaaattcaacttagatgatgatgattcagaggatcttaatgatcaggaggtgtttgttgttttgtcttttagggaaaaaagttcagtggagtcaatcaaaatctcaacgagtgcctgcaaattcaaatccaggggtagaggtgaatgtcttcttctatgtttgtttttcaaattcttggaaaattttatattgctgattcgttttttttgttgttcttgtgaatgcagagtactcatgtaggtcttgccaaggaaacacaatctccacgttttcaggcgatattgcgtgtcacaagtggaaggaagaagaaagctcatgacattaagagcttctctcatgaacttaattctaaaggtgtgcgaccttttcccgtgtggagatctcgcgcagttggtcacatggaggttagtgttggttgatgcttcttctcacctctgataagttctgctcatttggttgatgcaatctgtggaacgttttacaggagattatggcggcgatcagaacgaagtttgataagcaaaaggaagatgttgatgctgatttaggagtttttgctggctatttagtgacaactctagagagcacaccagaatctaacaaagaattaagagtgggtctagaggatttgttagttgaggctcggcaatgtgcaaccatgccagctagtgagttttggttgaaatgtgaaggtattgttcagaagcttgatgataaacgtcaggttctttccatgggaggactgaaacaggctcataatcgtcttcttttcattcttactcgttgcaataggcttgtgcaatttcgtaaagagagtggttatgttgaagaacacattctgggaatgcaccagctaagtgatcttggagtttatcctgaacagatggtggaaatctcgcgacaacaggaccttcttcgagagaaggaaatccaaaagataaatgaaaagcaaaatctagctggtaaacaagatgatcagaactcgaacagcggagctgatggagtggaagtaaatactgctagaagtactgattcaacttcgagcaattttcggatgtcatcttggaagaagcttccatctgctgccgagaaaaaccgtagtcttaataacactcccaaggctaagggggagagcaaaatccaaccaaaagtttatggtgatgaaaacgctgaaaacttgcatagcccgtcaggccagcctgcatctgcagacagaagtgctttgtggggtttctgggcggaccatcaatgtgtgacatacgataattctatgatttgtcgtatctgtgaagttgaaataccagttgtacatgtagaagagcactctcgaatatgcacaatcgctgatagatgtgacttgaagggaataaatgtaaacttaagacttgaaagagtagctgaaagtcttgagaaaattctggagtcatggacgccaaagagcagcgtaactccaagagcagttgctgatagcgcaagattatcaaattccagtagacaagaagatctggatgaaatctctcagagatgttcagatgacatgcttgattgcgttcctcgttcacagaatacattttctttggatgaactgaatatcttgaatgaaatgtctatgaccaatggaacaaaggactcgtcagcaggaagcttgacaccgccatcaccagcaacaccaaggaatagccaagtagatttgctactaagtggtcgaaaaacaatatcagagcttgagaattatcagcaggtaaatgtttacattctaataattcatgctgaaactctcaattacttctttctttatttcagctgagtattccacttctcctttacttttatcttgtgctttgtgttgacagataaataagttgcttgatattgctcgttcggtggcaaatgtgaatgtatgtggatacagttcactggacttcatgattgagcagttggatgagctcaagtacgtcattcaggataggaaggctgatgcccttgtggtagaaacgtttggaagacgaatcgagaagctactgcagtaatcatttttatcattttcacttgtcctgcgtttttctggtcagtactttttaaatgcaaaatttcattcatgctgatttattgttcctcaaatccagggagaagtacattgaactctgtggactgatagatgatgaaaaagtagactcatccaatgccatgccggatgaagaaagctcagcacatgaggagtcagtacgaagcttacgggcaagcccacttaatccacgtgctaaagatcgaacatcaataggagattttgacattataacacaccagttagccgtggtgcatgtctgcaagagtttttcttgcaaaaaagagagcaaccggtgatttgttcgccataaaggttggtattactaacattatatttttcagtttggctctttgaatttgttcttagcataactcgatcttttttaaaccattgtacaggttttaaagaaggctgatatgatccgtaagaatgctgttgaaagtattttagctgagcgtaacatccttatatcagttcgtaacccattcgtggtatgtaatgccggcaatgcataatttccttaatgaatacatttgtgaaaaactgtgatgcttctctaacgcttcctttagctgttcaggttcgttttttctattctttcacatgccgggaaaatctctatctggtcatggagtacttgaatggtggagatctcttttccttgttgagaaatcttggttgcttggacgaagacatggcccgcatttatattgctgaagtggtaaggccgttcacctcaagatttgctcaaatgtctttgtccggatcaaaacttaactgtccacatgatgaaaattgaatttaatcaaatgcattttcaggtgcttgctctggagtatctgcattctgtaaatatcattcacagagacttaaagccagacaatttgttgatcaatcaggatggtcacatcaaggtcaatattgtgttatgcatcttgaattgatagcgagactgctcttctcacaaaatctaacccttctaatacagttgacagatttcgggctttccaaggttggtcttatcaatagcacagatgacttatcaggtgaatcatcattgggaaacagtggatttttagcagaagatggatcaaaagctcaacattcacaaggcaaagatagtcgtaagaaacatgcagttgttggaacccctgattatctagcacctgaaatacttcttggaatgggtcatggttagtatctcatttgcctttcattccatgacatcatgcagttgtacatgggacttattatcactactcattacaggtaaaaccgctgattggtggtcagtaggtgttattctctttgaggttctcgttggtattcctcctttcaatgcagaaaccccacaggtatatattttcaagctgaaatcatcagatatcaaaagtaaacatcattctaatgccttaacattttctctcattcatgggtttgcagcaaatttttgaaaatataatcaacagagatataccatggccaaatgtgccagaggagatatcttatgaagcacatgatctgatcaacaagtaagatcccacactttctgcaaatgaatctcagaaacttcattgctttcccgcgttttctgtactttcgccatattagacgcttttcatcaatcaaagtgaaacaattacctgttgattgtggtaacattatctacttatgtccttgtttcaggctgctaactgaaaatcctgtccaaagactaggggctacgggagctggagaggtaaagctctagttagttcatcatatagctaactttatcaaatcctcggtctctaaaaaattccttccttacaggtgaaacaacatcattttttcaaagatattaactgggacacacttgctcggcaaaaggttcgtcccatattctgaacacaaattaacttccctttgaaaatcgatctcttactactaactttcaattttatctattgttacaggctatgtttgtaccatcagctgaaccacaagacactagttatttcatgagccgatatatatggaacccggaagacgaaaatgttcatggaggcagcgattttgatgaccttacagacacatgcagtagcagctcctttaatacacaggaagaagatgtatgactttactttctttaattccttttctcttgcaccaaatttagtgttatcatctgaacactctcataatcttaacaagtgtttatgttgtaaaacagggtgatcagtgtggtagcttagcacaatttggaaatggaccaaatcttgcagtgaagtattccttcagcaattattcgttcaaggtcagttatagttaatccccaagatt

SEQ ID NO: 37829 - DNA, 1413 bp, Arabidopsis thaliana landsberg
gaacaaaaagagaaggacattaaaatggtcatcggttttatgtgaggtagccttactcaccatggcaattttagaatgttgtgtccgtcgtagaaaaaacctaagcgttgtaatgcttaattatgaagaataagtgttgaatttgatatgatgaatgtatatgaatctaattacgaagactaagtgttgcgtagtagaaaaaacctatttatttgggttcatattcttgtcttaacaattacgaagacatataattgttactacaaaacaaaaaaacatcttcactagttgtttctatattttttttctaaaatatagcaactatataatagaggtgagtttcactctaatggttgtctcaattttttctatataaaaaaatatttcagattctttttattttagtattattatctttaatttacaaaagttgcaaattaatccatttactttaactcttacaaaactttcataaaaaattatcattgttttaattaaacatttattaaagaaaaaaagcattacatcatttaaaaataagaaaatattatagatttctttaaccattggcaatattatatttttctcacaaataatcaattagtgcattttaaagtgaaaaatcagcttctttatctttgacttctctaaatcaacttagaaactcttggaactggatatcaccatcttctgctatttggactgctgaaagtggatcttttatttcaacttcaatcagtgcatcgagatcacgctcatcctcgattatcatattacatggacacataagacaatgtgaaaagagacgtcaaaacagtgcttcaaatgatgatattgtaagtattatgataattgttgaacagttagggcctgttttatgataattgtactcctactcacaagagcataaacttgacaggaggagcatgatgtttgtaatctatcaaaattcatatatctttgtgatcataacatccgcaatgttccaagagtaattggtactatagtgtaaagacatgaatttttatttaggcaagattctcacatgagtcgatgataatatgcatcacattcagtcttgattgtacgatttatttaagggtggagcaagaattgatttatttaacgccaatagatcaattcacttttattctacgagtttaatcttgtttgttgaaatagtgcaaatatttttgataagttatccagttattagatatgcaaagatagcgtaccagtttaatgtgtcgaagcttattcatggagggatatggttgaaggccgcttgaattactttgcaatataagtctttgattcaatgttctattagtttagtttgtgtacgtaaattttgagtttgatgtctttgtctgttttgtatggacgttaaaccaatgatatgttgtttcgtat

SEQ ID NO: 37830 - DNA, 4299 bp, Arabidopsis thaliana landsberg
taaaatgactcaaaacatacgaaaaagactagaaagactctaaaaaccattctgaaactatgttagaaatcaataaaaaaaccaggacatatcaacttccccagagtaagcctttgcttgccctcaagtgataacactgtattttactcatttttggtgtgtgtttatcatcatttagctttgcatttgctcattgtatcatatcattttgcaccattttagcttattttgcacacttaggcatttaggatcatcttgcatacatattgcatgttttggtgtgttttcaggtgcagaaggagcttaaaagcattctactcaatccattcactcgatccaggcagccatagaggaggcagcaattcactcgaccctcttactcgatcaaggcaacctcagaagaagcagcagatcaatctactcgccccttctactcgatcctctattcgacccatttactcgatcaagggcagcctactctacaagacttgttgatcgttcaaagcgtctcctgatcctcctcattccccactcaaccagacatttgagcatacggataggagaggaagaagcaactactcgaccaattgatcactccgagcatggatgcaaacgcgaagactttgcagcatcctctgtactcaatctgcaagatcgaacattcgtgcataccgtcttaagtatcttgtcttctagtgtatctaatgatattaacattatagtatatataggtcactttgggatttgtccaaaggaccaagcttttatctcttaggtgtttgtttgtgttcttgaatcttaaaaaccttaattactcttaatctatttcgtttttgcatttagttctttgaacaaagttgtttagcttgtttagatctacattgtgacatgatttcagtaatttctgggtttgtgttcttacttatgttgcttgagtagtgattagggttcttgaggatgaattagattagggtaatctctcggttagtcaggtggttaagattaggttagatcccttctagattcgttggcccctatgcggttttcgctggctaatgtggaaattcgaccataggtatccagcatccaaaagatgttcaaatggatgcctgatctacgaattcgagagatttgtagactctagcccaagagattggatagactgcatattgactttggtaaattattgcttaaaccctgctctgctatgtttcattaacgagagttgagattaggaagtggtagagttatgggggtctctttcacgagagtggattgacccggtttttgaacctatcgtctagggtttctgcctttcaccagttagccacctgatgaactctagagtttcccttatcaatgaatccatccttaggacttctatcctttttagatttatttgtattcaccccctgattgcacttttatttacctgttatttgtatcccctattgattgcattttatttcttaatattgtcacatgttggttctactcgacccaatgatcgagtatggctcttaagttctcattttacctatttgaatcctgacctaggattgtactagaaaccaaccatcattataatctggcttgacttagttgcttgtgtacacatcttgattgctagcaataacagtggactggattaataccccctatagctgcatccacatgttagtgtttaaggagaattgaattgaacctcacattcagcatataagtaggcctaaaaaacctacttatcactcccatccttcttcgacatacttgttcaggaaattcccattggaggcggtgacaagcagacaatgaaggggaattgaactgaacctcacatttaggcaagacgcctttgtaaagtataatgagaagagaagcttgcttaaatccgtgatgagggcatttggtttgataacccttaaagcgctcccaagcttcatagaagctttcattttgcttgtgtgagaaaccacaaatctcatttctgagtcttgcagttctggcattggagaagaactttgacagaaaagccttcttacaatcatcccaggtggtgattaagtcatggggcagattcttctcccagatatgtgctttgtcacccaaggaaaatgggaacaaacggagcttgaatccgtcttcactgacaccattgatcttcgttaggttgcagagcctatcgaattcatcaaggtggtcgagtggatcctccattggcaaaccatggaatttgttcccctgaatcatcgagatgagaccactcttaatctcgaagttgttattctggatagcaggaggtgcgattcccttcctctgacggtgatcacgtggtgcatctccagcaccaatgttggcatggccattttgctgattctgttcttcagccataacgagtggttgctgaggtacagggttgactgtggttctcctttttctgatttcgcgggctgtgcggttgatattgtcgttgaaaaggaggttctggttgcctgttgatcgagttcgcatacagtagaggtgtacctggatcaagaagacaacaagaaaaacacacagttagtaactaaaaagaaaattgaaaaagaacttgatctaagcaagtctgaaatctcaaatgtaacaaacaaacacccaattggcaacggcgccaaattgataataggtttttcagtcaattatcctaaaacaccaatcatgtcgttgtagtattttaggttgtcaatccaaatgggtgtgatgctaacaatcaagatgtgatcagaagtcactaagtcaagccaagcaataacaggttttggtgtgttctagcaatcctaagtgaacaagcaggaaacagaaaatcaaacagaaacagtaaaacactcgaccaacacagctctttgcagagccctgggtgaggtcgagtgacaggtcgagtaacagacagaaaatgaaacaaagatactcgactgcacagtctgttgccagacaactgggtggtcgagtatcaggtcgagtaacagtaaagaattgcagaaactaagcaacaggtgacaggatgcagtaaacagcagtagagtaaacaataaaatcaatcagacaaagaattcctaaggatggggtaattgagtagtttcgtttcctcagtttacaggtgattgacatgctcaataaattaaccctagacaacaagttcgttaaccaaatctaagtgccaccgcaacagagactctcaagctaacctagtcccagactcaatcaccattgacgagagctaacctaacaggcattacgaatcaacaagttaaagccaaaacgctccttgcaaccaataccttggtacagggtcacgcatctctggaattagtggttcagacatttcatcgaacaccttttgggcgcggaaatgtctgggctcaaattccagttgatcagaaagcaataggcattaagaacaactaatccagaagggatctatccaccaatactaaatcacctagcatactgagaattctacattactctaacccatcctcagaaacctattcactactcagacatcataacaaaaagcataaacgttgaacaggttgaagacatgataacaacagcgtaacaacaggatgataacagaatgaacaacaacaaacgaaaatcaagaacaaaagctgaatactgaatactgaatagataaagagaaatccggattacaaaaggtctagcacacaaggtctgtggaaataaaactagataaaaacttctcgtctgcaaaaatgtgaagtacatgctacttatagccaaattttccgaaaccctaatactcaaaacgacaaagtattgggacggattaagaactgtactcgacccatgtggtcgagtgagagatcgagtgacttcttttcttccttgtgctcgagtgtctggttgagtgcggaatgaagaaggctctgaagcttgtcatcgagtatgcagtcgagtggtgtgatggtgttactcgacttcaaggtagagtgatgaggtcgagtagtggtctggcaacgggataaggacactcgaccgccggatcgagtggcgtgatcgagtggtggtcagaagatggagatgaagtcactcgaccagggggtcgagtgatgtggtcgagtggtggtcaaaagatggagatgaagtcactcgacctgggggtcgagtgatgtggttgagtgttggtcaggtgatggagatgaagacgctcgacctcgtggtcgagtggtgaggtgaagttgtgatgtcatctactcgacgtgggggtcgagtggtctcttgagatcttgaagctcc

SEQ ID NO: 37831 - DNA, 2142 bp, Arabidopsis thaliana landsberg
aatttcattactccaattatgtttctatttttttaccttggatacaatggagacatggtctcgaacagctactcgtcctcctagtgctacaaagtcaccaatcctacaaaaaataattgtcgaaaagacgagaagcttatagtttcaatcaacggaacataatagttatttggttgctgggattagaagcatttactctgctgatccagctatgcctacttggccacagaacaagcaacatttgccaataatcacattgtgacctatctgcaatatttaagtaaacagaatagcatctcagttgtcatttacttgtgatctatgggggagttgcaagatagaatcgaagagacacctgaactaagttgtctatcttagtatcatccccgatcacggtatctctccagctgcataaatagtaaaggatatggagctagaaaagagctttacagggaactagttcttgaaatattctgttacctgccccgatcaatgcatgtgtttgctccgatttccacacgattccctatcttcacatttaaagtctagggagagcaagaaacagaacaaaggataaaagtgatgcacaattgttatccagattcaagagagcaatctaggtgtgcttacttgaggcttcttcaccatgtttccgttgtcatccacgtaaaacccaaatcctgaacagttaaaaaccaatctcaattcaatgccaattctcagaaggtaaagaagaaaacatggacttggtccataccatcttgaccaatgcagactccattatggatgacacataaaacaccaatactacaattgctgactgaaacattatacctgtagacaagtatagattctttcaagattctcttcaaaaacatgtataagacattaagcaaaaccgttacccgatctttgtagaagggccaattttgactgatgatccaattacagtgttggatcctatatgaacctctgctcccaatatagcttcttggtgaaccactgctccaaactcaaccagagccgaggaatcaattagggccgaacgatggtacattccttctccgtttcgccatcttagaaaacctttctcaacattacctccactacttgtctctaatcttgacagttacaacaaaacacaagaagtatcagcaacaatcatttacatagaatagtcaccacctttacacatataacatctttccaccatctaaatatcacaatccggactctttaatagcgtaaaatgtttcatgcaacaattgtcatcaatattcgttcatcacaatgctgttaaatcatatacagatcatgaacatctttcccaagcatcataataccacacatgtcagaccttatacacgaaactgatacgaatctaggaatttcactgcatattctcagaggcattccaacaaacacctagcgtacacgataacttgataagataaatgctaacaaaagtcaaaactttaaaggtacaaatttttaacaagactaaccgttatttggagaaacattaacagttacggatttagttgattgatgagagcaaacccttaaatttcggttactagagaaaaacccagaccgtttgttcaaaaagacaccatgagtggacactgagaacaatgttcgcaaactatttgccatagtcaacaaaatttatagagattcagaagaaactgaacaaatttagcgacacgaccaaaaaaacaaagctttgaacttgctttttttttttttccctccaaaacaaattagaactaaaaaatcaacatttccatgtaatattttatactcaacaaacaatcttgaaaccgcttcatatcacttttataaacaatgttactcaggattggctattacgagttctaaataaaatctgatgacaaaaaaaaacaattttgatgaatttataaattttatgattccccgaaacctttgaccaaatatgttttttaatcatattattatgtcaatgattacaacagcacattttaatttcattatctagacaggcctgcctaacctatggaatattgaagtttgaacataataatttgatttaaacaatcttaattatcaatgactaactgtagtaattagactttgaatcccactaattccaatgaagat

SEQ ID NO: 37832 - DNA, 2274 bp, Arabidopsis thaliana landsberg
cagttattaattctttacacaacagttattaaatgaaaggtcactaatgatgggtcaatccaaaactggaaaccaaaagaagagcaacttcaatatgtaatcatagggtctggatccgacgagtcagtgggagatttgttgttggactgacgcagtgagttgaataattcatcttttatgacctacaagtacaacaatgatggattttgagtctgtgaaatacacgaaccttaagggagatatgtaccatttcgtttaatatttttactcacctgtgacattagtccatggacctgctcgacagttatctttgcactatcccgagttatcttcgcgagttgaggctcatcctgaaagtggtccacaacacatatacttaggtaatgtaatctccaaaacaaatgtttttatgtaaagaagattaaaacaatatcaaaatgagtcacacagccagagataacagaactctaggaagcagacatagactattggcaacaactcgttgacaaattgatacatcaaagtctccctgttttactagttcaaactttaatagctctgtatatttttgactaaacatacactcaattgtgaaatttcaaacccagaaaaggtaaaacatagtgttttgcaggtagagtttctattagtcaatatccagtcaacataatgcctaagaataaaaagttcaaatttaatccaagttgctagatgttgatagtagcagttaattagccaaatgaaaagtttctacacaggaacaagcttgaaaagtggcaagtgtatgagctcaagatcatggtccagtatctcagacagtcaataaacattgagaacataacaaataattttgctaaagcaaccatttagacaaacctctttcctcctttggtgaccggctggcgcaattcctccataccgggagttagcgagctgactctccgcttgctcgagcttctcagcttcatcatgtaaacaattaaatggtaagaaaagaggatatatcaaactacgacctggatgaaaagtaaattaacttgctctttcatatatacaagaatttacccaagtctgatatttgcccggcaacatagtctccattgcccaacagtggggaagaagaaagagtgttcacccagtacttgttccaaaggagatccagaaggtgactatcgagagatgacttgaaataagtgatgtccaatgagtagtactgccacatacaaaaaaaatgaatcataagatcgatgattaaaaccctcccaagttttaaaatcaataaataagaattatacatacctgtttgcaatgtacaccaaagtcctcaatcttgttaagagggatagtctgatactcagaaacatgatcatccgagatcttatgaccctctggatatgttctgaatgccccaatctcaaccttaccagccgaaacagtcctcgttggatcaataacaacagctaagaatggctcctgatactgttggttaagcatctgtgtcgaaacatcaatacccgagagccaacatccatacccagggtgagagtgataccatccaacaacgttctccaacctcccagcctatagttcaaagttacagtcataaccaatcaatcaaacactcgcaaaatcttgcataaaggatccaagtagcaactagctaattaaacaagtagctacagcgagagatgaataagagatatcttaccagcttgctggtctgagagtattcaaccatatactcataggcatcagactgagcattaaccctagtctcagtaccttcaacaggcaaagcaaaagcatccataacgatgattgtatcaccctcggttttaccctgcataagacccatgatctcgattgtgccaccggagcgagcgtgaaccaccatcttgagaagagcaagggctgagatgtgaacgcgcttgaagtagttaggatcggaggcccatggcttctcctgctggattttggcttgtgaagcgtcgtcgtagtggaatatactgtcggaggctgaatcggttggttccactgggagaatgttgttctctagctcccatgtcttcctcgcgatggctgacgaggaaccttccattgaaatcgacttcgaagagtagaataaatctagggttttgcttaatcgcgagaattgatttaagggtttgagtcagaaagaaagacgaaggcaaacaaatagagagagatctttgggttcttgggttaaaccggtttgcgagaacaaaactcaaaatggatttacttaatatggga

SEQ ID NO: 37833 - DNA, 3824 bp, Arabidopsis thaliana landsberg
  unsure (1)..(3824): unsure at all n locations
atcctatttatgttcctcccatctgcaaactagcttggacctctcacagaaccacacaattgataccttctattgcagcctggaagtcgggataatttcttgctgtattggccagccgagctgtacacagctgttccaagccgacctttttttcctagggggtttttgtgggacgaaggtttccatcaattgttgatctggttcgttcttattaatcatttgtctgttgaagatttctttgctatgctattgccacttttgtttgaccaaatattattacaaaattacaagctatatttctcctactagttgatcatactttggaatttgttgtgtgtgctttgatcaggcggtgggatattcgtataaccttggatatcgttggacactggttagacctattgaacatagatggatggattccacgtgagcaaattttgggtgctgaagctttgaggtatttactctctctcactaaccgtggtagtcatggttattgttgtaattgttttatagtgtttctctacctgcagtaaggttccagaggaattcgtagttcaatacccgagtaatggcaatccaccaactctgtttttggtgatacgtggtaagaatctgttgttcttttatctctacttactttttcgtttgtcattgctctctttgtttcatgtatgcctttgtgtcataaaaattagtttattttactaccaatccttgaccagcatttattatagaagagggaatcagcaatatcgttatcagcttccttccgtttgttgtaccgatatttctgttcctactacaattagatgtttagaactttgtagccaagatcataagagtgctttcggcttcctactaattttgtggattgaaaatgtgacctatccttgtaaatatagataaaggcttacaattaattcagctccatatagtgacaatctctttttttcagatctgattgacgctataaggatggaaaagtttgtcgcatcagaaaaggatgaagtattgtcattccttgagcgagcttctgtacgcttagatgcttggtttcagtggtttaatacttcccagaaaggtaacaacatggatgtcctctagtgtatagatttatagaatcctttcagtcttcaactgctatgtgttttagagttagtagtaatatcttaagtgactattgcttaccaatcacaattggatttcttgttgttaatcacgatccgtagatgtgatgagtttttatatagaactgatatttttataggcttaatatggttggagtgggctagttcatatgtttagtaattaatgaattgattaaactctaggcaaggagatcggaagctacttttggcatggcagagacaacacaacaactcaagaacttaaccctaaggtactatttctttgtttctcataaactgaaggctctatttttaaccctcacatagactctgtcgagttttaaggttttctctgactttagctgcttccgtatgctctatatcaatatatgataccattgattgatgaatttttgctgcagtatattcttgttagcgacaaaatgtctcaaaatttattgggtgtgtgagcgaccatttttagtaggattgctactgtgtcagctgtttatttgcggatatggtagatcaattgacagatcctcagagatgaatttgatatcttaaatttcttgcagacgctttcgtcggggctggatgattatccccgggcttcgcaccctagtgaagatgagcgacatgttgatcttagatgctggatgtaccgtgctgcagattgcatgcattccatcacagagcttttaggaaaagaagacaaactttcaaaggttagcacaagatggaaaagaaaggggcgtcttttttttttttttttttttcacatgttactgacgtaaaaaaaaaaaatcctgcaggagaattacaattcaactgccaagctgctttcaaatttcaatcttctgaatcaggtttattctctatcagatgccaacaattttctcactttaacttcattaattttctttttcttctcaccattctctattctcattcatggataatttctgagcagatgcactatgatagtgactatggggcttactttgactttggcaatcatacagaaaaagtaagagaagcttcataaatcaacaagtctgagtgtcaaatttttgtcatatagaagaagaagaacggatgattctnnnnnnnnnnnnnnnnnnnnnnnnnnnnnnaattgatccccaggttaagttgatatggaaagaggtaattcaagaaaatggtcaattatctcgacaacttgtaaggaagacttttgggaagccaaagctaaaattggttcctcacttgggttacgtcagcttctttcccttcatgtttagaatcatcccagctgtgagttatatgtattgtgcattcgtatttaatatgctccattatccatatgattgttgaaacccttgtggaggacaacataaacataaatctttacatttttgttgcttgatgaaaggattcttcgatcctcgacaaacagctcgatctcatttcaaacgggaacatcgtatggagtgactatggactactttcacttgccaaaactaggtgagcttgcaagaacaaacatacctgagaaatttcattcttctatgattccataactactcgcttttcttcatgcagttctttgtacatgaagtataacagtgagcatcaagcaccatactggagaggtgctatatggatgaacatgaactacatgattctttcttccctgcaccattactctacagtggatggaccgtacaacagcaaagcacgaacgatttacgaggaactaaggagcaatctaataaggtatgcatgcttgtattaggtacagttgaagatatctgagcatatatggccttacttatattgtgttgttgatgcaggaacgtggttagaaactatgaccagactggaattatctgggaacactacgatcaaacaaaaggaactggagaaggtgcacgtgtcttcaccggttggtctgcacttatcctcttaatcatgtccgaagaataccctctattttaaaaaccattatgattaccaacatttgtaactttgaacatcaaaaactatccgctcgtgtttgtgaacaaaataaggcagtctctttcaaaggctttaatgaaaactatatcacaatacatcaagatttatagctcagctactacgtacatgttaaagtccaaagctagccttgtcgtttctgagcataacaatgtgcgcatccaggagatggtaaaggataagagaacttcgaaactagagtaattgcagattcgcttctatgagtctagtgccatttctgtatcttcagccaccatgatttccatatccctcatgtctcgcttcaatacgttcccaagtcttcctatggcttctgtctcttgttgcaatacctatttacaatgttacaaaccgttacatagtgtcctgatgtagcttcctaaagaaaaatctaaatatccatatgccaatccagagattagtgacaaaagatgttgtatatcatacctcctgcatatctatcaagctctgctcgtctattttagttgacccagggagataaagggaactaccagcagcaattgaatttgcttgagcacgagatatcgtctgcagactttgcaccctcctagaaagctctgcttcaggacctttcacctgagaatccacacccattttttacattaaactttgtaaacattggggagaaattttaatttaaaaatgaaaaaa

SEQ ID NO: 37834 - DNA, 13774 bp, Arabidopsis thaliana landsberg
  unsure (1)..(13774): unsure at all n locations
gtggttccgcagccgttaccggttgaaatgtcttcgtcttcggagatccacctacttcgttgagtttgtcactacctggagctgagaacacgagttcgagccataacaataacaacaacgcgttgatgtttccgagatttgagagtcagatgaagattaatgtagaggagagaggaggaggaggagaaggacgtagaggtgagtttatgacggtggtgcaggagatgataaaagctgaagtgaggagttacatggcggaaatgcaacggaacaatggtggtggattcgtcggaggattcattgataatggcatgattccgatgagtcaaattggagttgggagaatcgagtagacaaagtgagattattagggaactgtttaaattggagaagaagaaaaatgctctgtttttttctcctttggattaggcttaagaattttgggttttaaggaaatgtatagaggaaatcgagtgaacaaagctcgagagctggggacgtagtgacgaagacgaagatcaaatttctcttaagctattcaggaaaataaaataaatttttatttataactacgcttaatgatgataatagatcaaattaatacacaaagtatcacaaagtgaaagataaatgatccagttaaagaacaagtttgtcgaggattggtaaagacttgcatttggcaactaaaggcacagatttgggcatggtaagaccctttccttccgacatgtcaacggcaacgtcattgtctctctcccaatcgaaacactggatcaatgagcctaaagctaagctcagtactagttgggccaggcccataccaggacatgctctcctaccgattccgaaaggcagaaacttaccacgatgggtctctgattcaaacctctctggtttgaaagtttctgggtcatcccatacatttgggtctctctgaatagcccacgcattgataaatagccaggtgccacgtggaatgtcaaatccagcgacttcacagtcagtggatgaagcgtgtgggacaagtaagggcgccgccggaaacaaacgaagagtctcagagatcacattgttgatatagggacacttgccagtatctgattcctcaaacacacgcccttctttcgaaacctcgttttgttccgttttgagtttccttaaaacttccggatgatttagaaggttagccatagcccactccaacgtcactgcggttgtgtccgttccagcaagcaacatcacctgcaatgaatcctttgaatctttgatgaatcaatcttgatcactcctattaacgattcaaaattataggaattaaaaactcatgtacctgtacgagccctttgatgatatcatgagtgtaacattcaggttctgattcttgaagagacagcaaacgagtgatcatcgttttctcaagctctgcttttcctctgtttttccgatgctcgtcgactaatttctgcataaacttgtccaatttcgaagcgagtttctttgctctctttctgtatccatcaagatcaaagagcttcagagtcgggagaaaatctccgacataattaacaccagcgaaatcgaacgcctccctaatcagcttccgaacttccttagtttcctcgtcttcctctcgttttccagcgaccatgctcattaggatgttatacgtaagcccataaagaaacggctggagtttcaatctgacactgcctcctgatgttaccagttccacgttgatcttccgaatcatagctctcacttcgtctctccgtatatctgaaaagtctctgagacgagcggtggacaagatatctacggcgcagaaacggcggagtctgcgccaatgctccccgtacggagctgtgctaaccagcgtgttgttgtaacccatgtattcagttaaagtagcgagaggcctgttggcgaaaacaacatcgttttgctgagataagaactcctccgcagctgaagctgacgttacaaccaccgctcgacgagagcctagccggagaataaacacgtcgatgccgaggtttcgagagaggtcactgaaagaatatgcggaattgtagtttggaaagagtaagagtaagggtaagagaatcatgaggaacaagagagcattgttatgagtgagaatgaccaaaacatattactagaattggttagttacctttgtgtgtttacattgtattttaaggacacacaaagggaacatagccgtttacacataacatgcgaatgaaagagacatgagagaagagattccttggtcttaatggtgagagtgacaggtccttggttgaccatgaagctaagaccactcgtgagttctcttcaacggctacaagagatatttgtgtgccttcactcattctagaagctccctataggcttctcaatgtgttcggcccaacaccttgtagcttacacacaacactcggcctcttttctttatttgtacggatggatgctttttattaggtcttgctcaatactccccctcaagcgtaagactcacgcaagtctaagcttggaacacatgatccatcacctcattaaaaaccgtagtagagaaaaccacatgggagaaaactttactaagggaaaaagagtgtgatgttcatggttaggggaacttgagatcaagagtgagatagatccacaagtcctagtttgccatgtatgaagttgcaaactttgagacttgcggccttggtgaagatatccgccaattgatcttcacttcttgtataacacggtagcgtaaccccttcgacaatcttctctcggactttatgacaatcgacttcaatatgcttggttctctcatgaaacaccgagtttgaggctatgtatattgcggccttgttgtcacaatgcatggtaatgggtgtgtgttgttcaatgccaagatctttgagaagcgctttgagccaagtgagttcgttggtaagctttctcattgccctatactccgattcagcacttgaacatgagaccactttttgtttctttgtcttccaagttgcaaggttgcctccgatgaaagtgcaataaccggttgtggatcttctatctcctctatcacccgcatagtccgcatcacaatatcctactatctcggtacttgagttctttcccatccatatgccttgtccggagctgcctttgagataccttagaattctttccaccatgttccaatggtacaccatcgggatttgcatatgttggctaacctgattcacagcaaaacaaatatcaggtcttgtatttgttaagtaaatcaacttacctacaagcttgcggtaaagaggtgcatcgccaaatttctcatcttctttctccccctttcgattgaccttgtagccatcttcaagtggagtgctcgccggtttagaattcataaaacctgtctcattcaacaagtcaagagtatattttctttgtgataaaaaaagacccgcattcgagcggcacacttctatcccgagaaaatattttagttcacctagatctttaatatcaaaacatgatttaagaaaggtctttgtggtttgtataccgtctttgttgtcccccgtgatgataagatcatcaacataaatgagaacaaccacaataccttggggactttgtagtgtgaacaaagtgtgatcggattcggatttcttgaagctatgatctttgagtgtccgacttagtttgtggtaccacgcccgtggagattgtttgagaccatatatggctttgcgaagccgcaacacttttccacattgaattgtgtcttctaggccgggtgggggagtcatgtacacatcatcttcgagttcgccttgaagaaatgcattcttgacatccatttgccataatccccatgataaattcgtggctaaggcgaggactacccggacagtatgaagcttggccaccggagcaaaggtttctttgtagtcggatccataggtttgtgtaaacccccgagctactaagcgagctttgtatctctctatatctccattactcttgtatttgattgtgaatatccatcgagagctcaccgttttctttcccgttggtaactcatcttcatcccaagtgagatttcgcttcattgcattcacctcctcggccaccgcatcccgccattcttgtatctccattgcctcctcatacgtttgaggaattcgatgttcagaaatcttggagaggaaggcttgatgatctttaggtacaagggcaagagaacatgttgcttggaatggatgagctaccgcaagagcattaaagaattcctttttgcgacggattcttgtgcttcttctaagtgatggagttggaagaactaggacttgttcttgtttttcatcatcacttgagtcacttgagtcatgttgagtctcttggacggattcatgatcttcttgtatattgagaaggtcttcttgatgttgtaaatactcttcctcattactatcactcccttgatgcaagtcttcttgatttggtgaatgtgtttcttgcgtattctcggtcgttggtgttgtttcattacccaaatgatccaatagaaaccttagagttgcaacgcgatccgaggttgaatgagctagatcttttaagtcctcccaatccttcttgttatcatactcttgatcttcaagaaatttgacgtctcgggatatgaatgtgcgattcttggttggatcaaagcacttatatcctttttgagtcgttgaatagccaaggaacatgcacttagtgctcttcgcatctaacttgttcctttgttctccgggtactaaaacaaaacatacacaaccaaagacacgtaagtggttaatagacggtttggtgttgtttagtacctcaaagggagataagtcattcaagactttagttggtgtccgattgataaggtagcacgcggttagaaccgcatcaccccaaaacctcttcggaacacttgtgtgaaacatcattgaccgtgcaacttccataagatgtcggttctttctctccgccactccattttgttgtggtgtgtacgggcaacttgtttggtgtatgattccttgtttagctaggtgatctcgaaacttttggcttgtgtattctcctccattatcggtcctaaacactttaatctttgcattaaattgattagtgacataagtctcaaagttagtgaaagcctcaaacactctatcttttgaaggtaagagtgttatccaagtgtactttgatttctcatctataaaagtcacaaaatatttgttgttgtctctagaaacacatggtgaagtccaaacatccgaatgtactagatcaaaacatttctcataaatagtaagagatttaggaaaaaccgatttgcaatgtttaccaagaatacaagcttcacaacttgtatgatcaaaagacatatttggtaacataagtttaagagctcgagtatgtggatgacctagcctagcatgccacaaaacattgaaagaaatgcctaaatgcgatttagaagagaaacaactagaagagtttggtgacacatcttcaagaacatagagttctccttttgagccaccttctccaataacttttcccgtctcaatatcctgaaaatatacatcattaggcccaaaaatagcatagcaatttaggtctttagttgttctttttacggataagaggttagaagtaaacttaggcataaagaaagcttttgaatctttattaaacagtcgtaaattccctatgccttcaattggaaccttgtcaccattagcaataataacatgtcctagagctggttctatgttgttaagaagattagaattactaatcatatgatgagaagcacccgaatctataacaattgaactactaggtttttgtgagaagaaggtgataccggattctttaagagagacgatagacttgatgagagcttccaagtccgacttcctcacataatctccggatgatattgtggatgtctctcccttggatgacccggattgactttgctcctcatgagcttcttgagagatatgggctcttgagtctttgaacttggcgggcttgagatgtgggtgtaataaccaacacttatctttggtgtgacccttcttcttacaatggtcacatgtcagcatctttctatcttcattcttgtacactcctttgttagccaccacttctcctttgttagccgtgatgagttcactttttccaccaaacaatccggttgaaccttgttccttttggattttagagcatacctcatcaagacttggtaacttctccgatctaagtaagtgcttgattaggtcattgtaacccggatttaaggtgagaagaagtccgaacactttatcttgctcacgcctttcgtggagaaccttcgggtcaagagttcccggtctcaagctttcaagttcagaccacaacgatctaaacttagcaaagtgtttggtgaattctagatcttcttgacttagctcattgatcgcctttttcacttcaaacacccgggtcaagttagattcgtttccatacacattcttgagtgtatcccacaactcttttgccgtttcacaatacgagtatccttctagaatagaggtttcaagagagttttgaagaagagcaaggaccgcttgatcttcttggaaccatttctcttcctcgggagatagaacttccgttccttcttcatctccttcttctttggcttcctttggagctcgagatgaaattacatggctccaaagcccacgaccacacaacaccgtttttgttgttcttgaccaagttaagtagttccctccttgaagtatcaccgtagtaatcaccttttgagaagtctccatggtttgaacacacacggactgatggacaaagctattacccgttggttaaaagagataaaaattgagatttttcgaagacgtgaagattagaaagaaaggagatgagttcattagcatagagacatgatcttatgctctgataccatgaaagaatatgcggaattgtagtttggaaagagtaagagtaagggtaagagaatcatgaggaacaagagagcattgttatgagtgagaatgaccaaaacatattactagaattggttagttacctttgtgtgtttacattgtattttaaggacacacaaagggaacatagccgtttacacataacatgcgaatgaaagagacatgagagaagagattccttggtcttaatggtgagagtgacaggtccttggttgaccatgaagctaagaccactcgtgagttctcttcaacggctacaagagatatttgtgtgccttcactcattctagaagctccctataggcttctcaatgtgttcggcccaacaccttgtagcttacacacaacactcggcctcttttctttatttgtacggatggatgctttttattaggtcttgctcaatactccccctcaagcgtaagactcacgcaagtctaagcttggaacacatgatccatcacctcattaaaaaccgtagtagagaaaaccacatgggagaaaactttactaagggaaaaagagtgtgatgttcatggttaggggaacttgagatcaagagtgagatagatccacaagtcctagtttgccatgtatgaagttgcaaactttgagacttgcggccttggtgaagatatccgccaattgatcttcacttcttgtataacacggtagcgtaaccccttcgacaatcttctctcggactttatgacaatcgacttcaatatgcttggttctctcatgaaacaccgagtttgaggctatgtatattgcggccttgttgtcacaatgcatggtaatgggtgtgtgttgttcaatgccaagatctttgagaagcgctttgagccaagtgagttcgttggtaagctttctcattgccctatactccgattcagcacttgaacatgagaccactttttgtttctttgtcttccaagttgcgaggttgcctccgatgaaagtgcaataaccggttgtggatcttctatctcctctatcacccgcatagtccgcatcacaatatcctactatctcggtacttgagttctttcccatccatatgccttgtccggagctgcctttgagataccttagaattctttccaccatgttccaatggtacaccatcgggatttgcatatgttggctaacctgattcacagcaaaacaaatatcaggtcttgtatttgttaagtaaatcaacttacctacaagcnnnnnnnnnnnnnnnnnnnnnnnnnnnnnnnnnncttctttctccccctttcgattgaccttgtagccatcttcaagtggagtgctcgccggtttagaattcataaaacctgtctcattcaacaagtcaagagtatattttctttgtgataaaaaaagacccgcattcgagcggcacacttctatcccgagaaaatattttagttcacctagatctttaatatcaaaacatgatttaagaaaggtctttgtggtttgtataccgtctttgttgtcccccgtgatgccagatcatccacataaatgagaacaaccacaataccttggggactttgtagtgtgaacaaagtgtgatcggattcggatttcttgaagctatgatctttgagtgtccgacttagtttgtggtaccacgcccgtggagattgtttgagaccatatatggctttgcgaagccgcaacacttttccacattgaattgtgtcttctaggccgggtgggggagtcatgtacacatcatcttcgagttcgccttgaagaaatgcattcttgacatccatttgccataatccccatgataaattcgtggctaaggcgaggactacccggacagtatgaagcttggccaccggagcaaaggtttctttgtagtcggatccataggtttgtgtaaacccccgagctactaagcgagctttgtatctctctatatctccattactcttgtatttgattgtgaatatccatcgagagctcaccgttttctttcccgttggtaactcatcttcatcccaagtgtgatttcgcttcattgcattcacctcctcggccaccgcatcccgccattcttgtatctccattgcctcctcatacgtttgaggaattcgatgttcagaaatcttggagaggaaggcttgatgatctttaggtacaagggcaagagaacatgttgcttggaatggatgagctaccgcaagagcattaaagaattcctttttgcgacggattcttgtgcttcttctaagtgatggagttggaagaactaggacttgttcttgtttttcatcatcacttgagtcacttgagtcatgttgagtctcttggacggattcatgatcttcttgtatattgagaaggtcttcttgatgttgtaaatactcttcctcattactatcactcccttgatgcaagtcttcttgatttggtgaatgtgtttcttgcgtattctcggtcgttggtgttgtttcattacccaaatgatccaatagaaaccttagagttgcaacgcgatccgaggttgaatgagctagatcttttaagtcctcccaatccttcttgttatcatactcttgatcttcaagaaacttgacatctcgggatataaatgtgcggttcttggttggatcaaagcatttatatcctttttgagtagttgagtagccaagaaacatacacttagtgctcttcgcatctagcttgcttctttgttctccgggtatcaaaacaaaacatacacaaccaaacactcgtaagtgatcaatgaacggtttagtattgttaagtacctcgaagggagataagtcacttaagactttagttggtgttcgattgataaggtagcacgcggttaagaccgcatcaccccaaaatctctttggaacacttgtatgaaacatcattgaccgcgccacctccatgagatgtcggttctttctctccgccactccattttgttgtggtgtgtacgggcaacttgtttggtatattattccacgtttggctagatgatctcgaaacttttggcttgtgtattctcctccattatcggtcctaaacactttaatctttgcattaaattgattagtgacataggtttcaaagttagtgaaagcttcaaacactctatcttttgagggtaatagtgttatccaagtgtactttgatttctcatcaataaatgtgacaaaatacttgttgttgtctctagaaacacatggtgaggtccaaacatccgaatgaactagatcaaaacatttctcatagatagtaagagatttaggaaaaaccgatttgcaatgtttaccaagaatacaagcctcacaacttgtatgatcaaaagaaatatttggtaacatgagtttaagagctctagtatgaggatgtcctagcctagcatgccacaaagtattaaaagagatgcctaaatgtgacttagaggaaaaacagctagaagagtttggtgacaagtcttcaagaacatagagttctccttttgaaccaccttctccaataacttttcccgtctcaatatcctgaaaatacacatcattagggccaaaaatcgcataacaatttaagtctctagtggtccttttcacggataataagttagatgtgaacttaggcataaagaaagcttttgaatctttgttaaacaatttcaagtttcctatcccttcaattggaactttgtcaccattagcaataataacatgtcctagagccggttctatgttatcaagaagattagagttactaatcatatgatgagaagcacccgagtctatcacaattgaactactagatgtttgtgatgagaaagtgataccggattctttgagtgaaacaatggacttgatgagtgcttccaagtccgacttcctcacatagtctccgaatgatgtggatgtctctcctttcgatgacccggcttgactttgctcttcatgagtttcttgagagagatgagctcttgagtctttgaacttggcgggcttgagatgtgggatgtagcagccaacacttatctttggtgtgacccttcttcttacaatgatcacatgtcagcatctttctatcttcattcttgtacactcctttgttagccaccacttctcctttgttagccgtgatgagttcactttttccaccaaacaatccggttgaaccttgttccttttggattttagagcatacctcatcaagacttggtaacttctccgatctaagtaagtgcttgattaggtcattgtaacccggatttaaggtgagaagaagtccgaacactttatcttgctcacgcctttcgtggagaaccctcgggtcaagagttcccggtctcaagctttcaagttcagaccacaacgatctaaacttagcaaagtgtttggtgaattctagatcttcttgacttagctcattgatcgcctttttcacttcaaacacccgggtcaagttagattcgtttccatacacattcttgagtgtatcccacaactcttttgccgtttcacaatacgagtatccttctagaatagaggtttcaagagagttttgaagaagagcaaggaccgcttgatcttcttggaaccatttctcttcctcgggagatagaacttccgttccttcttcatctccttcttctttggcttcctttggagctcgagatgaaattacatggctccaaagcccacgaccacacaacaccgtttttgttgttcttgaccaagttaagtagttccctccttgaagtatcaccgtagtaatcaccttttgagaagtctccatggtttgaacacacacggactgatggacaaagctattacccgttggttaaaagagataaaaattgagatttttcgaagacgtgaagattagaaagaaaggagatgagttcattagcatagagacatgatcttatgctctgataccatgaaagaatatgcggaattgtagtttggaaagagtaagagtaagggtaagagaatcatgaggaacaagagagcattgttatgagtgagaatgaccaaaacatattactagaattggttagttacctttgtgtgtttacattgtattttaaggacacacaaagggaacatagccgtttacacataacatgcgaatgaaagagacatgagagaagagattccttggtcttaatggtgagagtgacaggtccttggttgaccatgaagctaagaccactcgtgagttctcttcaacggctacaagagatatttgtgtgccttcactcattctagaagctccctataggcttctcaatgtgttcggcccaacaccttgtagcttacacaaaacactcggcctcttttctttatttgtacggacggatgctttttattaggtcttgctcaatagactcttcacatttcattgaacatatataagcagaaaaatttcaaactatagttgcagaaatttccaacccgtataaagaaaagaaaaaaaatgaaacattcaggctcatatgcaataacaacgtcgaaataatgaaatttcaatcatctacatgatcatgtagtagagtgctctcaaccgttggattaatttatacatattttctatgtgtaaatgtgtatcatgatagaaaaggcacgcaccaatggaacatctgggtaacgacgtagcaatcaaccacataatcgacgatcaacattgaaatctgagtacgcgcgactaacgaacgaaacgtttagggtttgcaaaattgaaggttgaagagacgaagaacggagacaacgtcatagggaacggttacgtggtattaatctgagaatcggaatgtgagccatgtgacgacgtggcctcctcttctcttcccggaatcgccatggaaacaaaaataaaatttcttggaacgaactagcacatgtgccacgtgtcacactaggcttcttacattttttttaataaaaataattaaactggaaaatggaaaaacaaataacaattcataaaaactgtaaatttaaaaatatatcttcttcgtcttgatgattatacataaacataacttccttaaacaattactagtttttttttttttttttcttgttgcatgaaatataaaattgcaaacccatagtagaagagaaacaaattatcaataagaaaaaaaccacgccggtccagcttgagcctccctacagaaccgataataaagccaggccggtccaccttggagctcattatggaaccgattataaagccaggccagtccaccttgcgacgtcattgcgtaacccattatgaaaccgggccggtccaccttgtggctcactacttaacagatcttgaacccagtccggtccaccttcgtcctcatcagcacgtaaccgattacgaagcaacgccagtccacgttgcgcctcactacgtaaccgattaagaagccacaccggtccaccttcagaaaggaacgggttaaaacgaccatcccttgtaacactctccgcaatgtcccgtgcaatggaattagcaggacaagacaccagctcaaaggtgataaaaggaaatgattgacaagctatgaaaatagtatcgagccacattgcatatcgaggccaatcccgaggattatacaaggcagcaattgcagcttgacaatccgaagagattatcacgttntgcaaacgaagatctcgtaagcttttaaccacccacaagatacaacgcaactcggccatgatcct

SEQ ID NO: 37835 - DNA, 3206 bp, Arabidopsis thaliana landsberg
  unsure (1)..(3206): unsure at all n locations
accctttcatttgttcgtcccgagtagtgtattttctgttttttgtttttcgacgagctgagaatcgcaaaaggctgggatttttgcgatcttcagctcccaagctatatttagcccggccacgagtgcttcgtattcggccacgttgttggttgcctcgccagatacttcttgagttcctgaaaagcatcctcgcatcaggttgtccattcaaactttttgtttccccaaagcacatcgtaaaaagccaagcacttgtaagtggatcgggagatgaatcagttaagggttgcgactcttccagttagatgatctggagtaagcctcgatttgctttggatttgcctcgatgcagcgatgcgtgactaggtatcccatgaactcaccggatctcactctgaagcggcacttggccggataagcttgacattgtagaggttaagctgctggaaacattcgcgcaagtgggctatgtgtttttcctcttccatagattttaccaacatatcatcgatgtacacccccattgttttcccgatctgtaatgcaaagatcttgttgaggaaacgctgataagtcgccccggcgtttttgagtccaaatggcatcacgcgataacaaaaaatcacttgctctatgtagaaggcgggtttctgttggtcctcggggttcatcatgatttggttgtatccagcgaaagcgtccctgaataatagcaatttgttcctagaagttgaatccacgaggcgatcgatatgcggtagtgggaaactgtcctttaggcagactttgttcaggtcggtgaagtcgacgcacactctccacttaccgtttttctttttcaccacgaccagattttcgagtcagtcgggatatttcgcatcggtgatggagccgatccttagcagtttctctacctcgactttcacagcttccgctcgctcccgacctaactttctcctcttctacttcacaggtttaaatgctgggtctatgttgagctcgtgcgctacaatttcgacgcttactccaggcaagtcttccggcgaccaggcgaaggtgttgacgttttccctgaggaaagtagttagcttgactgtcagttcttcgcccaaatctccgccaatttctacgcaccgctcggggttcacgtcgtcaagacaaacgaagattactggatcgggaacaggtcttgtttattccagagcctcctcgatctttaattgctataattgctcggagatggctttttctacagctcggcctagtttagcctttttgtgatttgcgtcggctgttgattcggtgacgggtttctgagtttgtgtgctgccatgaaacacatcctagcattcttctgatttcctcagatgttcttcacgccgttgcttgtgggaaattttaagcagagatgataagttaaggcaacggctcgaaactgattttaccatggagtacctattattgcgttatagacagttagctggttagtgacggaaaagtatccgatttttgtaactcctcgggttcggactggcaaattgatggtgccgagagtcatggtggtctcttcggaaaatccgagcacaggtcacagggtcggtatgatttgcgccatatcaaccttcatttctcgtagggttgcaaggaaaatgacgtacagcgtactccctgtatcaactaaattttattcgatgttgaaatctctgatagtcaaagtaatgaccaaggggtcgttgtgcggatgatccaagccgttagtgtcgttctcatggaaagtgacttcgtcattggtccgttgaatggtcgtgtccagttccgatttgagtcggccttcctgtgataagctttgattgatgccgttttgtcttgacaaaaggctgaatctcccaaaattgtgaaggttcttccccgagcagcttccggtttgtcgtcatctgcctcgtggttgcctttacctctcttgcgtccttcggggtttgccgcgggggctgtctgctcaggattggccacagcgttgacctgctcggttttacctttttctgcctttaaatcatcgatggtcaaacctccaccaatttcnnnnnnnnnnnnnnnnnnnnnnnnncttgctccgaggcagcgacatctggaagtgtgatggccgtaactcttatgcaactcgcaatattcttgctcgtttcctgcgggttgatccttcgtccacgtgtaggattcccgaccgcgtcctcgtccgcggcctcgccctcggcctcgggcggcttcgcctcggggcgatcggcctggtaattatgggctccggagaagtttcgcccttcatggtgaacgaatgtcccgccttgagcgccctttttatggcttggagcgcttgggtgggatttttcgatgcgaggcgtttgcttggtcggttcgtgccttttagctagtagttctatttcttcctcatgggatacgtaatccgaggctcggtgcaaggcgtctcggattgtcagtggtttggacagattcaactcctttcggaattcggacttgtaccacagcgccttcttcagagcagagagagtcgtgacgtcattgattccctcgactttggctagggtggatcaaaactttgtgacgaaatctctaagtggctcgttcggttattgggacagcgaccaaaagtcagcatcagatgtgcccggattgattaacaccgaatattgttgagaaccaatctagggctggtcctttcaaatgctcaacgaacagatgacagagaccggcgtctctttcctcaggcctgaacttggctcgggctacaaatattatgaaagatttcaaatgctccttcgggtcagatgatccgttgaagtactcgatttttagctttcctgggtctgaaattatcgcgctggatatcttgcgattgaaaggagtgttgtgggactcttccagaatgcgatcgatgtttggggccgaggagactgcgttatgcatctgagatctcacgaggttcatctcggtttctgcattggcaagggagagcttgatcgcgtttatttcttgctccctagcgtattcctcggcccatcgaacgttttgttttgaatcctcaccgtcagagacttcgatctggtcggcctcggtagcttcagcttggggaataggaaaatgcgggtcggtttcctccacttggtttgtcgcgttctggtctccccaaacta

SEQ ID NO: 37836 - DNA, 7491 bp, Arabidopsis thaliana landsberg
  unsure (1)..(7491): unsure at all n locations
tagagtcccccttatcaatgaattcatccttagaacttctattagattgatttgtatctccttgttgattgcacttttatttacctgttatttggatcctctgtttattgcattttagttcttaattttgtcacctgttggttctactcgacccaatgatcgagtagggctgttaagttctcatttttacttgtttgaatcttgacctacgattgttactagaaacccaccatctttataatctggcttgacttagttgtttttgtacacatcttgattgctagcaatatagtggactggattgacaccctctataactgcatcgacatgtttgtgttttagaggaattgaactgaaactcacatgcagaacttcaatggccaagttcaatggcacatgcttctcaacatcaaacttcacaggatgctgcatctgaaagttgatacacatgactcggaaaccgaatgtagaactttgcctcaggtttcaaagcaagctgcagaatatgcttatacaccatttgctaaagtcaaaagccaacttttgtgcaatctgatacacaagcaaagccgtgtctatacttgcatatccctcgctggttgttggagaccaatttctgcacgaaaactttaacagcttcctatagtttttcgagaaggtgctcatgggaggagtctgaagaaccttcacttgtccatcagtaagatagttggtgacctcatcatcaatcagaccaataatttgcaactgttaagctctggcatcaactgattgtagaccaaacaaaactttgatcttggcaggagagaattcgtactccatgcctcgcacacataccttgacagaatcgtcttcgacctcttgttagcatcatgagtgataagtcgcaagcggtgaaagccaacttcatcagcaacacttgaaccagcagcttcgttcccttttttagtcttctgtctttttatcctctccacagcaccagactgttttcttttcagcagacgcgaggacacagacagatctgttgagtcaacagcttgtgctgattcagatgcatcagagatctgcactacttgaggattcttgttgttgagttatggaacttgatcacaagtcttgtttatggtctcagcttgaatgggtgtctcagatctatgcacatgaccaacagaagattcacacacgtcaggcagttccacaatcaccggtgggctgcctgttcatcttggttctccttgtgtggaaggtcagatctgagaggtgtcagttcgggctcagcatacaacaccatagctttgtttagattttcttcctcttcagctttcagagactgtgatggatcctcctcagaggctatttctgaaaggtccgacgacggtctcacagatcttttttgcacgagccgttgaagtccagagaatatcgcattcatcttcaagaaagatttaaacttgattctctttgagcacaagtcttcgagttaacgactccctaggcaggtttgatttgacatgagaaaccctaactctttttccctccaacctagacattaagtaatggggttaatttattcatgggccttcaaaacaaatgggcttaaactatacctaaaataattagagcctgaaacactaaacaaaaacattagtgcacacttgcaaataatcccattgattcatatcatcccattcatcaacatcacatgttagaatagttctgattaaaaatcaattagcgaacaaccattcactcatgaacagagtttagtgactcagaaagttattgaaacatgtgagtacactacgttggattcaaaacatttttatacctttgagatctgttccgtgttacgtgccaaccagttgttcagaactcagcaagaagctaccataaccactcatatctttaatagatcaactctgggtacagtggctagtctttcacactgtcatgccttcaattcaagtagatcagctcaacgtgtaacaggcagctggaattttcctttggagattgctcaaagaatcaggagtgtgctgcttttatttccacacttcctcagatttacatacaacagggttctcctttttttttaaactttgaatccctgttgatctatcagtttcatatcagcagcatcacttgacttctcaactgctgatatcagtgcatgatggtcacttgacaccaacttaggctttagatacccttagtttggtttgcacaataagttgatctcctcagctctttgacctcctgttagacgacaacgttttacggctgactacagaatcagcatgacaggcagctattttccacacatctttattcacatagtgttgatcttctattcatccttggatttccatggcctgttcttgcattttttgttcctgtcttagatcaacacatctcacgaaacagattacagatcaaacattccaatgaacattcgtaaagtacgaaatttgctctaattcagaggtttgataaccaattcagctagttggtttttagtacccacattttcaatagctatcaatttctcctcaaccagtttgcgaatataactatgttgatgatctatgtgcttagtacgagactttctaacaggttctttgatacaacttataacactatgattattgcaaagtattaacagaacatcagaaatcataccacactcctttgtgagttgtttcacccgtatgagttgagcactcgaacttttttaaagcactgagttctgcttcagcagttgataggaccaagttgttctgcttcttgctcttccaagacaccatgttgtttccaatgaagtagcatccaccatgttgtttccaatgaagtagcatcctccaacagatcatcgtatgtcatccaataaaattgtctagagatctaccagattcacagcccagcgacgcgatgccagaggttccacagccgattgaatcgaaatctcaagaggtgaagtccgacgaagaactttctgtgcctgattccaagtgggctatgattcttgtcacagacccgccgccaccgatcatcgaaattgaggacgagactcagtcgtcaaccgatcgggttcagaaggctgaaccaaaatttcccgaggctgcaccttctcaaccctctgttgcttcaaggttgcgtaagaggaagcaatccaccgctggacagggtggaaagcagatgaagcaggaaaagggcaagggggatcaccgcttcatctaccttcgatggaatccgattcgtctcgaaggaggctgagaagatgtatgctcatttttcccgaagaacttcattgtagaagagggtttgtctaggaaaatggatgaggctgttcggagttttattgagaaggctggattgattcgtacggtgactgatttgaaaccgtataaggaggaactggtgtttgaattctgggcaaatctgcctacagtgaaggttgataccaccaatgttggtgttttggtgcgtaattgggagtatgagttctcccgtgagaatattaatgagttgtttgggttggcatctgtcgacgtgagacaacaacgaatggacatggtggggttgatggaggatgaggtcgcaaagtttctgactgatggcaaggtcaagtctctgaaggggttgctggtgagtgctttctctccaccaggtcgagagctgttcaaactatgttgcaccaactggtctcaaacatagaatgatgggtatgcacagcctgacagagccaagctggtatacatgatcatgcacaacattccattcgactttgggaggacggtgtttgatcacattcttcagttggcaataaaaccagaaactaagctcttcctgcaattttcaaacctggtctaccagttgatacagacgcaacgccatgttcagatcccagtaaacccaaccgcatcagcagcgtcgacaaagaagaagaaggtgaagcagagtgtagctgcaggacgcaaagactcagccaaccgtagggcgatgaaaattgccatcgaaattttgcaggctgctctagatgcaggtaagtgttctgtgcgatcttcttgctttatactacatatgtctgattgtttacatgatttttgactaagttatgtgctcaagcagggggagataaggccccttcggagtcagatgatgctgggggagattaacttgtgggggagctgtgtttttgtttcgtttctcttgttaagctcggttgtatttcagaccaaaacaacttctcttttgtttttgtttaaaccgatgattgtatcatcgtaaacatgggtctgtaatattttttccacacattgttcactttcagactaatcgttttatgatatttatactagatggtatttctacagtatgcctattagatgtgtgngtgtgtctctcatttgagtttaaggttatatcaatgaaggaatgcttgagtatcaaactcagtcaaaaagggggagattgaagatgcagagtcaatcaatcggctgatggcgatcagagcgttgatgaatttcaggacgctgcatcgggtttcatcagacgcttgatttgcagacatggatgcgagagcaaacgtggcaagctaaggcggatgatgtggagagccaaggatgaaagttgacttggcgtggtgtcaaagacaagaattaccaaaaagatatggaagatatcatctcgaagatttaggaaggagtaagcttgaagaaaacaagaaagattccttaaaacgagattctcggagatcctaggtttagggttctggagagtaggtataagtattctagagtttagcatgaggcgttttgagcactctagaatactacgatacgattgaaaaactacagagcattgcaaaagcttgaaggtgagtgtgtaattctctttgtcttcacgtgagagtgttaaaaaacagagaagagaattaggcttagatattctcagtcgggtttgatattttgggtagaatagatcaagtaatctccgagataacatttgtaaacaacttgttatcaataagaatatagttataagcaattctctgtgntgtgttgatctcttacccttttaattggtatcagagcggactccttgataaaagaagtggtatctgttcaacaggtgagatcttgcgacagggtaatggagaaatcacaacagtacgttacaatacaacagccattgaatctggatgttgagcattatggctactgcaaggtgtcaatcgtacaggctatccaaagggctgaaatggatgcgtggttcgcagtggaagaaggatggaaagctccgatggtcatggatgccaaggggttagaaataccaaaatctaagaaggattggactactgaagagaagacagctgctaagaacaactcaacggccttgtcaatcatcttcagatcattgccaatgagtcaattcacgcgtgtgcaagggtgcacatcagcaaaggaagcatgggacattctggaaacaacctttgagagaaccagtaatgtgaagaggaccagattggatattttagcgtctgaatttgaaaacttgacaatggagaatgaagagtcgattgaggagttcagcagtcggctgagttcaatttcccaggaagctgtcgtcttgggaaaaaggtacaaggacaagaagttggtcaagaagtttctcagaagtctgcctgataggtttcaatatcacaagtcagcaatcgatgtgccacttgattctgatactctaaagtttgatcaagttgtgggaatgatgcaagcatatgaattgcaaatgaagaagaaggaacgttcatcaggaaagagtctggctctcaaggctgctgaagttccaccaattgtgagtgaggatcaggtggggttgatagttaagagattcttcaggaaaatggaacgaggacaacgcagaggtaatcgatcagacagacgacctgatatgagcagagattcgaagaattcagagaaacagtgtgctgaatgtgaaggatttggtcactacaagtctgagtgtcctacgctgaagaaaaagggaataaggtgctatgggtgcaaaggatatgggcataccaaggctgagtgtgtgggtaatgaagaagtaaaacagaagtcatacatcacttggagtgaaagtgattcggatgacagtgaaggaggagaaggagagattctcaacagtctggtagctcagtttggtgtgattgagaatggcaatgaagaaatagctgagaatggtacattggagaatgtcaaccaggagtctgaatctgagtcagacactgatgaacaagatctatcattcgagaagttcagaattctgattgaagacttggtccaaaagaaaaaggacaacgaagtacttagtgttgagaaagaatcactggcagtgcaagtagcaaagcttgaaaaagaactctcttaggaaagaaccaagtctgaaggtttggaaaaacagctagcagaacaactaaggaacatcaagatgttgaataacggaaccaaggatttggataaacttttaaccatgggcagaacatctaatgttacgtggggtcttggatacaatgaaggaaatacaaaaggtgagactcagtttatcaaaggagccacttcaaaagataagtctcaggtcaaacccacaaccgctgtttggaatcagtttcgctctaagcctaaacgagcatctcaggcttacaacttgagacaaacttacttcaaacctgagttcagaagcaagagaacaggatgctggtactgtggaggtatgagtcactacaaagcagactgctacaactacttgaaacatgttgttcagactaggaggaattatcaagtgggtgctcaaggaagacgagtcagacaagtgtatgtcaagaaagaacatctatagtgtcatgttactcaaacatcagcgaatgcagaactcaaggatctgatgtggtgctttgatagtggatgctccagacacatgacaggaacactagacaatcttgctggatataaggatgtgccatctaggaaagtcagatttggagatggaggtcatgccttgatcaaaggaaagggatatacttccggacaagccttgcctcatctaaccgatgtatatcatgttgatggacttaaggcaaatctgatcagtatcggtcaactgtgtgacgatggtttgagtgttttctttacacaaacggaatgcaaagcctttgacaaacatggatttgtaaagatggaaggacaccgtgctgcaaataactgttacatgtggaatccagaagagtcatgctacactgcatcacagatcgatgaatctacttcagaagatcaatcgctagtgtctctgctagaatctgatcatatgggtgaagccatgagttcggttcagcagtttaccatatacacaatgagctggcaggctccattcaagttcacaatcaacaaggtatgcaattgtttagcttggtatctgaccagtctgtatggc

SEQ ID NO: 37837 - DNA, 3688 bp, Arabidopsis thaliana landsberg
ttttttatcagttcaggaaaattcatatcgcgcaagaaagaaaaacagaatgtctatcatcctgctattcacatcccaatcatcattcataaccggaactaacccaggcggtacggtgcacatcgacgacgattgggaaatcatcaaacccgtggggctattctgcatgaacctcgggtcagcatcactactcgagctactaatcccttcaccggaacttcctactctctgatgataatcactagtcgcggcggccgctccgatggacgtcaatgtcaacggaagttcttccttctccgacatcgatccttaaaattaacaaacgaagaatgaggaagaaaacttttaaaaccccaataatcaaaaacacaaatttactttgctcacatatcgatttgttgacttttcgtgttttttttttcgtgccactaattaagtattttatattggataaattgtttttgtccggtctcgcaattatgagagaaaccaaaccacaagccttgtttttctcagctcatcgttgactttaaaactggacaaattggatcagagcttttctcccatggaatcatcttctccatcttcagcagagttcgatgtgtttctcagtttcagaggctttgacacacgcaacaacttcaccggtcatctccaaaaagcacttcgtctaagaggaatcgactcattcatcgacgacagactccgtcgaggagacaatctcactgcgcttttcgatagaatcgagaaatccaagattgcaatcatcgtcttctccacgaactatgcaaattctgcgtggtgtcttcgagagttagtgaagatcctcgaatgtaggaacagcaaccaacagctagtggtaccaatcttctacaaagttgacaaatcggacgtcgagaaacagaggaatagttttgcggtgccgttcaagttaccagaattgacttttcccggagttacgccggaagaaatttcatcgtggaaggctgctcttgcctcagcatccaacatcctaggttatgtagtcaaggaaattaggtaactttgcaaaatctagatcgatgtcatcaatgtcacacaaaaaaacttaccaagtctttgtgtcaaagttctacatttatcttcttagagatgctattaaagtttatgctaaatccagcttttttgtcattttgttagcacgtctgaggccaaacttgttgatgaaatagccgttgacacattcaagaagttgaatgatttggctccaagcgggaacgaaggtctcgtggggatagaatcgcgtctgaagaatcttgaaaagttgttatcatgggaggatttggataccgttcatatcataggcattgttggaatggttgggattgggaaaacgactcttgctgattgtttgtatggacgtatgcgtggtcagttcgacggtagctgcttccttactaatatccgcgaaaattcaggtagaagcgggttagaatctttgctgcagaaactcttttccactgtacttaatgatagagatttggagattggagctcctggaaatgcacatgagagatttgagccgcggcttaagagcaagaggctacttattgtgcttgatgatgtgaatgatgaaaagcaaatcagatatcttatggggcattgcaaatggtatcaaggaggaagtagaattatcattactactagagatagtaaactgattgagacgatcaaaggccgaaaatacgtgctcccgaaattgaatgatagagaagccttgaagctctttagcttgaatgcttttagtaactctttccctttgaaagagttcgaaggtttgacaaatatggttcttgattacgctaaaggccaccctttggctcttaaggtgttaggatctgatctttgtgagagggatgatctgtactgggaagctaaactggatagattgaaaagtagatcacatggagatatctacgaagttctagaaacaagctatgaggagcttaccactgaacagaagaatgtttttctggatattgcatgtttcttcagatcagagaatgtggattacgtgacaagccttctcaacagtcatggtgtggacgtctctggcgtggtaaaggatctcgttgacaaatgtctgatcactctttctgataatcgcatcgagatgcatgacatgttgcaaacgatggccaaggagattagtttaaaagtagaaacaataggtataagagactttaggtggctatcacgacatggtaaccagtgccaatggcatatcagattatgggacagtgaagatatttgtgacctgctaaccgaaggcctggtaatgagtaatgacatatcttgatgatattcaattgtcatccattttgtacaatggtacagaatcatgctctgaattaacctctgcacatttacgccatgagtcatagggagctgataaaataagaggcattttttgggtcacatcagaattaagagcaatgcgtctaagtgccaaagccttccaagggatgtacaatctcaaatacttgaaaatttatgattctcattgttcccgtggatgcgaagcagagtttaaactacacttgcggaggggacttagtttccttcctaacgagcttacatatctacactggcatggttatccactacagagtatccctctagactttgaccctaagaatcttgtagaccttaaattgccacatagtcaattagaagaaatttgggatgatgaaaaggtatgttttacgtcagtttgatcagtcctaagctaaagtgaattttgatttgcatcaaaaatttgacttgtggttgtattttttttcacaggatgttggaatgctcaaatgggtcgaccttagtcattctataaatttacgtcagtgtctgggtttggctaatgctcataatcttgagaggttgaatctagaaggatgtacaagtttgaaaaaattgccgtcatcgataaattgtttggagaagcttatatacctcaatctcagggattgcacaagccttaggagtcttccaaaaggaatcaaaactcaatccttgcaaactcttattctcagtggctgctccagcttaaagaaattcccactgatctcggaaaatgttgaagttctacttttagatggcactgttataaagagccttcccgaatccattcaaacctttagaagacttgctttgctgaatctgaagaactgcaaaaagctgaagcatctttcttctgatctttataagctgaaatgtcttcaagagctaatactctcaggttgctcacaactagaggtttttccagaaattaaggaagacatggaatctttggagattttacttatggatgatacatccatcacagagatgccaaagatgatgcatttgagcaatatcaagacattttcgttatgtggtacaagcagtcacgtttctgttagtatgttcttcatgccacgtacattgggctgctctcggttaacagatctttacctctcaagatgcagtctctacaaactcccagataatatcggtggcctatcctctttgcagtctttatgcttaagtggaaacaacatcgagaatcttccagaaagcttcaaccaacttaacaatctgaaatggtttgatatataagttttgcaaaatgctcaagtctctaccagtccttccacaaaacctgcagtatcct

SEQ ID NO: 37838 - DNA, 6293 bp, Arabidopsis thaliana landsberg
taaagcagctggttcgtgttcatacatctctttgggagctggtaggcacgagtgtcctggtggatcatttgccttcttgcagatcaaagccgtatggtgtcacttattgagaaactttgagcttgagttagtgtcacctttccctgaaatcaactggaatgctttggtcgttggtgctaaaggaaatgtcatggttcgttacaagcgtcgtcccctttcttaaaaaccttgttgcaacttttttttttttttttaatctttcctttgatctttgtttgttatgttgcttgtttgatcgtatgctaataatttcactcataaatttcagcatctacaaaataaatgagatatatatattaaaaaacaccacgaagtttggaacttggctactatttaaagtagtaaatacaagggtttatttgtaaagtagacactttttcaaaaataatttgcaaagtaggtagtctttttagaaattagagatatagacactttttttttactttttgtgagatagaggatatgtctaatagactaaaaaacaaaatatatatcaaattctataataccctttatcttgagagagaataaaaataatatgagagaccatttatactttattttatttgtctttatttttttaatttttattttagttttcttaaaaaattttcttaaaaaattacgttgacttttagagtatttatatgtcattaatttaatacacaaacatttcaaagatcgttttgtacactaaccattattcattggtgtatgtatataccgatattcataaatagaagtaatattatttttaatattttacaaatataatgattgtataaaccaaatattattattcaatataatggtttacatgatggtgtacataattaagttacttttaatggtgttcaaaatgattgaaactattatgacgattggtggatagaatgatatatacaacttttaaatgataacatacaagattggtagacaaagtgtacaaaacttggtgtacacttatagagaatgtataaatcattatttcaattagtggtgtacatcatctcttacaccaatgttagtacattgtctcatagatttttaaagatgtacgattatgtacaccatatttttcatcatctatgtacatcattttgtacactgttatactcagtgtatcattttctacatcagtaattatatattaatttttacgttattgttgtatactaccattagtacaccaattttaacaatatcacgtacaccgtcggctgggattaaataaaaaaagtgctacatatttttataatatagtaaaattagactttttagattcacataaaaattttaaaagttaatatgattatgtggtaattttttatgaagaattattatcaaacaaagtaaatatatttaaataaaaagaaaaataagaaaaagtagaatttgatttgagttttgtctctattttactacctaacaaataacaaaaggttatataagtcatttactaaaatctctattaaacaaaaagttgtattagaaaggaaagagaaaaatgtttatttctcctatttctaaaaaaactacctactttacaaattatttgtataaaaagtgtctattttccaaatctatatatacatttttgtaagaggtttttgaagataatgttgaagatttgagccataattcaacaattaattcaaatgggtgggttttacccggtttaactctgttcggatcctggataacatgtttaattctgttctgatcttggataacattaatgtttggaaaagttacctaaaaactaataattaaaaacgaaaattaatgatttagttaccaaatttaatataaacgtatctaaactacccatatttcttatttaccttaactaatttcctaaaatatttctacctaatttaaacataaatatataattcttctttcatttttatttgatcttatactttatttattttgaatttatataaaatatatatagttaataaaatattatatttttttctgaatatgatataattcaatttttttaaaacggacatatatttttcaacctatgaagaaataatatgtgtacaatgtcccacatcgcttagaaaaattggacaatggttcagacccatattataaaaggaccaaaatgattctgattatgaatgagcaggaagcttgatttatcaggcgtccaaaattaaaatagttatccgattttactcggattttttattttaaagaattgaaactttaaaatgtttcaagaaattataaatattataactttatcaaaagttaaatattataattttaaaaactttttataaagtttatctttaaaaaatgctttaaatatttataattttaaaacttataaagttttaaaaattataaattaaattttacaagaaatttaaacattataaatatataaaaaatatattaatacgagatgatatattacaggaaaaatcttaaatataacaatcaaaattcaatgatgaattttgggtcgatattgtatttttttaagtttcaaattttataatattgaaatttataagaaaatgacaaaattatgtttaatttcacgggactgggttatatggtaggacgggtttgggtggataataattacgattttagaatgtctcatatcgcttaagaaaattggacaatggtcaagagccatactataaaaaggaccaaaatgatttcgattacgaatgagcatgaaacttgatttatgaggtgtccaaaattaaaatagtttgtttactagggttatttattttaaaaaattgaaactttaaaaagtttaaaaaattataaattaaatattacaagaaatttaaacaatataaaagatattaatacgggacgatatactgcgagagaaatcttagatataacactcaaaattcaatgatgaagtttgggtcaatattaatcttttttaaagtttctaattttataaatatttgaaatttacaataaaatgacaaatttgtgtgtaatttcacgggacgaggttatatggtgtgacgggtttgagtggataataacatgggatagtatgctatggaaaaaaacatataataacaatcataatataattatataatcttaaacactaaacaaaattaacaatattataaaaaaaaaactttaaactttaatttttttaaaacacattttgattcttttataagaaatttaaacattataaatatttaaacattatactacgggtgaaattttataattgactgtttgggttgataagaatttgcgatagaattaggagtgaaatcctagaatgacaattaaaatataattatacaattaaatactaccacagctgaaatcctagaattgacgggcttgattcgatattaatatgggatggtgtactacggaatattttagaattgactggtttgggttgataataatttgcgatagaattaggagtgaaatcatagaatgacaattaaaatataattatacaattaaatactaccacgggtgaaatcatagaattgacgggtttgattcaatattaatatggaatggtgtactacgggtgaaatccgagaaacaacaatcaaaatacaattatacaatattaaacatttaacaaaataaacaaatacaacttaaaactttaaaatttgagttataaaatttcgtttagcgatgaattatacatttaaatcaaacaatagcataaatttattaaatcatcctaagaaatattcaattattttttatttaataaaaatataggcccgcggtataccgcgggttactatctagtgcagaatatatctaaaaaaatttaaattcaattaaaaatctgaaaatatataagaaaatacatatcaccacgctctagagaatgcctaaaatatgggaaattagttctcgacgcaattttaatatctatatatacatttttgcagccattttaacaaataaatcgtagagttagacttatttacaacccaatgccattagcattaattttttttttccaaaataattaattttactttaaattcttaatttaaattgtcaatcacattatcaatcaaatttaatccaaacaaatttcacattaatcccttaaaattagcataaacgtatttgttaacaatattttaaaacaaaattttttgtttaaataaatattattcttactaaacgttttttgtttaaataaataaatcttatatttgaacttatttacaatatcatgctactgatattaattatttagaaataaaaatatttaattaaatatttaaatcttctaaatccttgcttttaaagttattatgtcattacctaaaaggctcaaaatataatctttttaaatattattatttatatatttaaattttataaaacattattaatatttaaacttataaaaagtttaatatatcataattttttaacatcattatataatatatagagtttaaaaaaatctcaattctttccgtcatattttgtgatttgaaattttaaaaatgagcatatattaaccaattgacaaaaaatgtgtgagttctacgtttcacatcgactaaaatatttagacaattgttcagaatcatatcatataaataagatcaacattaataaaataaatagtttttttacgggacgggaatgactggacgttacttaataacaattgtaaactataaaataaaattattttataaatacaatttgcaaacttttatatatactaactttataaagaaaaatcgtccaagatatgtaccgcaggttaaaatcaagaatccaagatacataacggctaaatacatatactactcttaccacattacaaaagtcatgtatttttcacaaattattcagtctaaaatccaagatgaattttttttttagaattttacataatatagtttatcgtgcttttattatatacactatacattttaatcgtaataccaactaatatactaagaaaacagatattataaccgtaaactcagatacataatttacaattcaacaatatgaatttcactcaatatatagattgtcttaaaaaactacccccgcggtataccgcgggtcaaaatctagtatagaaggataaatgtaagatatatttaaattgattactgttgaaatagaaagttattagcagtctaattaaggtgtctatttttgttctaataaagttaactaatacaattataggtatggtttcgaattaaataaatagtatgcctattcaaacccacccttatttgttcatacaaactcgaattaaaaatattgtttgcacatgggttaattccgagagaaatgtgattttgatatactaatagtcactagatctattcaattattgtttaatacttctcagtttttcctatgggcaaacttcttctcccaattgtttcaaggatggtttggacaactactactatttatatgtatacttgtgtattatttttgtttgaattagctgtctgtgttggcaaaaccattatcattggtgatataaaaatatatagtacaaagactaagaaaataaaaataaaaatgaatttatgagttccaagatctacaattctacataaagaggaaccttagcaaaacaaaaattgaaactcaacacctatctttctttcttttctcggttgaaataaaaatgctttctactgaatctgaaatagagaccaggcctaatcttttggtgccgttgcatgaacatcctttatcatgtacagaagaatttatctattcttgcgatttttgtaatagtcgaaatggcattgcctatcagtgcacggagtgcggctatcggctgcacaaagactgtatccagggctttctcagctatccatctccgtgcggtcactctctcaagatctccatgcccaacaaatcacctcaatatgcaaatgaccgatgccatttttgtctgtgcaagcttaagactccgtttgctcgttgcacggtgtgcaacataaacattagtccactttgtatggtaaagcaaccaccactcactatttgtagaccaaagcaccacaagcatagcctcaccctcttggtaagggtagtcatctttacttgtaatgcatgtggcgaggaaggcgaccgcaatccttatgtatgtcttcaatgcaaactgatggtgcacacagactgtattgagaatctaccgcgagtcatatgcatcaatcggcacgatcatcgcatctttc

SEQ ID NO: 37839 - DNA, 6043 bp, Arabidopsis thaliana landsberg
  unsure (1)..(6043): unsure at all n locations
ttgtatatttttgcaacatcacaatctcgatcataaaaaacagaagtaatacgatttatcataactatttacaaattaaatgttgggtcagtaacaatgtaatttttactattaatctaaaaaggataaataaaatgtgttgtttaatagtaataagaatcatatgaagcaagtcaactattcgactgctgcaatgggccgacattcacgtgcttgcacccgatttcccatgcattaagcctttttaaaagattcacggtgaagtatgacaaaatttatttataactttacacaacaaaagagatactccaattattatttttcaagatttgttaacactatattaaattgctttttgcatgaattaatatcattcttttgctcttaggtgtgatataatataattcaaataattatcgtttgtttgtcgagcaaataatatacttatgtgcatatattaatgttaagccgtataatttcttgagacaactaatacactttttgtttcatgaaattaccttgggaaactttattaattaattatcttatactaatgatatgggacagtctcgaaacatggaagtcaattttacatatagaagaaaaatattgttgcacgagtggtgctctgctggattgagccagtgagaatttcttaagacgttttaatccaattttaaaatacgaataggagttcaattcgatgacgtttttataaagataacaaaatggtcctattaaatagtaatgtgaacagctcatcttatgcaagacatttattgggtaagcaaatgtcattagatttgtcgatttaataatcatcacgaaattttatttattgcaactttatacccatatatataccttgatttgatgcttgagaaattcacccaagtcatatttgtttgtcctgattcaatgtgcattagatttctaattaatgccactaattataatattgtatcctacctattaatattagattaaaattgtcatattaacacaataatacaatatattcgtactcgtataatttttttgttcatagaatataagtgatgattaataatcaaaatgcagtgatgggtcttttgttgtctgctaacttaattctggccataatttaattaattctatgatagaaaataataataataataataatttcacgattcgttaatctacagctgtgtttagctgtcatacaattcaatttatcatttttcttcttcatcacgtacgacgtatacacaaacacgtgatataggcatattattggttcgtaattcgtaactttcattgataatataatcgataatggtgtgtgtttaataccaaaatttacaagttgtaataaaaacagcaaatcgctaatgatgtgtgtttgataaataccaaagtttactagtggtaatgaaaacagcaaaacagactgataactaatctatgcccaaaacgttacaacacacattttttgtttacaagtagccttaagttgacacattaatcatatacaaatttaaacagaaaaacaagaagtggcaaagtgaaaaaaaaacaaaaaaaaaatccaaaattggtgaatctgcatgaatctaacggttggaattgatcgacggtgaagctaagtttctatggtgataaagtcgtcgttagaatcctcaatagtcagttcatcaacgacttcagtcatattcggtctctgatctggatcttctctggtacatctcacaccgatccttaaaacgttctcaatttcctcctccataattttatcttcagcggcggcggttaccaccatcggatgaagcagatccatccaaccaccttgttccagtgcggagcctaaccactcaaccaaatttgccccaccggctctgttcaaaccagcgtattgagacgggaattttccggtcaagatctcaagtaccacgactccgaaactaaatacatcagatttcgcagagacggttccatcacgatccgcttctggagatttaaacgcgacgagagattgagattgagcgtcgggattgattagtttttgaagtccaaattcggagatgagtggctcgccgtcttccgcaagaaatatattgcttgattttaggtttccatgtggtaggtttagaaaccctaattctctatggagataccacattcccctagcgattccttgaatgattttgagtcgagaaggccaatctaattgaaattcttcgtggtctccgtgtaatcggtgaagcaaactcaaattaggaacaaattcgaacactagcaatttctcgtcttgtcggaaatggtaagctaggggcgttaatacgttcttgtgttgcaagcttcctagtttcctaatctccttgtcgaatacgtcaacactcacttgattcattaccgtcacacgtttcaccactaccgtgacaccgtttgaaagaaccgctttgtaggcagatcccacgcctccgctacttcttggacggttgcttccaccgccgggattaccaagcacgtgagccgccgctttcatcaagtctgataaacggaaaacacctttttccttgttcaccataactaggtctgatgtccccgccactcctttattcaattcgccggaccgactgctcctactctgccttgagctatttgatccctcaacagttacctgtctcaatcatatcaaaattttgtgtgattttataggtttaaaaactctcatttgaaaatgtgaaaattacgtgtagtggaagtaacctgaatttgttggtcgtcactattgtcttgttcagaggtacgacgtgccttcttcctccgtctcttctttttcttttttctgaaagctaaggagacaaggacgacgataagaagcactcctaatgtgctgaatgctagaaagtatttgctcttatttgcatctttcattgttccttctatcgttatggatgcagtcgaattttttggttgtgggcatggagtggatagcttggcaccgcaaaggccagaattccccgcaaaagtcttcgcgtcgaatttcaacaaaccgggaggtatttctccggttagttggttgtttgatagatcaacaatagctaaagtcgtttgtgtgaaattaggtatactcccgatgaattgattattttcgaggcgtaactcaatgagatttggcaatgtagttgccaatgagataggaatgagaccagagaaatggttgtttgacagccaagctttctttagcgacaccattgtttcgaaataatcagaaggaatgttaccagagaatcgatttcctgatatgtaaagcgatttcagagcggttaatctgttaaactcgggtatgtcaccagagaaagagttgttcattatgcttatggtgcgtaaagatggtaggtcttttaacggagcgacatcaacttttcctgatagacccatttgttcgatctggaggccaaagacagagtttttgttgcagagtaatccgatccatcgttggcttgctccacaaggttctgactctggtgtccaagaatcaagagacttggtgttgtttaaggacttcttgaatttcaataaagattctgattcggttatcgaattcgcagaaagtgctgttagagatagcacgattggccagattagccaagccacggccatttacttaaccggagctaggccgccgggagtttcaagcaactcttttttttttttgattaatcaaagtagttttttttttttttttggtgattcgatttactaatttttctgtattccttgtcttgtttctcgctttgtctctgttttctctgtcttttgtttttctttgtcatttgtgatccattggatgagaggaacttaggagcttatggcgcgaatgttcgctgaagagtaagaagattgagaaaagcaagagcgaataaaaaataagctaaagatatgcatttttggttggcccatatgaataatgttgattttagtttccaagcccaacttgggacaaagttgattatcgtttctataaataatttttaaaccgtagaagtgacttaattacaagtataagtgttgtaagaacaactctcaagtaaaagtgttgtaaaaccaactatcaaaactatattttttacgtgttacgtgtgaaaactattaagtgatactccaaattttgccatactacaagataacgcatgtaaataaattttatgggaaaaacaaatggttttggcattaggaccaagagcatataatcttaaaactcgtacaacatttggttcagttctagctaacgtgaccttttaagtggaccacttcatcatttggattttcctcctgatgcttagttatgtcggatttctaatttactcactatagcatgacaaaaaatgtatccctatgccgaaaaaagaaagaaatttgataaatgtaaaacaaattgacgccaccaaatgtaatcatcaatcagttttagcttttacagttcctaactatttccaaatatgagaatatcgaaagaatagttataagtttcttatgtatcatgagtaaaatactctaatactcaattactcatgatattatatgcaactaaacaaaatatttgtctaatctattaattttctgtagaccatgacatgtattctaatgatttgacttagtgtccttgttgtatttctatccggtttcaattatgcaattgttgaaaaaatgttattcctgttccgcatgtaatggatacttattaatatgcgataatctttaggcacatatgttattgtcatagtacaagaggagcatgtgaagaagctgcaacattttggtgttcacatccaaagtatctgtcggtgtcaaagaaccaatttgttttagtcattgttgtaaaacggacctancattcgtagtcgttacccctaaattttaaacaaattttatgtttagtattgtcatacgtcaatgcaaatgagttgtataatctttcaatattgtcttctaattttattttattttctgataagtaccattttatttatgaagataacgactgtacagagaattaccaccacaagctcaagctgcaagaccaaacttacccgaagacaacctgttacagagacacgctagctcgtaacactagatagaaaggaaatcttacccagctcaaagattaagtctgaagcacacctaacccaaaactgttgacaccatcttgattatgtccatatatgaacttaggtctcaaaacaacaactatttatttgataaatgttgatatactctattgcttaaaggagagtccaacttcgagtggtgaccggaaggtttcgccgttgccttttcttttttgccgttaacgttggtttggtagtcttagtagaatcttctcacaatcttgatttttgcatatcaaatctgttagaatatgacattcccttattttggatatgatcaaatatgtgatcgaaacccaacttgcgcttccaacaatgtagataatcttcatgtgaaatagcgaatattatttggtcttttgtatgtattagaaaatgacaatggatctatattgtgtaattaaatacacacatacatgtgtatatattagactcaagttgttgttcaactcttgaaatcatatgatattgaagagtcttcaaagttcaaagtattatgttctcattttgcaagttgcgataaataattcaataaaaatgattttttcccttggcgcgatcgtctacgacattttgttttaaattcttttttggtactctttggcattgcctcttattcaaataaaattcaacgctcgacttcattgaacaaaacgattaaaagattttattattattattgttatagaaataatatttaactgagcaagtaacaaaattcatattaggactaaacagaaatcgttaaccttttaccaacatacaaagccacaaattctaatattaattacactcagtttttgtaattaaaaacagaaaagaaaattaggcctatgangaatgaacgctataatatcctttagcaaagagggaaaaaaaacgcaaat

SEQ ID NO: 37840 - DNA, 12695 bp, Arabidopsis thaliana landsberg
  unsure (1)..(12695): unsure at all n locations
agctaccattgcaagctactcacaccatcgacataacagctctaaaagaagcagtcaaggcagataaagaattgagtaagctgttgcaggatatagaacaaggctgtcagaaaaatggagattttactgtggaagatggtgtgccttacaggaaaggttgtcttgtagtacctgtagtaactcccttcattccaaaactactggaaacgttccacacaagcgctgttggaggccatgaaggagctctgaaaacgtttaaacgattgactaaggaggtgtgttggacatgcataagaagtgatgttgttaagttcatcaaaggctgtcaagtatgttaagagaacaagtattctaacactctctccagctggattattagctcctcttccgatacctcaacagacttgggaagacatcagtttagacttcgtggagggactgccagtctcaagagggttctcgtggtggtagacatgttgagcaaatatggtcactttatcgcattgaaacacccattcacagcaaaaacagtggcaaaggcatttatgagagaggtagtcaaactgcatgggtttccatcaacgatggtttctgatagagataagatattcttgagccacttctggactgagctcttcaagttacaaggtaccgctcttcacaaaagctcagcttaccatccacaaacggatggccaaaccgaggtggtcaacaggtgtttggagtcatatttgcgatgcttcacgggtagacgtccaacgacgtggattcagtggttgccttgggccgaatactggtagaacacatcataccattcagctacaaagaccacaccattcatggcagtctatgaaagagagccacccacaatgatcaggtatggagatgtccctactccaaatgctaatgtggaagagcttcttagagacagagatggaatcttaatggagttgagagaaaacttgatcatagcacagaacaagatgtgtaaagctgctaataaacacaggagagatcttgtgtttgaagttgatgaatgggtatacttgaagttgaggccatatagacagaactcggtgattcacaggaagaacgaaaagctagctcctcgttactttggtccgtattagattatcagtaaggtgggcaacgtggcttataagttgaaactccctgctcacagccaaattcnnnnnnnnnnnnnnnnnnnnnnnnnnnnnnnnnnnnnncctgcatcctacagccctcaggagctacccaaggtcatgaccccatcgctggaatgggcgaagctacttgacatcagaaaggcagaatcaggtgatggtgcagaagttttagtgcagtggagcgggttatctgaactggagtcgaggaaacccttgatcacagttgtgcagcagtttccaaagttcgaccttgaggacaatatcaatctcctgtgggggagcattgataggctcagggttccatttgcaaagatgagaaggaagatgagaagtggcgggagaaagacaagagctctggagaagtatctcaggaaagtcctgaacaaaagtggctaaggaagaagagactatggctggttcagaagctctgcttctactcaataagtctaaggacaaagcgcaccgttttgtggtgttaagggtttatgtgttttaagggttttgggggtctttagtatttaaggaaaattttcccctttagggttggttatcaaaaacataatcatttcaatatcatttctatttctctcttaactctccgccgcataaggcgcatatctttcactctactcttatttcttgttccgataagtcacgggcttatcattggtgcttttcatcgagagtttgcaatggctcccatcgatccaaaagccgttgtcatcgagtttaatcctgacccgtcagaactcagccctcctcccagcgaaactcctccgccacccccaccactggaaaacagagtcgatactatggagaaggaaatggcgtacatcagagaaggcattcaacaactcttacgctttcagatctatggccctcctcgtgaaggaagagagtctactccgttggcctttttcaaacccattctatccccgcagttttagagtacacctgcttcgagctcagagaggcagaacagagacgcaatcttaccctgtccgacgcctgagactcagctgcgacctccagaggtccgtttccacatcccacctgttgagcaaggtctcgtaccacctcctgcaacattatcggcgccgagagcgttagacttacccgattatgaaggaggtaaccgagatgactggctatttaggggtggaacaaatgcttcacgttacacaacattgcggaggaagctaagcttgaaaaggtaattccttgtctaactggtgcttctgtaacatggtggagatgttcaaaggatagggagaaaatttatacttggaaggattttcaggataagtttaagataaggtttaagcctagtagaggtagttcagctatggaccatttgcttaatattaggcagaccagtactatggacgagtatagaggtcgtttcgaagaactcatagtggagttgccacatgttactgccgatttattagaatctgcttttctgaatggattgagaaagagtctaaaggatcaagtggtgaggtgtagacccacaaatttgactgatattgtggaaattgctaggctgattgaatctcaagaaaaagataaccataactatcaggtgagacaacaatcccgtcctcctgctacaagtaacttgtcacctgccgctgcgagggtttacgacagagtttagtctaagagactgttggaacccattaacaacagcaatcttgcctcaagtagtggttcaggaaatactagagaaggcaggaatcacaacccttgtcgtcactgtggtgataggtggtttctgggtcaccgctgcaagcagcaaaggttgaaaaactctcgaagttactgaagaagaagaagagagcccattaatagaggaattagctgaacctttgttggggtcggattccacctaataaaccgagtcgaccatgtttaacgccttggcgaccttgtcaaagaaccatcccgagccaagcccaaaaaacctcagggattatgtcgaggaaatgtcccgaggcgaccccaaaaacgcctcggaacatcaccacaaaggattccccgacctgatcttgaagcgcctcggacagcaatctggagaattaccccgaggcggaccttaagatgcctcaggagcgcatcattcgattaacgaagtccgagccactcaaccacaacctgagagccaactcaacccggctcggaggaacatcggatcgggacagaaccttcaagaaatgacttaacccatatgagatcaaacataccatttgcgaaaaacacggaagagattagataatcttcgaagatatcaccggatacagaaatcccagaatcttcggaagataaaaacaatctccttcaacaagataaagataaagagaaatcttccgagaatatcgcgagaggtgatattctcgaactctataaaaagcacctcagaagaacaaagaaggaggacacgcagaaaaacgctcttaacttcaggctatcaaaaacgctctgattttgaaggcaaaaacacctatttctcatattctaacacactagtacgatcaaatcattactttctcattaatacaatcaagtacaccgtccgcggtatttgagaattctgttgttctttgagaatctcacaaagattcgttctttgaagaaacccttaaaataaattctattgtgcgagttttgactctcacaatttggcgctagaaggaggggagagatttctctaactcccggaacacggaaccaatcatccaattcacaatggtcaacaatcaagtctccggtaacgtagttgatacagaggggaacccaatccctccaatccagacagacgctcctgaagccgctgctcccgcgaccctagtggaactgaggagtatgatggctcaacttcaacagaaggtaaacgatcaagaacaagcaaatcggtccttggcgcaacaactcgaagtagctatctcctaaggacagatcaggactactcgtttcggcgcgaggcatcttcaggatcgacgggcagcagcagatctcaatcccacacggctcgtattccacacacttggcaatactacaaggcccgtctgcagaaccgcaccggaaatcagaagagaccgaaccgagccggcaattttgggaaatcgggaaacaaatcaaaacgaaccgcagctccctcctccccgagcagaagttgccgaggccgatcagatcggggtctcaggcgatgaagattcggaagagaacgttcggtgggctgaggaatacgccagagaacaggaaataagcgctatcaagctctccctagccaaggcagaaaacgaaatgaagctcgtaagatcccaaatgcataacgcagtctcctcggccccgaacatcgactgcattctagaagagtcccacaacacaccattcacacacaggatctctaacgcgataatctcagatccaggaaaattaagaatcgaatacttcaacagatcttccgacctgaaaggacacttgaagtcattcatcatctccgtggcccgagccaaatttagaccagaagaaagagacgccggtctctgtcacctgttcgtagagcacttgaaaagggtcaactctggattggttctcgagactcgaaggaaattctgtggacagttttcaggagctatcgacactcttcttgaagcaatattcggtgctaatcgatcccggtacatcagacgccgacctttggtcactatctcaatagcctaatgacccgcttcgagacttcctcgcaaaattccgatctaccctagccaaagtcgaaggaatcaacgacgtagcggctctatctgctctcaagaaagcactatggtacaaatccgaattttaaaaagaattaaacttgtccaaaccactgacaatccgagacgccttgcaccgagcctcggattacgtatcccatgaagaagagatgaaactactagctaaaagacccaaaccgaccaagcaaacgcctcgcatcgataaacctcagaccggcgctccgaaccacaagaaaggcgcccaaggtggtacgttcgttcaccatgaaggacgaaatttctccagagcccataattaccaggtcgatacaccccgaggcaaagccacccgaggccgagggcgaggccgcggacgaggacgcggtcgagaatcctacacatggacaaaggatcaacccgcaggaaaagagcaagaatattgcgagttgcacaagagttacggccatcacacgtccagatgtcgtagcctcggagcgagattggcagcaaaattcctggccggagaaattggtggaggcttgaccatcgaggacttagaggcagaaaagggtaaaaccgagcaggtcaacgctgtggccaatcccgagcagaccgcccccgcggcgaaccccgaaggacctaaaagaggccggggtaatcgcgaaaaagatgacgatgaaccagaagctgctcggggaaggatcttcacaattttaggggattcagctttctgtcaagatacggcagcatcaatcaaggcatatcaaaggaaagccgacgcgaatcgtaattggacgcggccatttaatggaccaaatgacgaagtaacctttcacgaaagcgataccaacggtttagaccgtccacacaacgatcccttagtcattacattaaccatcggtgatttcaacgtcgaacgagtcctagtcgacacgggaagcacactggacatcattttccttacaactctgcgagaaatgaagatcgatatgacgcaaatcgtgccaactccacgacctgtgctcgggttctcaggtgaaaccactatgactctcggaaccatcaaactaccagtccgagccaaaggagtaacaaaaatcgtcgatttttctattaccgaccaaccaaccgtgtacaacgcgattttcggcaccccatggctaaatcagttccgagctgtcgcctcgacgtatcacctatgcctaaaatttcccacaaacgacggcgtgaaaaccatctggggaaaccagaaaaatgctcgcatctgcttcatggcagcgcacaagcttaggaaccccgtcaccgaatcgacggccgacgcgaatcataagtaggccaaacttggcggagccgaagaaaagtcgatctccgagcagttatagcaattaaagatcgaagaagctcgggaatctacgataccaactcccgatccggtcatctcaatttgcctcgacgacgcaaagcccgagcgatgcgtagaaatcggcggagatctaggagaagaactaacagctgaactcaccactttcctcaaagaaaacgtcaatactttcgcctggtccccagaggatttgaccggagtaagtgttaacatcgtatcacacgagctcaacatcgattcaacttttaaacccatcaagcagaagaggagaaaattgggtcgggaacgagcagaagccgtaaaagccgaggtagaaaaattattgaagatcggatccatcacctaggcgaaataccccgactggatcgcaaacccagtcgtagtaaaaaagaaaaacgggaaatggagagtttgcgtagatttcacagacttaaacaaagcttgcccaaaggacagcttcccattaccacacatcgatcgcctcgtggaatcaacctctgggaacaaactgatatcgttcatggatgcttttgcttgatacaaccaaatcatgatgaaccccgaggaccaagagaaaactgcattctacacagagcaaggtattttttgttaccgagtgatgccattcagacgtaaaaaacgctggggcaacttattagcggttcgtcaacaaaatctttgcgttatagatcgggaaaacgatggaagtgtatatcgatgatatgttggaaaaatctatagaagaggaggaacacatagcccatctgcgcgagtatttctggtagcttaacctctataacatcaagcttaatccagccaagtgccgcttcggagtgagatccggtgagttctgggatatctagtcacgcgatcggcatttggatcacgtagatcatgcctgatgatcggggattttaattgctcggaccgagcgtatgatcgagagtgcttttgttgtgttagtagctaggtagaatgagtggcctagaattttcgtgggtggataggtattactgtagataagagcagaattagatagagacaagattttggataagtatggttgtggatagaaacaagaatggatatggacgaatgtggatagggacgacattagggataagaaagagtatggataagtttgttcatgcctatccgttccgtatggataatatagtccaagtttatccgcgtaaagataaggtcaaaaaagtttatctgcatgttgtagatagagttgcggataagctcggttgagcctatctcgccaccttgtgttttccaaaccgacctaccacccctataaatagtccttccgcctcatcattcctcattcacaaaaaatgcactaaaatctctctaaaaagaatgtgagcgagtgttgagagtcggatacgactagtttgtccagaggagcttctaggtaatgtcgaggatctgtcgagtagattggttaggcgatcggaggctgagtttggattaggagtagatcaagtctaccgttcagcggaatcaaggtaagtttctattcatgcgtgattgcgttcatgtggttccatgtagtcgacatactcatgataactagcttgattgtttattttattgagtgcttgaggttatgctttcaatattgttatacttctgcatgctgcttgttattttgggtttcgggttggggatttattgcctattagagggatctaggactcattaggcgagtagcgctcatcccccactctcttttgcaggtaaccttagtcgcaaactttattttaagcatggatgttagggaagccggtttagtttttgcgttgactttgtaaaattgtatttttgtaaactagtatgtacgactcaattgagcttcggcttttgtacccaaaacctatacatgtatttggtaatttatttcaatacataatatatgaataagaaatcggcttttgttaaaactctcgtgtatcctctcattagtctagcccgtcctaatcccaacttgcggtcgtagtacggattgcaaagcctttaagccccgtggttgcgagaggcggttttctgtggtcgggcttggccttcggtgatctttggtcagatttgtctgcgggcggtcgccaacaatacgtgatgcttccggatttattcttagttctaggacggttcggggttgttacaagggtggtatcagagcatggttcatgatgctttgaggacgtggcatgatttttcaaatgttttatacagtcaaaagagtcgcaaaggcaattaggaaaactgtttcatgataggtttagatagtttagttaggattacctttggatggtggttgcagatttatgaaggagagacggccttggagaccattaagctgaggagtgaagaggatgatgattatgatcgccggacacaataccctccgatattaacttatgtgtagcggaagcgtggtggtcatatcatatttaagtaagtagccttcagtggtcttccattctggcttgtctagtttttaaggagctagtggagcggcaaaccttcataagtatttttataagtttaggaataggttaccctgaaactttcatgattgtaagatcccattgaggtacgtatgggttctaacttctcttgttcttgtgcaaatgtttgcttgatttttgtttatattgtttgcttgttgatttttgaggaacccatagagtgtattaggtaaaccctaacgatttaggttagaacctttttagtcttttagtggttaccagagttgtctcttagtccttagaattggaggatgaattcttttaaaggtaggagaatgtaatacccctgcctaggactaggacaaagccgaggaattgtagtcgactatttagcaagtcgtacaatcggaacgatcgaaagaagtctttacgggacaagtattgtttcgtcggaccaacagtctaccagtttaggagatagtcatgagcaagtggtcagggaaccagatgggtgagtcaagagaaacaaggattgggtgactatgattaatgtgttgatgcgttgagggaacgcgtaaacccatcttggttatggttctacgagatgttcatcgttagtaacggtaatgtccctgagtgcgggggtgtgtgtttcactcggtaccgtggcccttagtaatatcttaccccttactaggcgctgcttatgtactattttctaaacaagccgctacatggttgtcgagctttacttgtgccgggctatcagcatctggatcatgtagatcatgcatgatgatcttggccaccattcctaaggatgcttcagagaactcatctgctcaacttatgagatatgtcaagcatttggtcaacaatggagtaaactctaaggaagcaaatttgctcaccagggatatcagtcccatactgttagcgaaggtcaagaaggacatgtccaagagagtagtgcgttcagaacatgttagctctattgccaaaggtcaaagcactgagaagctccccgatccaggtagcatcgttcttgattactcaatctctactagcagattcagtcactccttgtgtgatctgggatcaagcatcaacctcatgcccaaatctattgctgagaggcaaggcatgactagctacatctcgacacggatcactctcctctacgcggatcgttccaaatgagtccatgatggtatccttgaggatgttcctgtgagagttggtaattgcctcatccctgctgattttgtggtcctggcatatgatgaagaacccaaggatcctcttatccttggtagagctttgctacctacagttggaggtaggattgatgtgaagaagggaatgatatctctcaacatatgcgatgtgcagatggagtttggcatggatggttcggaatctacattgcctattagtaacattgcaataaacaaggacaaacctcctaattctgctcaaatttcaactccagagccgaccaaaaagattgttacaactcagtcatagatgagagatgtagagaagcattgtcgatcgacaccatcgcgtttcatattcagatgcttctcccctcctccacagcccacaactgcttcagttcccactgatatgtactcctctatctcttctcctactgttccttcgattatttctttaattttttttaaagtgttacaggtaaccaagcatcgagactctcgagcgcttgtttcctcattatcttgcaggagtgagtatcgatcgataccaacaccaatgtcgatcgaaacatgatactgcacataggcgatctatttacacactaccttggaaggcaagattgcaatccgctaagcagcataagtcccttgtcactccatccacgcccccaactccgccaagtcaagctattgactctaaacaatcgcttagtgggaggcaaccacccactgatatgatttttcttttctttttcttttatttttgaatttttgatttatttttccagctctttacggatttgaatgccagtggggacagtggggtttaagtctcgggaagcgcttactaactatgcttttatttttggttcttattattttttgtttttatgttattgaatcattttcttttttctaacaaaaaaaagaaaaaaaaacaaaagaaaaaaaaacgtttttatttagtctagttaggaattatgatctgtatttttttaaattaatgcctggttgattattgctgcaagttcgattcaatccgactattggaaaatctaaatggaaaactgacagacttgaagatatccttgttttcaacacaatccattaaggttgtagctaatctcactgctcttccttttacctcatcaaaacggttagagttcgtaggacttgactaagaaaggagacctctcccttgataactaaatatgtatacgaacgagagactaaaaggattcgcagataatgtatagggtatagaatgtttcctattatcccactattagacattgttcgaaatgatcaattacaaagtttggaaaaatgccgaggatgtcgatccagtatgcgagttcctctttgtttaccctctaaaaagtataagtttaggggagagaaagagtaccggaaataaaaagaaaatgagtggtcgaattgttatggtatagtaaatgaataagtctagaaggtttattaaacgttaacttgattgatgagaccaagcgatgagagcctaatggatatagttgagtgctttcatatggattctaggatgttgtgtgggctagcggagaattacatagtggttagaatttgactagaactgtttagtgcattgatttggtttgtatgatcttggtaagaagctagagagattgggagttcctgtgttttcaaacttcttccaggggtttggcttttgtgttttgcttgagggccaacaaaagctaagtcttggggagtttatatacctcgattttcactgcttttagctatgatttaggtatagtttttaaagtcctttcgttatttgtagagtcttttctagtctttttcaggtctttacatgtttgggatgcatttggagattatggagcattctggagcaaaacagacaatttaagctgcagcagcaatccggagacaaaaattgacgtaggtgtcgatcgacacaacccctggtgtcgagtgacaccaatacctgacgacaattcaattgcgcaacttattgatgttttgaagatttccaaattcggcctagaactttcccttatttccaaagaaggcccagatgtttttaggacttatatattgatttttatggtcattgtttagaggcataactcttattatctcttttattcttgagagcaaaaccctgtggagactccctttagagaagattcttctaaactcttttctcttattaatttcatcattgatttcttattcaataatgttttgtgtttctttgattatgtctgagtaatcctcttgttaggtttagggtttctcattagggatttggataaattagtagatcgaaaacccttttagggtaatatatttagaattcttcatcttggattattcttaatgctagttttagagtaactaactagaacttgattttaggataataggtatacccaccataggtatctattactgaaactatcttaaatgagcctaatatttagatgtgtgctagcgtccattacttaggtgaacttatcaaacctgattataatgcttgcttagttctagggatttacaagagaattaggatcaatactattaagcatagtgaatttcgcggaacaccacgggttactttgtattagtgatttgtgttctagaatggttcgataataatcctaatttactgctagatctactagttatgg

SEQ ID NO: 37841 - DNA, 1353 bp, Arabidopsis thaliana landsberg
ccaatcagtaaagtatgaaattttttaaacatgtcataaattgatgggggtgtgtattaattgatggccatcttccaactccaaaaggacccctcccaaccagaattagtggagataaacttgacgcgtcccttcttcattctccgacttcttcacgtcaccggaaaaacgacgaatctcattgcctgagattcttcatcggaattaaacctccggaggaattaatcacggtaaatttcaaactcttcgttatctattacgctgatcgaattcaatagaatgttatggctgatcacaaagagcgatgatttatgcagcacgattctgttctaatcggagaacatttttcctaattttgtgaaattcatgttaaatttattgattttcccgatcattagtagacaatccattttggaatttgaatgataatttgtggtatatgtgaacatattttttgagcaatggacctgaccattttctccatagaacttaaactattgctgcaaaatgcaatgaaatggggtgaaacgagcccattctatatggtgcaagagattaacaagcaacactcatttgcatcatccttctattccagtctctcattttttcaccatgtcgagtttggaggagccgctaagctttgacaagttgccaagtatgagcactatggataggattcagagattttcttccggtgcatgtcgccccaggcatgatgtcggtatgggacaccgttggattgaaggaagagattgcactacctctaacagttgcatgtgagtttgaaaatatatatcaatctttgttaaacctttaatatggcaactttttgtttctgatgctcttgaaatgtatgttaacttacagtgatgatgataaaagttttgcttaagagtcattcccgtggagaaggcatgctcggggattatctgaaggagagcatatgttgaggaatatttcgtttgctggaaggacttctactgtttctgggactttaagggaatccaaaagttttaaggagcagaagtatagcacatttagcaatgagaatggcacgtcgcatataagtaataaggtaattgtctcgatggaggaaagtagtttttgacctctatataaaacatatccacagatacctcgttccccgtctatgtaggatagttttgtataatgattcatctttttcatttctgtttaaaatttcccactacaaccaccatttttttttctctcttattctgttttttttctgtttggaatttagatctctaaaggtataccaaagtttgtgaagattgtagaagttggtccaagagatggcctgcagaatgagaaaaatatagtacccacatc

SEQ ID NO: 37842 - DNA, 2350 bp, Arabidopsis thaliana landsberg
ggagcagctggacattgccctaaagatcttctagtcttcaccaagaacaaaatgcctatgaaggatgacacaaacgatgcctcaccatcaatgcatttattgaatcatctttgtggtttcaggaaatgggcactagcgaataagcataagagaaccatttctataggaggggtgataacacctatactaatggcttgtggagtgccactttagtcgactcccgttgccccaagatggatcgacattcctcacctgagatgggctttgttcattgagcatcagtgtcatgaggggatgcatattctcaagtttcagcacaggacggaatgggatgccaaatttctcctacccagccaagagctcacaaccatcgtagtgagaggtaacatcgatttcaacccgcctaatgaaaaactttttttcatggatagagcacccccgacgagagaagctccggacaatgaaaaaagggttaagattgaagaaggagctgagaatgaagaagtggaggagatggattgggagaactacaatgcgagtaggttccattttgaggaacacaaaccaccaccaagagtgagtaagagtgtgagtgtagctcataagaatgttggttcgatgagtgcttggaagaagtttcaagaccggatgttggaaaaatgtgtcaaggccatcaccgcgattcaggctgtactgagctgttcatcctcagacgccaccatggtgagacaaaaccgccctaaagaagtggtttcaagaaggcacagagtttcaccttcaagataatctgcctatgagcaacgagaggtaagtcgcccccaagctcctgcaagacattcatctcatgagcacttcgagcagaaaagaagaaaaaaaacaagaatgcttcggacaaggagcaaggaccttcttatgtccagcagaagatcactcgaccaagatacttgacgtgatatcgagcagagtgtcgagctggatccgtcggttcagaacgagcagagtgtcgagcaggatccgtgggttcagaacgagcagagcatcgggcaaaatcagtgggatcaagatgggcagtactcgggaatgaattgggatgcttaccatggcatcaacgagcaggaacccacctctgacaactgaggtaacaccacctcaaccattgtatataccatagcatctttttatttttctttgtgtgttttgtgctttggtcttgaattctctttcagatttttattacacaggggactgtgtaatttaagtttgggggagggttcaacacatgtttaacattgtgttctcttttcttatttcaaatttgcatcatccaaggcatagaaaaaaccataaaaatttgaaaaattttcagaaaattatttcacaaaaaaagagtgtcatgtagattgcatatcattttaggattgtatatagagtgtttgcatttaggattgctcatttgcataggggataatgatgatttcgaactgttaagcatcttttgattcaatgaagtaagttcaatgcccaggctgttagttctctgttgcataactgattgtttctctgaagtaagactgaaccctgctttgaatttacaacttgactatactgctttgatttgaaactcgcttatctgatgccagtccttggcgggttaggtcatcacgttttaaataattttccggctttggtttgtaggtgaacttctctcgcaaatctgtagcaatatgttttcggacatctataaataaccaacgtaacatgtacaaaatcataactcaaatacaaaacatctacttacaaacccaaaaaaacttttaaaaaaaaataacttctaaaaaaaataacaatgtcttggggtggagagcatgagatatacacattacgaagttggatgtacaatcatagagatcaagcgaccagtgaggtgacgagagagtattatgacggattacgcggtttcatgtatcaagcgacaaacaaaccatttgctcgtgagaacggtaccatattctgtccatgtcgtaagtgtctcaatgagaaatatttggaatatttaatgtattccagaagcgtctttataatagtgtatttatgccaaactactatgtatagttacgtcatgggaaaggttgtagagatagcgcaagaaatagtaataggaataatggtgtctatcaacctagtaattataatgatatgaattatggtcataaagaatctggtcattttggttatcggtataaccaggaaaatagatatcatagtatggttacaaatatatttcatgaaactactgctgcatttgctaaaaatattaatgaagaacccaacgtagatgcacaacgctttt

SEQ ID NO: 37843 - DNA, 3745 bp, Arabidopsis thaliana landsberg
ttttgcaaactgaaacccaagacagagatttattgcaattttcaatttagctgaaccagctttatgagacccatgacccatcctatacccaaatacaataaacaaaatctaaaacagatatatttaaatcaattaaaagctccacaatcacgacggatattaccattactaccagttttaacaccaacacgaccaagcttgatcatcgagttaataaaagcttgattaaacaactgtccattattagcccataagtcaacggttggctttgaccgactatcggtgaataagacttgatccgacgtgaacaatcctttcccttgttgcaagtttttgtagtaaacgttgtcgaattgtcttggtgtattgggatccatgttaatagccactcttggatctatgttttgaggacacgacgcttttagctctgtcacgtaatctatgttaatcgtgggatcaacgttatttgtcttgttgaaattgtatagccgattgaaaacttttgtgcaatgcgcgaatccaaatgtgtgtgcccctgagatgtttaagagcaaacgaaatctaaatttggaccggaaatataaaccgctaacaacatggcatatagctaatttgtttggtccgaatgatactattcttgatcaagaactagttcaaatcatcttacaggagagagcgatcatgtcattagggctaagaccgttttctgcgaaaagtgcattgagttggttgagatcaaaggtcggtttgggtagcttccctgtgacgctagaagccgactacgaaagtccatctcgccttcccaattctacggcgtattgtggtccaccgcctactttgaatttaatgtaataacttacactaatgtttttatattaaaataaaacattataatatataaatatggagggagttactaacaagattaacgacgtcacgagtggccatcgtgagaatatcagcgcaagaaactttgttacgacaatttgggacggcgtcaacagcttctttagctttaatgacggtgtcgaatccatctccggccaacgataaattatcctcatgatccttctccgccttattagtatttgtcgacgctatcatcactgatgcatcacatccctatgataataataaaataaattaccgaaaattataaaatatagtttacgctagaaatcattttttatcaaagaaaagattgttttacattgacgaaacaatcatggaaatagaggcgtagagtggcgggaatggtggtgaaagtttgttggatttttttctgtacggcgtttctgacgatttgctcgacgttcggacaagttccggcgtagaagtcgccgcggagttgagcggaggagaggttgatggcgagaaaaagtgagagagtaagcaacaagagattcgttttgttcatcacaaccattaaaaaaaataaatcaatttctctttatatgtataattacataaatggagtgagagatcttatatacatgctttgtgctgtgtgtgccggccaccggccagcttgcattcatattttaaagagaaaaagactaaatacttttctaatttcaaatacttgaatagtatttcccaaaaaaaataaaataattattgttcaattcctttacttaaaaaaacaaatgaattagtccatttttgttttgttgtgaatatagcatactattggtgttcgctatcaatgttgtgtgtatgatcactaggatgatctatctatatgaggtaatagagagtggtggtggggattgagagggagaagttgaacagtgaaaacgatgcttcacttgtcattcagaataataattgtcttatgaccacgcccatctgtttagaatgacaagcagtgctcatgagcattagcgcccattggttcatgtatgagtatcatagtcgcataagtaacgatggcttccttgttagccacaatactcacatgtactccatgcaacttcacgatctcactcacatatttcttagccaaccccgccgctccatcgggtttttttatggccagaaaatgtgttgacttagtaagacggtccacgatcacctaaatagcatctttggtccgcgacacatgcaaactgataacactgtattttattcagattaattggtaatagcttgtcctgtggaaaggctgtaaaagggtgatgacttgggtttgaggaacgccaagcgcaccaataacctacatgtgagccttgagggcccaaggagagaggttagggttgatgcgctgcagccgcaactggacgccacgtggcagagagtggccacgtgagcgggtcccacggggcgggttgttacagtaacatcaacaatgagtgtaaatatatggtatacagaattacagatatcatgaagtataattctttgagtggcaagaagttgtaggcttactcccccgttctccttcctgcagatttcatgttttttcttgtggataactagcatcagaagaatgtcacttgatcatcatcctggatttgattcggtaagtcgccagccagtatattgggatcacttttaagcatattttgaattgtatattgtaggactattgttatcttgtatatctgcccttctactgtcatttagtcaatgtttttggaaaatgtcttctgctacactttgatagaatcctttgctccattgctttcagggtggagctttatggtttcagaatttgaccgaaattcccaatggtctttatggtccacttttcccctttttaatagctggtttgcattacacaaacacacaggtatgtactgtttggttctttgttggatcatgaaacgttaagtaacaattatgctacatctcatcaactataatcatttcttttgaactatacttcctgttattttctgcagtcctgcttgtttgaattatatatacattttcctgcagataacttttacagcatcctcagttcacaaagttgataaattcacggaattggcaaaagtgagtttttttttctactttgttgtgcagtttgattataggatgtctatatttgatcatatatacttcaaagaactttggccgaaaaagtaactgggacttggttgcctggcattaagtaaaaataccaaattctgacgaaaaagaagaacatcttaagtgttcattatgctacttaacaattgatgggtgttcatttttcttctgcaggcttacaagacatttctgaatcttttgacatgtgctctgtatttcctttcattccaaatgcctcaggtagattaatctctgataatataccgccttttgaagttcacatattcttgtttccggtttgttggtacaaagaggttctaataaagacatcttctaattgaacatgttagtgtatgatactgcgaactctgggtatgctttatctttgtggccatgactatattttgattctgttttagcttaaggtccttcaactaagtctcttaaaatgcaaaagttcaaattacttgactcttactcttttgttaaaacccttaatggtgactaatcttgaaactatgccattcaaactacaccatcttcagagtcacatggagtttattattaatctagtatctgagtgagttctgtttaagagctactgctctcagtttactattaccccctggaacagctatttataacaccattctttctattaggaaaatactgtattttttaactgccacctgttcaaaagtttaatttcttc

SEQ ID NO: 37844 - DNA, 4291 bp, Arabidopsis thaliana landsberg
atgatgatgaatgattgatgaatggataaaaagaaagaagaagaagaaagataaaagaagtaatcgaagaagagaggggctaaggcattattaggttagggttcgtgtttgtcggttaaccgttcggttcggtcgaaccgaaccgaaatttttcgggtaaccgaactaaatctgaaacctctccgatcggtttaacttaattaagtgaaaccgaaccgatttgcccaaatctcggttcggttcggttcggacaaatcggttcgggtcaaagtcacaagcctactaagaactactgaaacaaaactgtatgaaacaacctgtaaattttaatcgaataaatatttatccgattggattgtgtttattttttactcatttttttttgcttatgttagaaattaatcaaattatggttttcaaacatccatatatttcaatgtcaaacattttagcattgtaactcataccataccaaaagtcaattgctttgacacccaaatggcaaattcaaatggaccacaacactacaattagcaactataaatggtaaaaatgtaaatacaccgaaaacaagaggagagaccgagagagtatagggaccatggaaacatctccaaaaactttttaattttcctcacgttatcgtttctttatctctctctctctctcacttttctgaaaaagttgtacgtccaaaatctccaaacccttttttaagaacaaatctcaatccatggcaatcatcgatcaaaattgagaatcacacaagcttcacaatgtcatcatcatcatcaacgacgacgaacacaacaacagaatcagattcatcatctctacctactcacatcggtagatcaaattccgacggaatcatcgacactacaccatttcttcctcccaccgttacaagaaccataagcgtagatgaagaatccaatccaattcatcgatccgctagacgacaaggtctaagagaagcagcgaggttcctccgtcacgctggtagccggagaatgatgcgtgaaccatcgatgctcgttagagaaaccgctgctgagcaattagaagagagacaaagtgattgggcgtattctaaacctgtggtgtttcttgacattttgtggaatcttgcttttgttgccatcggtgttgctgttctgatacttagccgtgacgagaagcctaatatgccgttgagagtttgggttgttggttatgggattcaatgttggttacatatggcttgtgtttgtgttgagtataggcggaggagacgacgacgtcacccggaggatggtggtggttctgggttgacgaattcttcgtcgcagcaatatgtttcgttagcgcaattggaggatagaggagagactaggtacagtatctctgattgatctggacttggagtttctaatttcgaattgttcactgtatatacattgaaatgtggaatctaggtttttaggttaatgttagttgatggtattgtatctgtgaatcaatgtagctttttgtgtgacctatttttcatattggtgaatattgatatcaagcttgatgtgaagcaattggtcttgttgtggagtcttaagagatagtttaggctcttttggtccttttttattgtttgtctgagtttcttttgttttcgtatgattcttgttgatccacattgttttgatggatcagtaatcctgctaagcatctggaatctgccaatacgatgttttcttttatatggtggatcattggattctactgggtatctgctggtggccaagagttggcacaagaatcccctcggatttactggtttgttatatgcctccatcttcaatgttaacctattcaaccacttccactactgaatgtctttacttatttcaggctgtctattgtctttcttggtttcgatgtgttctttgttgtcttctgtgttgcgttggcctgcgttattggaattgctgtttgctgttgcctgccatgcatcattgcagttttgtacgctgttgcagatcaggtacttctcataaccaattccatcttatatccaaagttgccacattgtgctatttgttttaagtttttaacacaacatgataaaaatgcaggaaggggcttcaaaagaagacattgagcagctcaccaaattcaagtttcgcaaactaggtgatgccaacaaacacactaatgatgaagcccaaggaactaccgagggaataatgactgagtgtggtacagattcacccattgaacatactcttttgcaagaagatgcagtaagtatacactataacacaccaatctctcctccttgacgaataacccctagatagataattatgcttcttggttcttatgattctgcattacaggaatgttgcatctgtctctctgcatatgaagacggaacagagctaagggaactaccttgtggacaccatttccactgttcatgcgtagacaaatggctatacatcaacgcgacgtgtccactctgcaaatacaacatcctcaagagtagcaacttggatcgacaggaagtctagaggaaacagctttacgtgttcatgacccacgacatttgatcaggagactttgggttaaggtaaaaaacaagactggtttgtttttttagatacgatgcattgtttgtgaaatgataatgatatctatacgaaattattacacttttgtttgtttttgatttttggtttggaaactaatcaggtctgtacatctatctgtatctatcttcttttacttgaaaccaatgttttgtagtttgtattacctctttctttctcagtcgacctcgaattgttagagatttccatcatcgtagatctttagtcgtgtctcaatgacgattttgattgttactttaaagtttttccaatttgttctttggtctcttgcttttaagtatagataaatgatataatttctagctcaaaaacaccatcactattaaaattgaaagaaaaaaatacataccaaaccaaatcagattagacccttttttttagtgcgtatactttgacaaaatttgaacaatacaaatcaaactcgagtcagaaaagattcaaacaaatgaatcaaattttttgagtcggaacctgaagtattttagtccgtttgtgataaagaaaaccgagaatgtaccggtttatcttcagacccggttgtttgtccggtttggtaaaattagaacctaacctttttatccagaactggagactttggaagaactatagaagtgttgttctcttcgtatcgtcctcaatcctcatggagactattatcaggtgcttttctttttcatttctcctcatctatggctttgatacgaccatttagtttcttattctcctattgcgaaagctactatctttcacatccctaggaatcggacactatcttatctctagtgttgatatctgtatgttagccatttagattgcctcagagttttttggtttcaccctgagttagaaattgtgagtctcggcctgatttattagaatgcttttggccggactagagtggggttttgttgtgtaaactgccacatgctgctaaattggcttgttaggtgatgatggttttcatgcccgccagttgttcgacgaattgcctcattaattttcctcggcttgtttcttaatattttttggcgttttataaatctgattcctttaagatatatctcattcgatattagtattactagatttaagaaaatcagtagtttgtctactaaatcaacaaagttgatgtctttttatttcagccttgtcggtgtatctgcgaatagtatgttcttattgctgtctaatttggattccatgtgctttgcaggctgttttgagcaaacgctgtgataaagaggctttctttcttgctagcaagtacacacgagtgacatggcggcatcaacttcaacccgattccttgttctgctcaaagatttttctgccttcagaaagatatcatggacttgtgctgcaactaattttcaccgccaatctcgttttttatgccatgttgcgaaagaagacgggtctcttactcttgcaagccttgatttggggaacaaaccacggaaatttgggaagggtaaggcgatgaagcttgagggaagttttgttactgaaatgggtcaaggtaaggtaagagcggtaaagaacgataaaatgaaagttgtcaaggaaaaaaagccagctgagatagtgtctcctttgttttctgcaaaatcctttgaggagcttggcctcccggattccttgtt

SEQ ID NO: 37845 - DNA, 3530 bp, Arabidopsis thaliana landsberg
gtttcactaagctgaaactatttgaagccgaccaaaacatcttagacgctctaattggctcagacattgaagtcatgataggaataccaaaccggtttcttaaagaaatggctcaagatacatctgtagcagcttcatgggttgaagaaaacgttactgcttattcttacaacggtggagtcaacatcaagtacatagctgttggaaacgagcctttccttcagacatataatggaacttacgttgagttcacattaccagctcttatcaacatccaacgagcactagaggaagctgatctgaaaaatgtgaaagtcactgttcctttcaacgcagacatctatttttcccctgaagcgaaccctgttccatcagctggagactttagacctgagctaagggatgcaacgattgagataatcaatttcttgtattcacatgattcgcctttcacggttaacatatacccttttcttagtctctatggaaatgcttactttcctttggattttgccttctttgatgggactaacaagtctttgagagatggaaatttggtctacaccaatgtgtttgatgcgaatctcgacactttgatttgtgctatggagagatatagcttcttggggatgaagatcattgtaggagaggtcgggtggcctacggatggagacaagaacgctaatgtaaagagtgcaaagagattcaatcagggaatggtaaagcatgctatgtctggaaatggaacgcctgcgaggaaaggagtgattatggatgtttaccttttcagccttgttgatgaggacgccaagagtatagcaccggggacttttgagaggcactgggggatctttgagtttgatgggagaccgaaatatgagcttgacttgtcaggtaaaggaaatgacaagcctttggttcctgtggaagatgtgaagtatctgcccaaaacttggtgtattcttgaccctaatgcatataacctccctgacttgcctgataatatccactatgcttgtagtttgtctgattgcacagcactcgggtatggatcctcttgtaaccatctcactgctacaggaaatgcttcatatgcctttaatatgtattatcagatgcacgatcagaaaacatgggactgcgatttcctggggttgggtttgatcacagatgaagatccatctgatgaactttgcgagttccctgtaatgattgatacaggagattcaacgaggttgcagcctggatcttcaagagtgttgaccagagtcgcagccgcggttttagttatgttggtccttcccatcttgtagtaagtacctgttgtttgttatgtcttgtaaatctctcaagttttacttcctgcaaaagaatctttcaaactaaaggttgttcccttcgattagcatagccttggaaaatacacaacttcattaactagaagaaattgaatcacagaattacatattactatagtgatctgttccaaagctggaagttaagtaatataaacacctagagtctcagagtgggattaacagagagaaatgatatttcaatcagaagaagctggtattcatgtcagatttctttgggtgataaagtatcttctcaaatatgtgtttcagcttctcgtgccgaaccatctcgtcgaggattctatctttggaaacaacttcgttgttaatcggcttgtccttctcattggtagaagagaagaccagttcggatatgcgatgtttctcactttgcttacagtacttgttccactcagatgtgtctttgaccatgagatggtaaatgaacacagcacgcttttgaccaattctgaaagctcgacttatggcttggctttcaacagaagggttccaaacaacatcaagaatcacaactcttgaagcgccaacaagactgataccctcagaacatgcttttgttgatgccagtagaactttagatccactgtctggtttgttgaagttgtcgatcatatgctgcctgtctctttgttcaactttaccatgcataaagagaatttgttccccttcagtccagtcacattctgcagtgagctgctccatgatcagcttcagagtgtcaatatattggctatacaccaacactttctctttcacggttccactgatgcggatgaagtcgataaggaactttgttttcacaccttcctcgtatttaagtctaagcctcttgagagttcctaatgttgctggcccaataaccaagtcttccttcttggtcggattgcagcacaaatacagagatgggtgtactgaaacagctgaaagcttgtgctcaaattcaaatgtgttttgagaagtgtcaattctgtcaagaattttcttctgttgaaaaggcgggttcaacacgacaacacagtctcttagacctggaaggctttcttgaaggatggttccttcatggacatgcacaaaatgagcaatcatagccttaagatccacaattctgttttcctcattcacccttccgtgttctccttcttggctacaccttgctaagttcatgtatcctcgaagaaatcgtatctttatcagctggtcttgccaggcataagacgttagaaagttccttgaaattattctggaacagtgtccctgaaagaaagatacgcttttctgttctgacttcagtaagcactttccaaatgagactactctggtttctcggggtgtggccctcgtcaaggaccagcaaccccggcaattctaccaacatcctcctaaacacttgcattccttcagtgttcttatttgccgcgagcttctcatacagagggtagctaattccaagaatgcttttctgcttccaccacgaaactagcttaaccatacggatggaattatgatgcctatttccctctaaacgtgagacagcttcagcatcctcataccctgataactgcagactattcatgttataaaatggaatgtttacgttccatttcctgacttcgtcttcccaagtacgcattagagttgcaggagctatgaccataggatggctatttggaaaccgttttaagtatgactgaagaaaaacgacggtcaaacgtgtcttaccagttccagccttatgcgaaataatgcatccgccacttcccttaacccctacgctgttcaactcattaatttttgttgtcccagctaaattcttccaaataaattcaaacccttcttgttggtgtgggtacaaagtatctttgatgccagggacgtattgccagacagttccttctatattatccaaaggggcgacaaaactgctgggatctgaagcatcaaactcaagcctgttaggtaaagggtcaccctttctatcactacatttcttattgtcattaacactaggacgatacttgtcctgcacaatgcaggaaaatgaacatgttaagaactcagataagaaaatcaacaaatagtacaactcaatctaggatttcagagcgctataaaaatgttaccatggctggtgagatgtctttgatctcgaca

SEQ ID NO: 37846 - DNA, 390 bp, Arabidopsis thaliana landsberg
tgagtattgggtagctgtggttaaaccaggtaaaatcctttatgaaatgggtggtgtacccgaaaatatagcaagaaaagctatttcaatagcggcatcaaaaatgcctataaaaacccaattcattatttctgaataggaatatataatgaaaaaactaaataacatttaagggtaaaaagattataagttttctttttttgacaaacaatatttttttacttcgtcctttgcattaaaagaagagatacaaaaaaaatgatatgattcaaccacaaacctatttgaatgtagcagacaacagcgggggctagagaattgatgtgtattcgaataataggagctagtaatcgccgatatgctcatattggtgacgttattgttgctgta

SEQ ID NO: 37847 - DNA, 3774 bp, Arabidopsis thaliana landsberg
  unsure (1)..(3774): unsure at all n locations
gcccttggatcataccacacaacaaatagtaagaagagatagagaagtgaggattccaaaacactcaccggtgaatcattttcctcttttccgtaatccatttcgagccatgtataggacttgggatgtgggataaactcctttctgtcagaccaataattctttgtcttgtcattgaacttattggtaaatatctctatcgcacgatcccatgagtcataaggcccatctagcttactttgtcctttcacaccaactcttccccatctagtgtaaaccatgtatgtctttttactatccgactctacacaatgcacaatagataagatagatcaatgatgatagtatctggaaccaagaagaatgacaaagagtcatcaaaagctgcttcaagaggtttccagtactcgaacaagacaatcattgccttattaatctttgaagttattgtttaaggttttggaagactgacctaggacttgtaggacaaagaacttgttattattatccctgacatttgtctgatttaagatagcatcataaacatcatcaccctacaacattaaacaaaaatcccagttctaaccacattcatgaacacaataagatgcaaaaacatcaagataaggttgataatcctcaccctttgtagaacatggtactgactctttatctcatcaggaatccactgatctaacaccgctgcacccttctttgtcgcggttacgattttctcttctttcttttcttcttcaaagccattgttgtcatcttcagcttcatctgtcccttaatacacaatgacaataacaacattaaaaagactcaatttttaccaaatttctcaatagtccagagaattgaacaaaccattactggatttgactggtgcattggaaacgttattagcatcattgcnnnnnnnnnnnnnnnnnnnnnnnttggttcctgttgtatctaagcctctcttaatagcttcctcacgcaattccttcacaatcatcccacgaaattcgccaattgcaatcaatttgttcgattcataagtatcattagaagaatttcttttcctcttgctctttgattcttccttcttagtgtcttctgcgatagcctcttcaagcctctccacctacacgaaacacccaataaacaaattcgaatatcaacaaaatagaaagagtatttcaatgcaattcagagaaataccagaacggctttgattccggtagtactgagtccacgctcagcgagttttgaacggagttcgtcgactttgagcttgttcgccattttcgtcttcttcttcaggagaatagttcgtcggaaagggaatgagactgaggaagtatggttttcgtcagaagtgagttcgcgcgagcatttgaagagtcttcttcttcgttttcttcttcatcaatggcttcccttgaaagctttagggctttttgaaaaattattttaaaattttttgacaaaagttctcgttcatatttgtggatatttcccatataactttttaatctccaaaagaccccaaacttttggattgattcttaaatccacccctgacctttttaaaatagtatttatttcctaccattgatgatggcaagcaatagaaaatcatgaaagataaaaaaaaaaaggttaaaaatctagtaacaggcaaatactttgaaaaggagttgaaattttgtacataggtttaactcttctattaaaagaaacgaaaaatctctatgttttaaaatgtactactaatttataatttaagaacatttttctgaaaattttgctggttgtttaacgaaaacaaaaatatacaaatagtttttggctgtaatgctacgccactactcacttttccaaggacgtgcatacaaattaccgtaaacggattataagactttgttgactaatgacacaattcttttctattaaaagagattagtctgcttgaagaaaaagggacacaaattattcgaatttcgaaacatgttaatcaaaccaaggtcttaagtggctaccaaccgcacacgagtgttgagccgagcagtgctgtgtcgagccgggctggatttggcatttggaatatatgaaatgggccaacaacccaaaagataaaatttcgttacttggacagtaaaaactaaacatgcatgtttattagcccgtaatctgcataatcacaacttacgaagaagacataagaatcaacaggcccatcataaagtgggactaacgatttggtttccactattatttggcccatatattgttaatattgtacacttcaaatattatttagttagaaaaaaaaaaaaaaaaaactcttgtaaaactggatggttctagtttagttttaaaaaatggttagatgataacgatattaatatacgataaagtttatataaaatatcttttcataatcaaatttacatgacaactaacattcgggtaagccatgtaaaagacgagatagagattttgaccaaagaagaaaagtagagagaacatgcaaaagccaaaaagaaaacatagccaaatggttgagtggtgtagatggaccgaaccaacagacatgttctcagttcatataccaaccgcctaacattacagcctgtccccatcccctatctttatttttctttttggctcatttagcttcaactttttttaataggtgtgattagaacatactaaaaaaaacatatgttttaacttatattatatgaataaagtgttgtttttaatagtttatatttctattacaagtacaatatataggatattttggttaacaattttaaatttaaaatatattgtgagtacaaatcattaagcttaacacaaatgttcattgcttcttaattcttacaatcggaaaatttggacaaaaaatctagactaatctccaaaacattgtgaaaaattgggggcgttttttatcatttaaattgtctatagtggtcaatcatcattacaaaaaattgttttttgttgaaataataaattataaaaaaaataaacgtttatacatagaatacaaaacttttcttaaatcaaaacacaaaaggatactatacaccatcttttatctcgatgcaaaccacacttgtaatcccaaaatacatacttaaactatactatactaacatgaattggttatacgattatctatctagttagctacataattcatataattggtttttaaaaatatacttatgtaatgatagtaactaaaaaatatactaatctcgagaaatccaacaaaaatgctatgatagtatataaaataaaatgaaagaaagaggaaccaagttgtgaaaccatttaccaagaagaagagaaaaaaacaagatggtcgagtctcgtgatagtatgaagctggggccgaaaccacgaatcaaagaaccatttgacgatgcaagtggtcatcgataaccaatcaatagaaactccaccgcctcaaaatatcatagagctatttaatttttcatactatcatttattgtaggctataacatatttttgtattgtagatggacggctagtacacgcaagttagtcaataaacttttatcaaatggcatcttaacatgcttaacctcattttataattcgaacctcactttgcctactttacacacgtctacttatagtagataagcatcaatcattgaaccgttcgtataaaacaattttttttttgtaagacgttataattagaaaccaatccaaaataagttgaaacgcaaatttacaaca

SEQ ID NO: 37848 - DNA, 3682 bp, Arabidopsis thaliana landsberg
  unsure (1)..(3682): unsure at all n locations
agttgttcttagagtgtctctccactgtcactgcagaggctgtcaaggcaaagtgaagaaacatctatcctaaatgcaaggtgaatcctctgttctcactgttcttaccctctattgttacagtatttacttttcttttacttgcttttcttatcaaaaacagcaatacatattttacttaggttagtataagagatcaaattatctaactatgagcaagttttagtgcaaacacattttttggttttaagttgggtacgggacctatagccttaatgggtaataatgcattgncactatacgtgcaagtgtgtaaccgatctgatcatgtttctacaattatctctttcatattcaaaaaaggtgaaaaatgatatttctgatataatacttttgttaaagtttctataaaatatcaaaaatataatattatttacaatatcttgaagatattatatatgataatttaaggtaaagtaaaatagatattttgggcttggtgatacccatatgatctgggccaagtccatagattttatctatgaaatagtttgtaaatggatttagttaaagttcatgctaatggttttttttttttttttttggcaataagtaggtgtgacatccttcaacatagattttgcatcaaagaaggtaactgtgactggagacatcactcctttggaagtattgggttgcctctcaaaggtcaaaaatgcccaattctggacaccacctccaccatcaatcccaagggcaaatccggaaacctaaaagaaccactcacttttgtgtatttgtgttgtcttcctagctcttatttgcttgaatcagatcaatcgtaaaatgtggactttcctacttttatgattaaactgtcattacagggacacatgcttctttatgataaaattgtcattacatactgcattatcctggtgttttttttttgtttccttcccttaaactatgtaacaaagagattatttaactttctagaagattgcacctaccacaagctctgttatgagttcatctgtcagcattacctcaatctctctacctatgatttcaatgtcatcttctaaactcagccactgcaactccttctcctccacatcatatttgcttggtttctcgtcttttcttgtgaccaaatctcgcagagtctcttgtatcttgtttgcatcccatttcgggcatacctttgtggatttaacccaagggtgtggatccgacaactgctttaacatatgtagtacttctctgctgatctggtcaaaaagaagctttctttctaaccgggttgaggttttcacgctggagtacttcttctcgagatcctcaaacaaggatggctctacaggtgttgttgccatgacaatgttgtggtctgagtcactgaaactggagttggctaggagatcaactaagtatgatgacttccagtcttcttctctgagctccttggtaatcatagcctcatcagttattgtggatgactcctcttgatcagtgtcttcatcactcgaaacgagcatgccaccttctttgtaagtagctgactctagtttgaggagctgaagttgcattctgagtcctggaacgtagagataacagttaacacctcaaaacatttatagttaccccgtggatctacccgaatcaatttttgtgatacaaaaatattttaatgcatgaaagaattactgaactagcaagcactgattgactacctcggagatccgcgctaacactctcaaagcattccgaacctgatgatacatcatcgtcgaacgaagcttctagaactgaaaccggacttggttgatctccttcctttgagctttcacgaggctgtggtggatcaggaaccgaagaatgattcacatcctcagttgtcctccttgagatatcctagaacatcagtaaacaataagatatatgtgattataacaacctgtatattcaaaactcatgctcacttacagggtcagttaccgaggtgacagttgacaaatctagagcctcagaagacattgctgtcttgatatcatcagaagctgaactatcttcagtgtctgaatttgcatctcctgagaaactgctacgtgctttaaaaggagatgctgacttgcttggaatcccgtcgttcatataaacaaacttgcttaaacttggggtgatgctgacctctggcgaactattgtatgatgaatgagatttgttactgccaggtctagatttgcttgacaagaaagactctccgtgatgagaagaatccccctgcactaatgcatctcgattgatcaaccccttaggcaacactatggtgtaaccaccagcgctctcctggttcatgatggttctggattttgaaaaacttcttgagcaggatcctttccaaccatccctactgctgattccaactggttctggcaattcaggccactgaatgttgttctcaaatcttttactaatcccatcttcgaaactgagtccgttaaaacttgctggccttgcctccctatctgaagtggcaagcatttcagctaatgtcccacttctactaatttctatctcgtgctcaaacttgtgtgtcagcttccatctctctgacagtctcctcttagcttccctactcacagatgatgttgttgacttggaaggcaaagatcgatggtagttcctacggttgaaggcggttcttgttcctgaagttactggcactagctctgattcacttgcggagtcactccctgatgagctttcatcccctgcatatcctctaaatcctgaagtctcaaaactcatggcacgaccattgccacagctcaccttcctttgcctagacattattttggccatttctccacaatctcttgaattctgtcttgacaggcggacatcttcattacttttctgcctgccatgagtggtggtgcatggaagcctacgatctgctctgaactcatcggaagaagagcttggcgatgcaaaagttctagcagcataacgtggctccccgaggttaggtttcagaacaacaatcttggttggctgcaactcactcctctttctcagctcctcatttggtaagtcaatcgtgtcataagaagcatgcctagtatgagaacggctaggacaaccactaccaccaccaccattccgatgaggcgaccgatgactcttcctcaacaagtccctatcaactttctgagttttcagactatccacatgcctctgactgtttggcgacttcaaggatggtgcttgactgtactgtggcttgtgaggtgtgctttgaagannnnnnnnnnnnnnnnnnnnnaatgaatctgggtgctgaagaaacttcagtaagaggtctttgttagagtctagagcctcaagagcatcattaaactctttagaatgacgaagtttatcatccgttgatagccgcttagcctccatgaacttctgccgtatgaatgccatctccgcctgtgttagattagcattcaccctcccctgatgatataagtttctgttactctctgccatctttgcatccaaaacttcgaaaacatctttaaacttctgctcaccctttgacgcgctttccaacccctttataagaagtgcctccaaaactcctgccttgaagattctccatagacttttgttgcttatgagagga

SEQ ID NO: 37849 - DNA, 2523 bp, Arabidopsis thaliana landsberg
  unsure (1)..(2523): unsure at all n locations
tttgagaacagtagtttcaatatcagaatgcaagctttagggaataaatgagtttaattaacataccgccattgttgtcttctgtgcaagtacttttggtgactcatagagcgggcgtaagacctcaggcacgctacaagcctatttaagtgaacaaatatgcaaacagtttggttaacatttccaagaccgaattggtgcacagtgaggctcgtcacctcaaaatccatatgatccactatgtgtatgaatgagccaccaccatcacaaggccgtatcaagtacccactggaaagcatttctgctctcacaaaattctgaaccagtggcatactaagaccgatttgagtgctcttaagagatctatcgcacacctattatacttattaaaccttgtgaaaagaggagcaacatgaataagaacactgacagacaataaaagctacataccacaaggctgccatcttctaaaacagaggtgaaacgtaacaaccacaaatcgcgtggtggggcgcaatgtagttggtgcatagagctgcaattacgaagaggatgatggttactattttcaactttagaaaaataattctaactgtgtagcacttatggtttaaaactaacctgcatataaagcagctcaacggttccaccattggcagttggcaacacgttcataacatcaacagctcgacattcgcggaaccacgaaggacgatccttgacgatctctgcaacctgtaaaatagagaaaagagatgaatgttgttacatatgtagacacatgtagagtagtataagattgtataaatcagcgatgaaaatgattctatacacgtacccttgtaggctcaagacccactaggccacaggcgcgtgctgccacaccagtgcaaccatgagaaatagcgatgattccaatggaatccggaccaggctgttacggaaaatacaaaaacaaccattgaggaaaaagcagaataactatatccaattaacaaaaacaaaactagaggaataaaataccttcattccaggcatctgaatccactcaacagcggttccagttgcctttgaaagaaactctgctaaagtttcttctgcaatggacaaaagtctgaaaacataacatgtatcaatgaatctcagaaaaatatgacaaaagtgtagtttctaactaacagagtaaccatattccaattaaagaaccaaccctgcaggactagcatctctctgaggattttgagatgccaattggtgctgaccactcgtcaccaccgattcacagcttgtgtctttagctggaagtgaaggctgaaaaaaaagagacaaattgatacacataccattaaaatgaaattattgttcttaagaaacattttagagatcaataaggtaagaaaactgaagatattgcaagagtagaatcctcacattgggagtatgttgacggaagtagctgttttcatggaccagctgtgacacttgcttctgcaatctatcattctcctccatcaagagtttgttcattgccgtcaacttccgattcacagcttgaagccgtgaagcctctttcctttgtttctctctacatctaaagttcataacagaaacacaaaacaaagattagatcaagtagataaaaagaacaccacagaaacttccattcaccacaattcccaagcaatgaacattgttattaccttcggttctgaaaccacactttgatctgtttaggctcaatgttggagagaataggacactctctgatcaactgctgacggcgaatagaactcggtttaggacagtcatgataaagcctctcaagtgcttcaacttggtcaggtgtgtacctcacatacttcccattatccaaacatcccaacttaccatccttgcaagacattgccattactcctcagaaatattcttcttatttcacaatcacagaatctcacaaatgacccaactaccccctttagatgattaactaaatccttctagacagaagataaccacaacatactaaacaaaggagacagagagcttcttagtccaccacaaactccacagcttgaacaactaccaaatctaagccatctcaaatcctaagcacttggagtagcttcacaaatcacattaccgcataaatatcgaattctgtttccttcaaaacacactagaggctttttttcttcatgcaatctcaaaagggcagacaaagacaaaacctatcctttatattactcctcggcttttaagagctaaataccaaaacacaagaaagaaaaacagactttaagattacaactttcccttttacaaacaccgaaaaaagattcgaccttttctctgaacacacacacctaaaaaaacaagaaagttacaaacttttttatatttgctcgtgacgaanaacacacagaagcaccgagatgactcagccattagaaaccccgattccacctcgaaacgaagccataatattatcagttctcaaatccatattctccttcttcgagctct

SEQ ID NO: 37850 - DNA, 2061 bp, Arabidopsis thaliana landsberg
ttaattttgaatttgaccatttcagcttattctttccagaatatttccatatgagatttagatccctaattttgtttattctttaagttttcattcttgtttgaatgaaaaataaattaagttggccaattgaagtgttgccttcaaacttactgatattcttaggttttacttttagatatacacagtgcacaacagttcaaaatagtatttgagggatcaaatccacatataccagattctcatactaaaaatattcgagagttgaattaattaagctaagataagaatatgggttttttgtgttctaattgcaagaattttttaagaagttaatgtgacaaacaatttgaaactataaaacaaaagcatcaatcattaggataattcgtagagaaacatgacttgaagaaacaaataatcgaatatagaataatttaagcatcattatagaactcaaataactgaataagattgaaccacaacccacgatagtttgtaaggagtttgataagtttaaacaagtgtctttcaacttatgtgggtctgtttaaactagaacagggtctttagggttgttttatgttctcttacatataaatacatccttatgagacatataaaatcctaagttttcaatatcttgtttcatcctttagatacggtcttttagcaactcttttgagctaagatccattatgttacgcaaatctcttagatttaattttttatctttgcagttcttgcatttatgtttgttgcatttactttaagttttttcattaaggtaacaagcttctagctcaatatataaaatggactattagccgatggtagttactagttagatccttgtatagtatgataacatgtcacgtactactctatcaaggtctactagaggaaatagttggcttgagattcaaagataaatttgttcgatgaactaacaagtgaatcgagagcatgcttaatcagttgatagatagaccaagagtacattctttttatatttttattaaatcaaacattttctttcacgcaccagattatatctcatggatacataccaaaagatactaaatagtaaaatgtaagtaatcacttaactcgttagaagtctagctttgaataaccttcaacagcttcaataattaataacaagccatcagtcagcctctatcaatatctatggaagctaagcattgccaaaattaaacatttttggtgaagatctctttataatgctctttgagtctttgtgttgcagaaatttgtaaacaagagatagatgagagttgatagttatgctgtgtgaagagatcttggaattggcgctagttgtgcacatgtcgagtgaccaaataagaaataaatctatatatgagaatgtagcttctatgttgatccatgttaggggtgagtttgttgtcttcctggggtactcgaagaatagaaatataggactctagacccactaagaaagtaggtaaccacactcaatacaaataaatgcaacgtgaaccaagggacaatgcacaaaaaatttgtcggaaccctagtttgttttataaaatgattcgtgaattacaaaagaaaaaagtaaggagcttttatcggatcagtctaaagttctaaaatgctaaagaaataaataaaaagtgcaaaattatacttcctctgttcctttttgtttgattttttagaaaaaaaattttgttcctaaaagattgattttttaagttttccatgcaatatttattggttagtattggtgaattgtaattttcaaaaaaatagttaattatcattggtttagagttatagaaaactgtaaaacacaaaaaataatacatttataatcaacatttaatatattttatttatatttgtgttttctctaaacaatcaaacaaaaaggaacaaagggagtaagatataaccattacgcttgtcttaagtcttgagagcttggggctgaatgtgtggagtgtggtgtctaggtacattctggatgacgtagaaattctttatcacgctttcaaaaacataaggaaagag

SEQ ID NO: 37851 - DNA, 3128 bp, Arabidopsis thaliana landsberg
  unsure (1)..(3128): unsure at all n locations
aatgcaacatgttggagatactactttataaaagtttatgatttttttttaagttaagaatcagtgagaatatgcataagtttccacgagaaaatgcaatatgttttcggtcatgaatgaaacaatggaaatgtcaaaaggaaaaaccctaattaagggtagggtaatgtgctagtcaagattttacttcttcaccacggcagtgatttacaaagtattagacaaataaaccggccctaaaccctaagcgagtgatcactttggaatttaattaacgacttaatgatcagatagattaaaattcgttataaaatcagacaacatttactacatcttggtccccttaagattcggttttaacttctgccaaaatatctcctaagtctcctaagtctcatgagtcttgtccataatccttcttgatccactacgttaagaggaaccgggtctctgaaatctgcttttgtgcttagctcctcaaaagcgtttacaaggttctccagccttgcaccaaactcgatgagaagggatgcaaacgtagcttaagacaaagaactcgcgctttcgtatactttatatactgactcatttaccacagaaccaccaatgaaggacacacttggccacatctctggttcttaagcatcatactctcgttgacatccaatgctgagattgatcattactctgatggttattgctgttgttgttgttgttagtatcccaaatctggcttaaggatttgatcactttggtctcgtcgtctttggcttcttggtcgttttctcgagcttcttccgcttcagcttgctctttaatagctgcccagctttctgagttgacaagaagatatgatttactatctattttcatttgtagtgcctcggctgctcgttgaacgtctttcagaatctctcctaggcttaggcttagcttctccattttctctactttttctccaaacaaacgtaatacttttgctccttcattaccaactctccgaagctcgttactgaaaacatgtcttttctctggagatgcctgccatatcacacagcccataacatttaaactaaacaataattgaaccattatatctaacctagtaacatacaagccaactacatcaactttttataatgctgaaaaccttatatatataaagagctaactttattttagaaaactaaatatgaggacctaaaagctactttatctcattaagtacctttgcataaatatgtttttgaaaagggcctacaattacaattttaaattttttcacacatgtatgctataacatttatgacacctataacaaaacggattagacattttttcccccggttattcaattcatgtgccgtcatcttttcttttcttcacatgctagacatttatgacgatacacactcaaggagttatgtttactcttctattaatcattcacctttctagcaaaatggagcatagtaataactaataacacaaaacaaattgtttaatgaattagtttaacaaggaacctgtatttctgaaagaatgcatccatgcattgccatgactgtgaacgcgcaatgcctcactgcaccactaagtttgacatagtttttccaaggatggttaaacgttttgtaaggtccatgtggaggctcccatatagcgaaatcaagctgcgaaaacagagctcttttaatgctataggtatcaccataatccggattttaaagatgtgtctccacgatgcgtaaaacataccaaagaatcttcttggcttgtagattgaacagcggatctgtacccgctgtataatggatcatctgaagcttggtacgtgagtatcttcgacggtattctctcgtattcgacacattgcaagtaaccattaacacatcctaaggataaatacaaaaacctgaaataagggacattgaaataataagctaaccatgttataacagattatgttttatctaaccttctagggaatttgcaacattcttgaagtttttagccaccagtttatggagatcttctccggcccatatcggaaataaaaatacattcacaagcaaacaaatggttgcaccaagaccaataagcaaaatcctgtaataagcagtgcttaagaagtctcttgagttgttccccgaaacaagaacgatancatatgtcaacttgaacactctgaatgcgtattcatatggcttcatggccgggtggagttttgaataactagcaatgaaacctggtaggtcaagttcaaagcgaaaatgttactatttatcttcaaaacctcatgtagaagacaaggaaatgcggcaacctgctaggaaaatgcaggttatgatgatggtttgctcgaaatctcttgataaaacagagagcctcgcgatgccaagagcgagccctccagcagatactgtgcctatcgctctgttgaatcctttgaccaaagttgctcctgaaattaaactttgagttagggaaatgaatttaagtcgcccaaagaaaaattatatcaaagctcacaggctacgagaaatttgagcgaataaacgagcaaataaagaattaaaatgtgataagcattatgcatatgtcataaataagaattagacaaaacaagttcatgtgataaattaagattgttaaatttgagcagacacaaaattcaaaaaattattatccaaaaaagaataaactatagttgtatcaatttattaatcttattataactcagcataaagtaactatcaaatcaattcagtatacactaaatactaaacccatagttggataaaatgtatttatgaatttaattttatttaatttttaaaattgtttataaagtattttcaaaacttcataactactgaagtattttcaaaaatacataaaattatttatgcatttatgaagtattttcaaaatatttctagttggataaaatgtactcaccaagtcaaaacttatagatttaaattaactaaaattttaaattttaaaaactcgagggaaatgaaaattaacaaattgttaaaactataaataattgattaatggcggaatatggaactgcctaatgctgctgattaggacctgcctaatactgtttaattaaaagt

SEQ ID NO: 37852 - DNA, 2594 bp, Arabidopsis thaliana landsberg
gaaagaaagtcagctcaagtgtctcaccggaaaaagaggtctgcctgagagatctcgccttagcatctagcaccgatagacaaggaaattaccggaggagcaacgtcggaggaagaagctcatatcttcaagggaagcggctccttggcttccgtgcctgggagagaatattagggccgtatggtaatctaaaatacgagattggtgaatatattattttaaagctactaacctatataacatccacaaacacagttgataaacgcattatcacacacattatggagtggatggacgctcatttagtagtagattattatttgtggatcggtttttcgagatatatataccgttctgctttgtttgtcaattatgaaatttacatctgtagaagaagaaaaaaaagagttgaattctgaaaatatattcttgaattatattaaacagtacaatactaacaaactgcctacaataaaaattggttcgatagaacgaagagattgtaactgaaacatgttcacagtacattcaccactagactacacaaatatatataattagctatacgaaaaatttagttcgatgatcatggttatattccacagatgatacacaaaaaatgtttcaaataacaggatttagtacgtgcagatgatacacataagttaaacatgaaaatcatacatgtatagatacaaaaagcattatgaattcatgaaaagaagtgaaaataaagtaagaaatgatgaatgataaaattaagttaattaaacgagaaaaatgataccattaatagtgttgagtaaattttccaaggatttcttctatcccgtcatgtaggagattctatcttcaagagacatgcatgcgcttaaacactaatcttacaatttgttatgagcgtaggcatatcatgtggttggaagatgatgattccatcgagctagatgcatagatcaaagatgttttgttagttgttattgttcttggggacctataaggaaaaaaaaaatagggaggttttattaggggaaaattgtcaaaaaaatcacaaactttcaaatttgggacgatttaatcatgaacttcacggaaaacaaataaatcgtaaagtttttgttaactttcgaaataaatgacaaagtttttgttgacttgccatttgagtcatgtcgttaaataggttaacaaaactttttacgatgttaatgttccgtttatctgctctattagaacaaaacaatgtcgtttattgctagacaaaaaacggcgttttgtctgttgaaacaaatttaaaccctaaatcctcaaattgatttcattatctgcgattttgaggtcaaggtgggtctgtgatttttagattttgaaatcgatttggggatttagggtttaaatttgtttcaagacaaaacgacgatgttttgtctctgcaataaacgacgttgttttgttctaacagagcaaataaacgagacattaacgccgtaaattttttctgttaacctatttaacgacatgactcaaatggcaagtcaacaaacactttgtcatttatttcgaaagtcaacaaaaactttacgatttatttatcttccgtgaagttcaagattaaatcgtcccaaatttgaaagttcatgatttttttgacatttttcccgaatatcatttatgaattatgatacaatgttactaaaaaaatcatttttatgtctcatgcatgtagtaacgaacacacactaatatagtaacaaatgatcagacgttactcttaaaaactagagtggtcatcatgttcaaactttaaggtacattagaccatctaattagaaccatgcgtaattagtattgttaagtaaccaaaagaaataacgacgatcaatagtaagttttttttttttgtgtgtgtaaccaataggtagtacttaagttaaatgtatattatttcattcctatttctttaaattggtatcgattcattctaaaatgttgcatggattttttttaacatctttagataaagttttatgttccgttttttttttcaggtgacaaatttcaaatgtgggggttttgtcctaggactaggcatgagccacaacatgttcgatggagtcgccgctgcggagttcctcaactcgtggtgcgagatggccaagggtcttcctttatccgtcccaccattcttggaccgtacgattctccggtcacgaaaccctcccaaaatcgagttcccacacaatgaattcgacgaaattgaagatatttccgacaccggaaaaatctacgatgaagaaaaactcatctacaaatcatttcttttcgaacccgaaaagcttgagaagctcaagatcatggcgattgaagaaaataacaataataaggtatcaacatttcaagccttaaccgggtttctttggaaatcaagatgcgaagctctactgtttaaaccggaccaacgggttaagcttctgtttgcggcggatggacggccaagattcatcccacgtctcccgcaaggatattgcggcaccgggattgtccccactctctcacagacctccttccctccaccctcccttccccttcccact

SEQ ID NO: 37853 - DNA, 6148 bp, Arabidopsis thaliana landsberg
gactcatggatttcttggttgatggaaaattaatttagacttcaaacttatgagaaaatatgccgtttaaactaagatagtgaatttgtataaataacaaaaagggataagttagttgttataatcttcaagtagctaaggtgagagtggtatttgcgaaacataatattgttttatttagttatgcttctttattcatggcatataggcttaagatcacattaccttggacaagattaggtaattatatgatttttgagtttatgcatatcatagcatttttatcaaacatcaactcagcaatcaccatcattacctagttaattttgtcctagacaatcagatctaaaacatttatgtcatgaatcaagaaacataatgaaacgaaactatgttttacaaataacattctcaccctagctacttgatgttgaaaaacaacttgcttctcatttcttctcatttaagagagatttaccacttgagcttcaaccacatactcttacgctccagtactgtggttctccaacagaaacctaaatccatgagtcatgaaggctcctaggtaaaaattttaagctcaagcggagttcgtttcccaaaccaaacattacaatttgttaaaatatattaaaaccaacccaaaccctaactaatgcaatcacaatcccattattggatctatagccaagagttccatgaaactcgccaccgaataaacttctaaacgttgaaaaatccatatcagaactgttttctagggtttatttttgaccattttttatacaaataaacttgtttttttgcataaaaagaaatcaacgccatggctagggcttacctccactgacaaaggcatcatatggcttctctaacatgtgtccgcaaaagaaatccaccattatctgatctcacttacctcaccatcaccgtggaaaactctcgtctccattgacgtcgatctgcttctcccccttcctcctttgctttcacggctcgggtctggttgcttcttattttggacccatcacgatcttctctcttttctcttctctctcacgtagcttagatgatgacttactacagcgatcacaacatgacaacaacaacttcttggacttactttcattagatctcttatttttcttttctgtcttttgcttaagcggctcgttgaagaggatacgcgttacgcgaacacaagacacaacaaacccttgatgttttgtacgttgctgggttctaatgggcctaatgggcttggcttcttttgtcaaaaaaagaggatgggtttgagatgttggttttaggtgacaaaaacttaatgagaacgatcttgcacgtgacaaatttgactgatgaatttgatccataataagttaatatagaccttaaaatgggtgatattttttaagtatcacaagtccaaaaattatttttatattagtaaaacaattagaatgaggttgatcagtatcagtccagtgatatttgtgataccagtatcatctgaggtggcttcttctgattggtcacatttaacaaaagcaaaaaatattatatatatttattaaacaaatattataaataatactaaaaaaattcttaatgatactttgtgagtattacctatgaacatgctcttagtcgcttcagaacgatattttttaggatactctaatataacaattttacaaatttgttcattagttcatgtaacaagtcagaggtttcacaccaaagttttcatcatcatttctgattgtcatcagtatgaacgtgggttgtattgtgtattgataggaatgatttacaatatatatagaggcttaaccatagggtttagctcatgaataattacatttataaccttaactatacttctcctttacacaccccctcaagatggaggcagttccttgactccaatcttggaattgatttcttgaaaccttggacgatgaagtggttttgtgagagcatctgctaactgatcattggtagagacatgtgtaacccaaagtgcgccggactgtatgtgaccccgaacgaagtgatagtctagagcaacatgtttcattcgcgagtggaataccgggttggcacagagatatgtagcgcccatgttatcgcagtaaataacgggtgcccgtgataacgtaatacccatttcggacaacaatgagcagatccatttcaactccgaggccgtgttagcaaccgcacggtactctgcttctgttgaggaacgagaaacactcttctgctttttggatgtccaagatatcgggctgccaccaaagtaaacaatataggcattcgtcgataagcaatcacctatgtcaccggcccaatccgcatccgaaaaagcatgaacagtaagtggaacatcggcccgaagaaagataccatgtgatgttgtgccaagaagatatcgcaatactctcttagcagcgcgccaatgttcatctgttggtttgtgcatgaattgagacaaacgattcaccgcaaatgcaatatccggccgagtaaaagataaatactgaagactgccaatgaccattctgtattctttagcatccggaagagccgtcccggagaatagagaaagcttgggtgtcgcagccattggtgtggaaattggcttagcatcgagcatgtgcgtcttggcgagaagatccatgatatatttgcgttgcatcaagtgtaaccctctctttgtgcgtgttgcttcgataccgaggaaataactcaattcgccaaggtctttgagagagaaccgagctgcaagagaagcattgaatccctttatcaaggacgcatcaccggtgattatgatatcatcaacgtagactaacacataaagaaatgcattagcgctcttgtatataaacaacgatgtatcagcaagagaattctgaaatccggattgaacaaggaaattacgaagttcctgataccacgcccgaggtgcctgtttcaacccatataactctttccgcagtctacacacatgatgaggacgatcacgatctacaaatcccggaggttgtgaaacataaacctcatccgttagtgtgccttgtaaaaaagcattgttgatgtcgacttgatgaatattccagtttttcttaaccgctacttccagaaccatacgaactgttgtggatttgataactgggctaaacgtctccgagtaatctagaccatattgttggttgaatccgcgagcgacgagtctagccttgtacctttcaattgaaccatcaggacgatattttactgtaaaaatccacttacatgtaataatgttttgagtagcagccggtggaactaaatcccatgtgtgattttggatttgggcatttatttcctcagccattgcatttcgccatcgcggatccttcattgcctgcgccacagtggttggaatgattggtttagttgtggcaattagactcaatttggttttgggttttgtgatttggtttttagctcttgttctcatgggatggtcattttgtaatggtggaggtaagtttggaatgattggtggaggaggtgattcaccggaggttgtagtttgtgatgaggacgtgtcgttgtgtgaggaggaacgtgtttgagttggtgtgatatttggatttgggcttgtgtggattgggctttggtttgtagaggaaggttgacttgggcttttgtttgggcttggagttgatgttgttgggcccttgttgaatgaggcccgttctgaatttggaggagatgagaattgtggcgcaggtggagacgtcgacgacgagctgtgtggtgatgacgacggagtgattggcgacaacgacggtgatgcgttattgggtgacactgatgatggttgagctggcgacggagggtgaagaaccgagcacggaggcagagaagaatgagctatttgagtgggcacgaatgtcaccggaggttgaccaggcgagattggcgattcagcaacaacggtggatgacggcaacaccggcgagctaaaaggaaaactcgtttcaataaattgcacatgtctagaagtgtagagccgaccactctgtatttccaagcacaagtaggcactttgcgttagtgaatacccgacgaacacacacggcgtggatcgctcttgcaacttgttagcccggtacggtcgcagccatggaaaacatacacatccaaaaacccgaagcttcaagtaatttggagattgcttaaatagtttgacataaggagacaccccggttatgacctcggttggcattcgattgattaaatacaccgcagtagcgaacgcatatggccaatatgactttggtacagaggcatgagtaaggagagtgagtcccgtctcaacgatatgacgatgcttcctctcagcaataccattatgttccggtgtatgtggtggtgtggtgagatgagagatgccatgtaccgccaaataagaccgcaatgcaataaattcgccaccattgtcagagtataagatgcgcacgcgggtctggaaccggttttccacaagtgccttgaacgctataaacacctctttgacttgagatttttgtttcaatggatacaaccatgtatatctcgtgaaatgatcaacaatcaccaaataatatttgaaatgatcaatagacgtaaccggagacgtccacacgtttatgtagagatattcaagaggttgagtggaagtgattgtgtttaagtgaaaaggcaatttgtgactcttattgatcaaacaatcggaacatgacaattgtttgtgaaacgaatttgaaagaggtaaagaaaactgagaaacaatggttttgagagtagataaagtaggatgcccaagtctataatgccaagatgagaggtctgtttttggtgatggtgatgccgagaaagcggtgatggcgtgatgattaaccggccactcatatagctcattcttaagtttgcttggagtaactggacccctgttttgagatccttcacctgaaaatgagcaggaaagaattccacggacaccttgttagcgttacacatgcggtaaaccgagataaggtttttgtggatattaggcacatataaaacatcagtcaaggcaagagagcgtaatggtgttgaaagtaaagctgaaccagtatgagaaattgacaaacccgaaccgtcagcaatagtgacatcttcacctcccgtgtaaggttgatggagagatagattggttaaatcagaagtgatgtgatgagtcgcaccactatcgagtaaccaattgttagcattgtatggcgacgccataacagcatttgctcgtggctgccacggcgtaaatggtgagactggtgttgattgctgcgagttgtaggagccgccttgaagctgagggcaacgacgtgcactgtggccgtggatgctacagatttggcaacgtccttgatacggcttctgtgtgtattggttctgcctctgttgagattggttttgttgccagttgttgttgttacggccttgagttttgttgttgcgattgttgttgttgttgttgtattggttgttgttgttgttgttccctttgtagtttgcagcattagcagtgaccggaagtgaagacgttgtggcagcagcacacatcaacttggcttcacggttgagaagcttctcaagaagttcggtgagggttggaggcttgtcacgattctctgtttgatcgaccacagatttgtagtcttccgtgagaccaccaaggaggaactcgatttgctcttcatgttcaagaggctttccgagaagagcgagttcatcaaaacgagtggtgtggccttggaagtactcggtgatggttttggtgcccttgctccattgtttgatgtgttggcgcacttgctggatgtgaccccagcttggtgtagcataagtggccttgagtttctcccagatctcagcggcagtgttggatcgtgacagaagaggttgaatggtgatcgtgattgtgccaagaatggcactgtaaatcagcttgtcttggcgcttccaaaacttgtaagcggaattggcagtgagaacaccggcagtggtgattgtttcagagggtgctgtgacaaatccgtcgatgtaaccagcaaggtcgtatccatcaagc

SEQ ID NO: 37854 - DNA, 11156 bp, Arabidopsis thaliana landsberg
tatatttatcagctacaaggtttttatttcgtaaatgatgttaaaatctgagttcactgtcaaattttccttcaaagctgtgtgatctatgcatacgaaatcgtcagtgcacaaaatggctagtctcaatgaacactattgggacatgaatatctgttgattattagattatattagctataacaagttcgtaagataagtataaacacctttcttcctctagtcgaggtttatggggttgacttttaaaatatcgctgttggaatgcatctcctgctcatgttttccattaattagttttcttttgatgctggttgcctcccggtcctttatcttgtagcttaattctatcttgttactttatatcttcacttaactacgtctatttgttatatatagcacgtcataaatcctgtgtgcacataccctttttagtatttgaagaaagtttgcaagacattctattctcatgttaataattactgtgggcatgtagctataaacttatttggttttcttataagagcatgccagactttgtgctcatgatgcatttattaagcaaaagaactattactttttcaggtcttacccaagacggatgcagggcagaagcatcagctgttctcttacgagtgtcaaatctgcttggccgcttgtgcaaattacatcaaacaaaagtaaaggaaaatatcatttgggctcgtcagcttggtgggaaggtgaacatcatttacttttcaccactgtagctctattgggaagttaactgattagcatgtgaatcagttcctaatttattggtattttatttggaggcagggttcaaaggctcagaagtggaaacttattatccgaaatcttcctttccaggttcttaaaactcgatttttttttttgttatctctacaatttcattaataaatgcgttgcttctcaaggatttttctgaattttgcaggctaaacctagtgatattaaagtggtcttttcagcagtagggtttgtctgggatgtttttattcctaaaaattttgaaactgggtatgttctaactcgtctgagtgatttcttgattatgaataaatcattgtatattatcctcattttggtgtaatattttggcaggctacctaagggttttgcatttgtcaaattcacgtgtaagaaagatgcagcaaatgtaagatctagtaacatgggtatcttgatttggttatcctccattcggatcacttgtcttaattaattttgcattttcaggcaattaaaaagttcaatgggcacatgtttggtaaaaggcctatagctgtagactgggcggtacctaaaaatatttacaatggtgctgctgatgccactactgcttcagcagatggtatgttaccgcattgtttttccttttatcactggagtttttaaaaacttgttaattataaacaatttttttactcaacttgtaaatgagggaaacagatacagtcagtggccgaagttttgttttatctcctcctaacagatcgtcatactttttgacgcgatccttggcaggtgacaaagaaggaagtgatggggacagtgaaaacagtagtgttgatttggaggaggttgatgaagctgtagaaagccaccctcctccaggagatgatactgatgatgatgaggacggcagtaacaaactgactgaatcagatgcactggacaaagatgttgggaccgatatgaactttgaagatgaagcagatgttgccagaaaggttcttaagaacttgcttgcttcttcaaaaggttctactgctacacctgagggagagacagaggaatcggataaaagtaaactgaaaagttcatcaactaagccagttgctgactcttctggtgtatctgaacctttgaaatccggtaaaactaaagtggtggctcctaaagaaacgcaggataatgatgattttgagagaactttatttataagaaacctcccatttgatgttactaaggaagaagtcaaacagaggtttacagtatttggggaagttgaatctttatccctggttctccacaaggtcacaaagtatgtatccttatatactttgaaattcattcaatcatcaaaaaatttccaagctcccaaagctttacattttttctccctgtgttttctttctcagacggccagaagggactgcttttgtcaagttcaaaacagcagatgcatcagttgcagccatttcagctgccgatactgcctcaggtgtcggtgtccttcttaaaggcaggcaactaaacgttatgagagctgtgggtaagaaagctgcaaaggacatagaactcaaaaagacagaggagaagaatgttgaccatcggaatctttatcttgctaaagtacacacttctccctctccctcacaaatactgggaaattgtattatctgcctgcttttcaaatacgaactaatatatcatcctgttttgacttccacaggaaggtcagatccttgatgatacacctgctgctgagggtgtgtctgcggaagatatggacaagcggcgaaggtaaacttttcttactttctcagatatgcatgttactgtctagtgctttgggatgagagaagagtgagcatgtgattgtcctcgcagattgcatgaaaacaagatgaaaatgcttcagtctcctaacttccatgtatctcggacaaggcttgtgatttataatttgcccaagtccatgaatccaaagcaactaaacaggctcttagttgatgctgttacctcacgagctacaaagcagaagccgtgtattcgacaggtcagctattcgcctttgtgctacaattcaaacatagttctattatctgaacctagtttctttgttttctacgcagatcaagttcttacaaaatgagaagaaaggtaaagttgatactaagaactactcccgtggagttgcctttgttgagttcacggagcatgaacatgctcttgtagccctgagagtacttaacaacaatcctggtaattgatcttgctgaaagctaaatttccttcgaaattcaagtacttctttccaaatgatatgctatttgatgattttatggttatctcaccaatcggatgagacatgtatcactttagcttacgatttaggatgcaatgtccaagaataataattttcatgttatggtaatcgttttggttatctctgcagagacatttggtcctcaacaccgccctgtcatagaatttgctgttgataatgtccagaagctgaagatacgagaagctaagcagcagcagtttcagcaacgcgagaaacacaatgaatctgatcagcagcaggcgaacggcgaagcacaggcacctgacaataaatacaaacgaaaaacgagggaaggggataacactggtccaaggaaagagaatgcagccaggtttaagaagggaccacgtgaagagagtaaagaagaagcaaaatccaatatagcagtaaaagataatgcagcagagaagaagagacctatacgcacacaggaaaaaccgtcttcaaacaagaaaggccaattgatgagacagaaagagacaactgagaaaccagatccgaaaatttccaaagatttgagcgaaccaaggaagaggaagttcggggaggatagaggtgaagagaatagaaatgggcagaggaagaggaagaagcaaggtcaaggtcaaggtggtgcagaagttgtggacaaacttgatctgttgattgagaaatacaggtctaagttctcgcagagctcagccaaaaccggcccacaaaaacagagttccggtcaagtcaggaggtggttcgaatcttgagacttgaatcaaacaaatgtaagttttgatatttttaagtttccttgtatctgttttttgattctgtctgaaaaatctccgaagtagtgaatgctgcgaacacaaccttgttttgtatttgtatcgtcaaaactagaccgaacttgaaccttaacaaaacagaatttattgttttgaaccgaaccggttttatcgacatagttagataaagcctataacggttatttacctaactaccgaagactccgtaggcgtgtgccaactaaacatcacaactacaggtcatacatttccacgtgtcaaattatcattggttccaaaccgtccgattttttcgatttcgtcttcgaatatttttttatttaatccctcagctctgttttcttctctccataattttttaaaaagtcatggattatcatcttagggttttgttctctgtttctcttatctttgtgttcgtctctgtttcggtttgtggagacgaagatgtgttgatcaggcaagtggttgatgaaacagagccgaaagttttgtcatcggaggatcactttactctcttcaagaagaaattcggcaaggtttacggttccattgaggagcattattacagattctctgttttcaaagcaaatctcctgcgagcgatgcgtcaccagaagatggatccttctgctcgtcacggcgtaacgcagttttcggatctgactcgttctgagtttcggagaaagcatttaggggttaaaggtgggtttaagcttcctaaagacgctaatcaagccccgattctccctactcagaatcttccggagaagtttgattggagagatcgcggcgcggttactcccgtgaaaaaccaggtaattcaatcatcaatgtgatgataatgatgtcatttggagaatatgaataataatggacttgaatgatcgctgtttattagggatcttgtggttcttgctggagttttagcactacaggtgcccttgaaggtgctcacttcctcgctactggcaaactcgttagtctcagtgaacaacagctcgtcgattgtgatcacgaggtatgaatatatatgcgtctcctcttgcttgatggaagctctgtttgattgttcatacttacttgttatccaagaaattcgtagtttctgtggttacgatttgagttatgcaacaatgtgccattatctttagaagattacaagtcataatctcagctgttacttgcagtgtgatccagaagaggaaggttcatgtgattctggttgtaacggtgggcttatgaacagtgcctttgaatacacgcttaaaaccggagggcttatgcgagagaaagattatccttacaccggtactgatggagggagctgcaagttagacaggtctaagatcgttgcctctgtctccaactttagtgttgtgtccatcaacgaagatcaaatagctgcaaaccttatcaaaaacggtcctctagctgtggcgatcaatgcagcttatatgcaaacctacattggaggagtctcgtgtccttacatatgctcgaggcggctcaaccacggtgtgttgttggtaggttatggctcggctgggttttctcaagcaaggttaaaggaaaaaccgtattggatcatcaagaactcgtggggtgagtcttggggtgagaatggtttctataagatatgtaaaggtcgtaacatttgcggtgttgacagtttggtctccaccgtcgctgctaccacttcttgagcttttcattattctgctgcaatgctatttaaagtctgtaaataaatgattaacaaaaacatatttcttggtgaattcgaaacaacaatgccataggcttacagattccttaagaggactttagcattacatgacttataatattatctaaatttcaaaagaaaaactgaaaaagaaaacatttcatgactttcacattaatacctctcctaacacttaagatgctctcatctttctgctcattgacatctttgggtaggtgaaccgcaaaatcatcaaagttaatcccatctaattctgagccatcatcattgacatctccgtcgacatcatcatcatcactgtcaatataatcatcatcatcatcatcatcatcatcatcatcatcatcatcatcatcatcatcatcatcatcatcattacttttctttaatatatatactcatatgaaactctttttgaaatgcagagcattgatgagatgaggcagaatctacagagcactctgttcgaactagagacactgaaaatggaagctaatgagaaatcaagaacacacagagaagaagtgaaccaacttctcaatctcctcaaattcactcagcaagaaagagacgaagctagacaacagttatctcaattcatcttccatacccaacaaaaccctaattcaagaagcctcactaaatcaaacagcttctctcactctcaagatgtatcttcttcttcttcctcagaactctccaccttcctcaacatccatcctcagccgttgacgaatcttgaagatccaacggctcataatcatcatcagcagattgatcctctagacgttcttgtgatggggaaagcttttccagaaacgggaaagcttttgaaagcggtggttgaagctggaccgcttcttgaaacgcttcttttggctggaccgctaccaaaatggataaacccgccgcctcaaacgcaatcgcagcgttttgagttaccttctatctcgtttagagggtccgatgttgatagtaaatgtgattctatgacgtgttctggttcggttaatagttttgggttcggttcgagtttggttatcgatcaatcaatgttaaccggaaagaggcagagattagagtagcgaatcgatcattttacaagattctagattcctactactacgagcagttttataagttgttgggtgattatttttgtcccttctatataaaactataattcgattttatgtcaaatcttccagaaaaaaagtaattgtggttgatgattacataagaatgaatcaatttataaatacaaaattcaaaagtgtgtgtttctatcaaaagcttttgggtcaagctaatggctgatcgttgttatcagagatataaatgtgacccatcttcttgcgtttggtctccatatatcttctgttctccttggtgattggtgtcaccaccggcacacggccaactacagcgagtccgtaccctttcagaccagtgaatttggcagggttattcgtcattagtctcattgttctcactcctatgtctcgtagcatctacattgggccattccaaaaccaataaaattgagagaaagcaatcatatcaatggctatgagttagtccttaatgtagccaaatcaaaccgatataatatggctaacctgagcaccgataccgtattcacgagaatcaatggataggccaagttcaacattggcctgaacagtgtcgtgtccttcgtcctgcaagttataagctctaagcttgtgaccaaggccaatgcctcttccttcgtggccacggagatacacaacaactcctctttcctctttctcgattaactccatggctaagtccaattggtttccacagtcacaccgtgctgagccaaaaatgtctcctgtcaagcactctgaatgcactcgcaccagaatgtcctcaccatttccaacgtttccctggtcacgattcagacagaaacaaacacaagactggtcttaaattcgaatatccagttggttgttctgagatgacaccaatgcacattgatcaagatttagaagtaagtcgtgattttgtaccttaacgagggcgatattttcggttccatcgagtttagatcgataacaataagcttggaaaagaccccatttggtaggcaaacgagacactgtgattctctcaacaagcttatctcgctttcttcgatatctacaagtatataaaacttcagataattacttgtatccagtgttttctatcttttcaatacatggtcttcttcttctctaacctgattaaatcagtcaacgatacaatggggatatcatgttccgtagcaagctttttcatatacggcagtgaagccatagacccatcttcttgatcaagaatagctgaaagaacagagaggggacgtaaaccagccaatatcattagatccactgaagcttcggtgtgaccagctctccttaaaactccaccatctctgtacttgagagggaatacatgaccaggcctcctgaaatcatctggtttagcatcgagagacgaaagtgcaagaaccgtcatcgccctgtctgaagctgatactccagttgatgttccagattttgcatcctgtaaccaagaactttatcagaacatagacacaatgaaaccctcttgagaactatatccaaatcgttaccacagtgatggtgaaagttggagcagaggaatcttcgtcttccatttcaggtgacataagtgtaaggcttaatctttcaaggttttctttcttcataccaactgagacaatacctgaaccattcttaatcagaaaagctatgtcttttggactcgttagagttgcagccatgatcagattcccttcaacatctccggtttcatcgtcaacaacgatcacaaactgaaacataagtgacaattttttagtaagaccaaatctatacaactgtaaaaacagatcatcataatcactggtcttcaagaaaatcgtcaaagaacaaacctttcctttgcgtagagcttgaagagcaagttcaatagaggaataaccttgagtaggacaatctggatcaccctctgcgtcactcacgaagaaatcatcagtctcaggcgtgatttccgcgtcaactgtctcaaacgaagcagaatcaaacaacgacccgtcggttttcctaacaggattttcatcgaacacattgcgatcactattctcactagccttgatctcccaacttgaacgactaaccaatctccagcaagtattagcaaacgtaggagaactatacaagccattgatgaagctgtgagcgaaaaagattcgaggatgatataaagcagaatccatcatcgacgtaatgaaacatatatctctctgctcgtacgaatctctctgctcgtacgattcgctgcttctcgtctctttggagttgttctcaacacaaaaccaaaatctgaaaattttaaaatttcagacatatttttaaggttggaagggaaaaaaatcacgaccacgagtttaggatttatcttctttcgtcgtcatcgtactaacttaactggtgtttctcatgggccacacatgttgatcatgaagaactatcacataaacggaaaccctctgggtcctttagaaggttttgacctttgtcttattgctgacgtggcctatacttggaaaacatcaacgaacacaactttaaaaagggcggaaataaaggaattgagagaaagaggacggtggaggagcaaatcggatccagacggagaagtcgccggagaacggtttacaaaaggagcgtgagagagagacagagacaatttttctccgatctcaccggatcagccgttgtactcttaccaatccgtcgtctagcttgaaatctccgagctcaaaggtgtgttacagtcactagtcactgtgatttctcacgcttacattacaaaatcggagcttgtattgtgtgattagatttggttcattaatggtgggttttgtgttcagaggtggatggtccatggctgagccagaattagtaaacggaggagtgaaagagaacaaattatggaaaggtgtattcgcagtttccggcattatgtctactcttgtaatctacggtgttcttcaggtctgtcttgttttcatgataccattctctgtgaaatgtctcccctttcttacaaatttcttttgttttgtgattgtggttttgtaggagaagataatgagagttccatatggagtgaacaaggagttttttaagcactctttgtttcttgttttctgcaatcggcttactacatcagctgtctctgctggtgctttactggtaaactagctaaaaacaccaactttgtgtttatacttatttgctaaagttttatgtaaccctttttggcttttcttttttaatttgtaggcaagcaagaaagttttggatcctgtagctccggtttataaatattgccttatatcagtgactaacatcttaactacaacatgtcaatatgaggttggatttttattttaatgtatgaactttgtatgcctactttttgctgcttattgctttttgctatctgtaatgcctccaggctctcaagtatgtgagcttccctgtccaaactcttgcaaagtgtgccaaaatgataccagtaatggtaagtttttcagagctggaaactcatgcgtttgagtttagcatccaccattcttatatttgtgctctatataggtgtggggaacgctcattatgcagaagaagtataagggctttgactatttagtggcttttctggtgacccttggctgctctgtctttattctctttccggtataaacctctatacccaatcaaaagcttcggttagttagactatcatatttaccatgaacatcatgtttgtttatgtaaacctgatttgtaggcaggagatgatgttagtccatacaataagggaagggaaaatactgtttggggtgtttcccttatggctggttatcttgggtatgtgtatccgtgttacttgttttattgtttatgcgaatatactgagatttttgttgtcttgttttaaaacaaggaatattgattgtgtatatggtaattggctcactaacaggtttgacggctttacaagtacattccaagacaagctctttaaaggatataacatggagatacataaccaaatattctacacaacactttgttcttgtgttttgagtttcactggtgagaatcttatttgtttctggaacctatactgttagagtcgcatcattttctgtcactgtcattttctatggacattggaccattaatcgttttccctggtgggtggctggtcctaagaaaattctttaggaagaagacttttctcttctttttttctctttatttgtttactttagttatatatctgagttcagtttattttgactgttagacctctggaatgaaaactgattcaatcttcagctgatgactactaggctaaagtgaggttttatgttagtgatatcaacatgtcattagtcgcggctattttagtacct

SEQ ID NO: 37855 - DNA, 6264 bp, Arabidopsis thaliana landsberg
ggaaataaccattgaggagttctcgttgtaattcctttctcttttattttttatgatatttaccgacggagcaaaaaaaaaggtaaaaatcataatgatgagagtttaaaaacacaaccttaaaatcatgacattgcaattataattaacaagcagtatggcccgtgctatgcacagacatagtatttattctatttttattaaataaaataaaatttagcattaatcagtttttatggtaaagtttaattggttgataaaataaaatatttcaataatgaggagattttttgaaacagtaactgaaatattaaggtaagaccataagagagtgtatatttctaaaaagttttttaaggaaaaaataaaataaattaaactactaatttcctaatctgatctaattaattggatgggataagaataatatacgtgtaaataaattgtaagtgaattcattctcatcgacccccatctctttctcctctttcttctcttcaattacccaggaaaattgagctgtttactgcatatcaaagtttcaatacctcctgctcagttctcgcttggcaacagagctggttcatgaggacaaaagtcaacaaccatatcttccaattaattcatgatgagcattacggttgatcctaccaaagtgacatgattctttatatgattgttttagtttttctttctaagattaacagagttgcatgatgatgacaggtacataaagagtcattagaaacatatgaaagaagataccagcatacatgaacatcatctgaaacagaaagtaagtgatagaggaattctattttccttaattactctttacaaacttaaaaatagcacataagccatctcaacatcaatataacgatgatggtggataaagaaaatacaaagattcagcatgatttgttggtatcatccgctgcgtccgctgcaaagttaataaaaagaaatgttcaaaaaagagagcaaatactataattaactgtcaatgcgaaataagatttaggaagcgttaactggttttatctattaaatgcaaaaaaaaatcataactggaccctaactattgagatcaaattttttatgcgtgcagaataaaagacaggttaagtgaatatatcaaatcagctgatgcaccatactattaaacgacacatataataacggcaaaggtatgttgctcataccttcatctctatatcccaacagttgaaaataaacaaagcataacattaaaatgatttatatagtagtaatatatatacaaattgttatttgtgttgaaagccttcacttgtcatatctaataattatattatactaatttgtcatattgatgtatagtacaaaacaattcaataaatattaatataacaaaagaaaatgtattaactaaccgtgtcaatatttgtgtacctttatattttagttgtcatggttatagaactgctaacttccataatctgtagttagaaatagagtaaagggggttagccttattaagatttgagatagtgattgaataacagtgatgagttcacaatctgtgagacatacctggcagattttggaatacttctttgaaaacaacatttgtagttgttttaccacgattaccctcttcatcgataataagaatcttcaaacctcgtcgactcttaactctcgataccgcaacatatagttgcccatgggaaaaaactggtctgggtaaataaatgccaacatgagataaactttgaccctggctcttgttaatggtcattccaaagcaaggaacaactgggaactgtcttcgctgaaaacgaaatggtattctaaaatctgcaggtgtaagaatgtgagaccccgtcccggacgtctcggcgtccggcgaccgtgtactcaagttcgcgcctcttcccgaccgaacctcttaattttttgcgattaaccatagaatggcctttacgaggctaaattctataatcgctttcttattacacagcggaagtctttctaaccttggtttaattctaaccaactcttgtaccggtttcatcgtctttgtcccttagacttagatcgatcctttactcggtcaagacatgcatattgttcgctaaccattctaggcctaacaatcgcatattcctttgtcctattttcacggtcaattcccaaacgtctatcctaactagtaagctagatcgttacataccttggccactatgcagatttgattccttagcccgtttgtcgctttactccattcgttcaacgactcgtatccgatcgtgaattgatgaaccaatctctatcgttacttagccatacaaccaaccaaccccactggtctaagtactacgatagagattggggatcatacgattcccttggttcacgatggccgaatcaagctcttggctcattcgtccatccgtcctccaaacgtacgccccttcggttccatggtggatgattcagcactcagcttatcgaaccatccatgtttccgttccggtcgtttaacactacgaccgcccatggtttactaaccgtttacccgtccggtccatggtggtcgataaagcttccagcttaatgatccatccatgcggtccgaacgatatccttatcacacccaagggtccgtggattcaaccaccggatcatcaaaggctagcccatgaaatccttcctccgtcggccttaggtttgcttgcgggtccaacatccgttttgtccatcggttcccaccgtggactttcccgttggttatccgtcgagtcatcctttggtcttaccgatctccgatcggtttcaccatggctgaggagatagatacatgaaggcagccgcgatattgatcccatatagtgaacaacgttccttacctattcttggtgctttctccctttaccggtaagattgcatccatgggcgacccttgggtgtgttcggatgcacttatccttgtgcttcctcaaacacttttctcgatccatcccaaccgacgatcggtctgtccgacccgttccgtcagacgatcggcctgtcccatccgacccgtccaacgatcggtctgtccgatccgatccgtctggatgatccgatccgtccgacgattggtctggccgatccgattcgacgatcggtctaccagatccgattcgtctctaagacgaatggtctaccctctccatcctctacactccatcgaaccgttggaccgggaggtagtatgcgcatcagtttggtcgagttatactcgccgagctgcaccccctttccgaccaacaactctaggatgtgttgggactcttttaagaatgttttatggtgtttggatgttgtgagataatgagagattattgtgagattgtgagattattctaaatgccttgggcgtcctcccttatatagggggcgaatggatgcttcccgaagcatcacatccgttccttgcactcctccgaaaggtcacatccgttccttgcatcctttcgaaaggtcacatccgttccttgcatctattgggcgatgcaaccgttcgttggtacccgctcgaccttacaccttttgatcgagacacctcttcacccgtgagctaccacagtcccccagctcgagtatcagctgaccagagcacccagctgggtcagtacacgatcagctcaccgagctcagtcgagctgtcggtcagctcacctagctgagctagctagtcttccagctggtttagctcacctagcttagctagctagttcatcttagcttgtccagctcacctatctggttcagcttgaactttctcgttcttctgactaagtattttagtccatttcttgaccatggtctagttttctcctaaaacaacctggcctctttatgaacgcgggacgcggtcgttacagcttagctgcccaaaattaaagatgtttagcaataatgtttctctaataaacgtgaataccttcaacttagtacccacctttccgtccttgtccatgtcaaaggaacgaatcatgtcttgtaattcctcttctgtccatgtgaagtcatgcaccgttgccattttcgccacatctctccgagtaatgaacccttttccaccttctgacaaaaatcgcagagactcaatggagttaaaaaccattcaaacacaaaagatagaaattgcacaatcgatatattaccatcaaactgacagaagtacatgaccaattcatcttgtgtcatctgcatcttgctcatcaattcctacgaatgagacaagacaaatgcacatcaaggacatcctcctagactgttaagtaacagtaatacactaatacttgatgtaaaaaaaaaaccctgtcttttcttcttcgtagttgcagcctctttatcgcttctcgtatttttcgtacgagagcctccagcaacagagccctgtagagaaagcgctattgcctgcaagcactaaaaccagtaccttattcatgtctatgtcaattctgaagctatcgaatttgcagcattacaatgtgaataccttgtctaagtcatcatcatcctcaccaaggaaaactgatgtattcaaaatcttcctagatgagagtcttctcttgaatgcaaaggactggttcttaaatacaagtcacaagaaaccagagtaaagatcaaatggcacattaacattaaacacaattacaaattgccttcaagccagagagtaaccatcattcactgcttcattcatcggatacaagttgacacaagcaaaattgttacctttcttttacgagttgaattacacagaaactcctcgtcttcgtcctcatcaccatcaccatcggcgattacgggtgtataatcatcgtcttcttcaccggaattccgcttaactctacgtttttttgaaactagagatggtgacagaagagccttggcggctttagagatgccgagtgcatccaatctcgctttgttctcagcgatccttgacaacctctgcttctcatattccgagattttcccctttatcggctccgattcgttgccggaactcgagctcgaactctctcgttcacttcctgagctctctccctccgattctcccctcgccattgttagctaattaggaatttgattctccagagtttgggatttgttgattttgccgcctccaacaatcgtttaagttggatttaacttgggctcatattaagaccaattacttgggcccatattaagaccaattacttgggccctcattgaacacttctataatgagagaatttagaatacccaatagccgattgattatgttgggctttaccttgggcccatattgatattacagcccaaatacttggactctcattgaacactctgctgataaatcattgaaaacccaatagctcatgatgatcattatttttattttttttaatatttgaaagtttaagtcgagaggccctatatttcctagaattcacatcaaactaaatttatctcctttggagaaaaaatcccttacaacataactcgaactaaacacctctgcttgggagttttatcattaggctaacagtacgttggtattttatgatcataattgtgatgggtcaagttgtttttacatatcgagtgtggacatatttaattcaaaggattgaaaacacatccgaaaaaggattcgtatatgtgatattttccgtgtttaccgcattattttttttatagtttgctttgtttcttgtgggatatttcatgtattttgtttgaaacagattagttttgcccaaccatattgcgtatacgatccatacaaaataagaaagtttccacctttcgttctatatgatcatatgaaggaaggagagagcgcaatgcgaatggtgtgaaacgtgttattggtaagataatgcatggcctacacccactttctctcttttttttttcttaatttatttattttgtcgtcagtatagtttgatatgtatatatatataaaagtagccataagaagattttgtggggatggaaataccgcgttgttaataagctgacttgacttgtaaatagataaaggaagaaaaaaggccaaaagagaaaacacaaaagactaaagataagaacaaaagaaacatgtaactgattttcaaggacatgagtatggtctatgtatataaattcataaatatatagcgtaaaatggaactagataataagagtagtgaagtgtatatgtacgtgtgtacaacttaagcaatataaagg

SEQ ID NO: 37856 - DNA, 2446 bp, Arabidopsis thaliana landsberg
  unsure (1)..(2446): unsure at all n locations
tagctgtggggataatccaagctattggtagcccttattcgttctccagtgttgttggtgaagaagaacgaccggagttggaggttctgcgtcgattatcgggctctcaataaagccacagtccctgacagttatccaattccaatgatagaccagctgcttgatgagctacacggagcagtcatcttttccgaatttgatctgaggtccgggtatcaccaaatcttggttcgtgctgaggatgtgcataaaactgctttccgatcacatgaccggcattacgaattcctggtaatgctgttcgacttgaaaaactccccaacaacctttaaatccatgatgaatgatatattccgtccctacctccgcaactttgttcttgtgttctttgatgatatacttgtgtacagcaaaacggccaagagcatcatgagcatctcaggattttgttccaagtgctgcgggaacagaatctgtttgtgaacctaaaaaaatgccagtttggtagtgtaagagtggagtatctggggcatatcattacagcagaaggagtgtcagcggatcccaacaagcttagtgccatgacagactgggcattgccaacgaacattaaagcactaaaagggttcttgggattgacgtgttactaccgcaagtttgtgaaagggtatggagagatagctcgttctttagcagatatgctcaagaaggatcagtttctgtgggctagagaaacgttcgagaggctgaaggtggcgatggttntaattnctgtcttgggttttccccacttcaagaaaatttttatggtggggtttttttgttccccgaacaggttgggggcggtgcttctgccagaagacatgcccattgcttatcacagtaaggcactaacagagaggcagaagttgaagtcaatatatgagagggagttatggtcatcgtgttcgccattcaaaagtggagacactatctattggggagaaagttcttggtgagaacagatcagaagagtcttaagttcttgttggagtagagggagactaatatggaatatcaaaggtggctcaccaagattttgggctttgattttgatatccagtacaaaccggggttggagaacaaggcagccgatgcattgtcccgtcaagaagtgataccaacgctatttgcgttgtcagtaccagcagctatccagttggaggaannnnnnnnnnnnnnnnnnnnnnnnnnngagctacaagcaatcgtcagagctctgcagaaggatcccagtctacaaccggatttctcattggtccagggtagactactcaggagaggtaagctggtggtgccacaatcatcttctctcaccggattgattatgcgagagtttcatgatggaagatgaggggtcatggaggagtgttgaggacacagaaaaggattggggaattgttctactgggcagggatgatgacagatatcaaacgtcatgcggccgcttgtttggtctgtcagcgctacaaatactccacactggctccaggcggactgttgcaaccattaccggtgctagagaagatatgggaagacattaccatggattttgtagagggtctgccaaaatcatgaggttctaacgtagtgctggttatggtggataggctctccaaacatgctcatttcttgcgcctaaaacatcccttcatagcaactgatgtggcaaacttactcatccaagaagtccaagctgcatggctttccacgtactatagtttcagacagagataaagtcttcaccagtctttgctggaaggagctgttcaggttggctggcaccagtctttgtttcagcacagcatatcactcacaaaccgataggtaaacagaagtaaccaaccgtggtctggaaacatacttgaggtgctttgtaggggaacaaccacgaacttggtctcagtatctagcttgggcagagttgagttataactcatcataccattccgctattcacatgtccccatttcaagctgtgtacgggagagaaccgcctactttggtcaaatacgagaatgggtctacatctaatgcagatttggagaagcagcttgtagagcaagatgcagttctgtctctgatcaaagcacacttgcataaggcacggcagagaatgaagaaaagggttgatgaacaccgcagagaggttgaattcgacgtaggggatatggtttacttgaagatgataccctttcggcgtcgttccttggctaagcgtgcaaaatgagaagctagcagctcgtttttatggtccttatcgggttgaggcaagggttggcgcagcggcataccgtctaaagctaccagaggaggccaaaattcatcccacattccatgtctctcagctgaaaaaagcagtgggagaccagactgtgatcacttctatttcggcttaactaactga

SEQ ID NO: 37857 - DNA, 6248 bp, Arabidopsis thaliana landsberg
cgcactttaccatccgagaagatcataatatcatcagcgaaactaagatgcgttaaaccagttgtcttacaccgcggatgatgtccaaacttccttagatcagctgcttggtccaacatcttggatagaacgtccatgctcatgacaaaaagatagggcgacaaggagcagccttggcgaagaccgcgagaactctggaaatatccagcaagttcaccgttaacttgaactgagaaagagtatgtggagatacatagcatgatccagtggataaaatctaatggaaaatccaacgataacaaaacagtccttatgaaagaccattgaaccgaatcgaaagccttcgatatatctatctttatggcgcaacgtcccgagatcgagtccttgtgataatccttaactaattcggttgcaagcagctagattttctatcaacaggcgatcatgaacaaacgccgactgattccccgcgataaactgggggaaaaccagtttcaaacgattggcaataatcttcgagataaccttataaatcacattgcaacaggagattggcatgtagtccttcatctctttagtctctaacttcttgggaatgagagctaatatagtagagttgacaccctttggtaaaaaccctttaacaaagaaagattgaaccgccaaaacaaactccgaacctataatgtcccaagtggacttataaaattctgcggtgaagccatcaggacccggtgatttgtcatttggcatagcaaataaaatcttctttatctcctctgccaagaccggttttataagtctctctttatcttcagttgaacaccgaaatggtagtaagttttggagttcctcaaccgttgttccctcatagtcattcgggattagctgcaagaaatcacgaaaaaatctctctgcctcatccttaatctcctcctcttgcactgtaatactaccatctgctttttgaatctctcgaatggcgttccttgctttcctagtcgccactgctctgtggaacgttttattatttttgtcacctacctttaaccagtgaagcttggatttttgcttcaaatatctctcctctagagcagccactctctcccagcgattatatgcagttgattcctcctccatggccacaggagatggatttgtcaggttcgcttcttgcttctcacaaagagtagcataggcctctttggtttgcttaaccagattatttatcttttctctcgcaaggttgcgtatctgtggttttaaaatcttaagtttttttgtgaccggtgaagtgaggatgtagacatgaaaatcggctctgttccagaccaaaaatcagcgaccattggcttgaattcttctaactcagtgataacattcacaaacttaaaaggtttgtgtcccttaaccctagggcctgctgcagtattcatatttatccggcacctcaaatgatctgaacatcctcccgcctcaaaaacattgtaagattgtggaaatttctgagaccaaagatcgtttatcaagactctatccagttttttcaaaatgagatcattttctcttttattacaccaggtgtaaagcggaccatgagaagccatgtccgagagagcgcaatgatttaccaccgcctgaaagtctcgcatgcctgcagatatcacgggatgatcatccactcttgagtgttcctccatgtctagaatctcgttaaaatcaccaaagattatccacggcctattattaataattggtgaatcagaatgatcccttaactcattccataggaccttacgctcctccaccatgtttgaagcataaacaaatgaacagaaaaattcctcttcttgatcttctaacttgactgaacaggtaattagttgaccgcttttataaaaaggtgttaacctgaccgtgtctctccaaacaacccaaatgcgcccacgtctattatgttcataattcgtcaaaaccgaccaatctttaaacagcttggcacatacactctgtgctttattctctcctactcgagtctcaatgaaacaaccaaattgaaaactctgctcctccacccatttcttgattacggaatgcttagttgatttatttagaccgcggacattccaaaaaaagcttgacattaatgatggtttggttggtttcttctactcttatcgttaggcaagagcctagttgattgtgtagaagggactgagatcaccttgtgagctgtcttggacccacgaggtaaagactgacgaagaatcgcccctgtcttattccccccgatggacacgatatctttgttagtctgcgttgttgcctcaagagaagcataagatgaggtcgaaaccctcttcttatcattcaccacaattgctctgctattttgacccttttcaccgaacttaacccttgttacttaaaacagagtaagcattagagagaagtgatacttcgccatacgttaattcttgttttttatttcctggactacggtttaaacctgatggtgtaatccagccctcattatctttatcattgctctcagctacatccgagacgggaagcgtctgattatctatctccactgcagctagtacctcagaaacagtttccccctctgcgattacaacatcacttggagaaacagtcacgtgctctgttttttctggaactttagatggactttgaaaagtttgagaggtctgtgcttctaccgcaacacaggtctccctcgcatgaccccatttcccacagcagctgcaacgtggaggtagccaagggtaagaatatttaacgattgcatcgagttctccttcctcctcgccagagaggatatactcggatggtagctcctttgttaaatccgcttcaaccagaatttgtgcttcctcaaagcttacacatgcctcagttttagggtgcacgcgaatcggcttacctaatgcactagataagaattcaagccctttgtctgtgaacatagatagtggaacatcagataaagtgacccatagttgtattgacttcattgctggttgtgcttcttctgcataaggagtccatttggatacaatcatggggatatccatgatgttccacatgcctctattcagaattcttcgccgcatagtttcattatgaatccggaacttaaccgtcgtctcattaactgccatcacatctattaaacttgttttatctcccaatctccatatcttattcacaatcatgtgaatcttacccacatgtggagcctttgtattgagaaacttgccaatcacaaaatcttcccacagtggtttagctcctacaaaaacctcctttgggacaacaactctcccttgaccatcaacttcttcaaccacgaacttttgcttagtaaacacatgtttctgagctgcttgaacgtatgattttttgactggtggacccgcctccctttgagactccgaagattctcgctgactgaatccatccctctgatctgaggtttgttcattgagatcgttggccaaattctctgagatcttctcacttaactgttgtgaagcacttctaacatccttctggcagtcctgaacctctgtagtatgcaaacctccagcatccaacgccggagcctcctcccgcttctccggagaagccgacggctgcagcatacgtgctgaaaccgcaaaaaacctaatcgcctgttgtgtcgccttgccacgtcagcagagaaataaacgcagctttttgaaacttgatcttccattgttacctttctacctcctgagtggagcgtttctcttcccaatattctctcctatatagagtggattggattttcaaggtttgtcggcattgcaaggatcttcctcacggcctatgctctttgctgcctttgttgtagtgattgtaacctctagagttgctttggatacgatctttcaagattcttttgaaatcgttgtcttgcgatttcttatgatttccctgtatgatttgtattgtctatctatctctcttttaaccatcgtttggtggtcttttgggcattgttgccatgctttcgtttaattacccttatgttggttgttttttcatttctttggatgtaatcccttctctgatagagtttaaggcttaattctaatcagttggtcataaaaaaagaagtgtttgagctgaaatagttttagaatgaataacctattggaaagtgattgtttgtatcgtgtgaatgaagacaataaaaaaactaaaaaatatcatatgatgatttgtaaggtcgattaataaaatatttaaagccttaagataaaatgaacctgtcgtaagacaatgatgtgccaataaaccgaaaaagaacgtgggattcataaatagtggcagtcagaacattacaaacttatgaacagtaacatatcgataatttaatgataagaaacagcacacataaagtattttacggatatcttaaattttagttattacatagtaaaccaaaaaatctttcgtttaagtctggaggacgcatgtagtagtattccacatgagcaaatttgttctggttgcaaagctttttgcaagcattctcacataacggaagagttgcttttttaaacactttcatgcattgattcgggacacaatgcttaacacatacttatatcgtactcgtatatgttgaaaccatcattataaataaaattacaatcatcaaaacactgtatatcttttttattgtttgagtcgccattatttgaagagatgaatttatgagtgttcaagcttattcaaattttgtttgtgttatatagcaaaaaaaaaactaacaggatgattaatgttgagttggctgtctgtatatttttactttatatagcaaaattagttttatctttctacaattatttatttaggaagtctatttgtttttttctggtttgtaaccaaacggatattttagtgcatttttctttagaaagttagtttttttttgtttatgtattggctgtcctagcaatctatctttacatattcttgttgtcaagaaacctacctaattcggtgtaaagttgtagattataagttctttaccgtaaatacatgttgttggaagaacatcttagtaccctaaatgcaccaaaccttcttcaagcatcctttatatgaaacaagaacttacaaaattttatgaatttttaaatgagggatggaactgcaaaaaataataagatcatctatatatacaagaacatgaagtcagagatcgccatcagtatatttaaaggagtactcagatagagattgtgtaaacttttattccttaagcgcattataaagcttcaccatccaacaacgaggagtctgtcaaagacgaaaaggtgatttatgtaaaaagctaacttgggaacttgtcattgatacgaaaacccagagaaaatacaaatattttagctcctcgaccggtacacaaattatttgattattttatttactgtttaaactatcaaatttgaaattaaaaaaaaaaacctatggagagaggagaaattaatgagaagagctgtgttgttgtccgttggataaaggttgataagtttcgctttaatgttttcatggttaccttttgacttcacatattggtggcgaagagactcggtgatttctacaatagaacaagaagctaattcaatactactttcaatcgaatactttctaaaaagctaatacaataatactttttaaacaaaggagaaaacaaaatttagataacttgatattgccctctccttaacaatcattataatctcgcaattaataaatgttttaaagagaaaagataaaacctcataaattaatggttggcaagagaaccgattggattagttttaacaagagattagaaaaaacagttaaaaagaaaattctctcaatgatatggaaagatgatgaggacaatgttggatttatgaatttttatcactcaggtaatagcgaaccaaatatctcgaagatcatgaccgaagagaaaggatagttaagagttcaaaagcccaacaaggctttttaccaattgaagttgcattttttctctaaaattttgtccggagaagcgttgttgtggttcatccgtcttaagccaggcttgaccaacaaattcagtgagctatccacaatttctctcaagcagtactatccatatggataaactcataaaagtaccttcgatgaagatcttttaaacgaga

SEQ ID NO: 37858 - DNA, 830 bp, Arabidopsis thaliana landsberg
  unsure (1)..(830): unsure at all n locations
tcttactactccttgtatcagcttgaaactagttcagtatgtttatcctaatccaagttccttcaccttttttcagatgaataaccaatctgttactgacaatacaagtcttaagctgtcatctaatcttaacaacgagtcaaaagaaacatctgagaacagtgatgaccaacacagcgagatcacaacaattacatcggaagaagagaaaacaactgaactgaagaaaccagacaagattcttccatgtccgagatgcaacagcgcagacaccaaattctgttactacaacaactacaacgttaaccagccacgtcacttctgtagaaaatgccagagatattggacctcaggtgggaccatgagaagtgttcccatcggagcaggacggcgcaagaacaagaacaactcaccaacttcacattaccaccatgtgactatctccgaaacaaatggtccggtccttagtttcagcctcggagatgatcaaaaggtctcgagtaataggtttggtaatcaaaagctagttgctaggatagagaacaatgacgagcgctctaataacaacacttcgaacggtttgaattgttttccgggagtttcgtggccgtacacgtggannnnnnnnnnnnnnnnnnnnnnnnnttattggagcatgccagtgttgtcttctccggtaagttcaagtcctacttctactcttggtaagcattcgagagacgaagacgagacggtgaagcaaaaacagaggaatggatctgtattggctccaaagactttgagaattgatgatcctaatgaagctgcaaagagttcgatatggacaacac

SEQ ID NO: 37859 - DNA, 2531 bp, Arabidopsis thaliana landsberg
gagttatataatttgcctttgtagcgtgatgtttcatcatagtgaggctgagtgaggcacatgttttttactcattttcttaaatttaaggcaaggttagaaaaagttgaagcaaatacacaaacaaaaagagatactacagattcaacaaatatatacatagatgctaagacaagaggtttgatgacaaagtttagagttaaatacaacgacatagcaaacttaaataagctaaaatctggtctctctctctctctctctctctctcttttgctaacttcatccaatgctactactaggcataacccatccagcatcatgaccaacaacaacactatctccatttccaaacactcctcgttgtctcttcttcatcaacgcagctgataccggacttcctacagtgctggaagtcagagagctctctgctgaacagttgttcttatgctctattgctactgcaagctcggataaggatggaatcatcattttggttgtgtcgaaggtgcttgttgttccttggcacccattggtgatggaggcctttatggctagctctgaaagctcttctctagctgcctccaacccagcaaaggcaacagcttgctcctctatagccttgcaagctttctctagaattgattgtaggtacttcccttgtgcctcgatccttagctggagtcgcctttgcacctgcgtatactaatggaccttattaaatgtggaaccatggctcagacattagtatatgcggtttctatggttctaactttcatcaaaagatttcctaagtagtatcgttctgataagctttaacgaaattcaaaggcacaagtcttagctatagaggtttctatatagtctctcattaaccaaagtctctcaggtatttggtgaattcgaagaagaaactagcctctaattgctcgtgtagtcttctttggacttccatctgggcacgcaaagcttcagtgacctggtaactcctggctcaagacaaaaacaatgagtgttatagacagtgaatataacacttggaacaaaaagagaacacttgtaaccatactcgttctgttcttgagcagccaatcttaacgatgatgttgaagatgaaccagtgtcctgactctccgcaacacaagaaactacagagatatataagttcataaagatataaatgcacaactgaatccataaagatataaatggattcttagctaaagatataactgaataccatccttagagttgtcaattgattctttacaagattgcctccccaagcggaatttctaccgagcaaaaaaacagagaacaacacagtcaaaaagcaatgaactttgtttgttataagtagccaaagaagcataatttgatattgaaggtagtaagtaggatcaaaacctgaagatgagatttgaggtggtaaagagtgagacccttcactcccattgttctcattatagttttaggcgttgcttctgtcatcaacaaaacaaacatacacacaaaaaaaacaatcttgtaaacaaatctcaaggccaataaaaaaacctaaagaatgccacagtaattcctaaattgttctaagtgacataaacccattctaattcaggatgattgacttccaaatttgtaagaaattaaacctaactcgttgtcaaattcttcgtactaactgaagaacaacagattaaaaaacaaaacacatttgattccaagatccagaaatttctgtaaagagacacttactgtcgggtccgccgagttgagtgacggcgtcaacgaatctttcatggagctcagaggtccaacgaaggcgaggcttagggtcagtggttaggaccagacaagcgtcgatgggaagattggttccgtcagagtagtctcccaagctgccatctagaggaagcgaagaccgaatcgccgagtacattcttctttgatccccacaaaggaacaaacttttcttcgtttcttttattttctcggctgttttcccgggaaagtgaaagaaagtgtgaagaaagatattgtggatttctaagacagcgaaaaaacgagttgatagattggacaagacaacactcggatagtattttgtgtttatatttgtgcattattgaatttatttagatattttcaaaaaaaaaaaagagagagcagaatttatgttttggtaatttgaactctttgcattgaaattccaaataacatatatgttttgaaaaagtagtaagataaaatttcttttagttattattttcgtttttcaatagcagaatagaacttcaagttctctatcttaagatggtgctaactgctaaaataaaccaaatgaaaaaagaaaaaaatagggtcctcaaatttttttttaaatatcaaatcctttaaacctactagacatttttccaattatttttcttttatataattcaagagaaaaaaagtattctttagcataagttttttaatttttatgttactattgacaaaatttgtttatgtaatacagttccaaatcagccacc

SEQ ID NO: 37860 - DNA, 1054 bp, Arabidopsis thaliana landsberg
cagaggaacaagttcagcaaataagggagaatttgagaactgcacaatccaggcagaaaagctatgctgacacccggagaagactgcttgagtttaaagagggagattatgtctatttgaaggtgtcaccactccggggtatgagaagattcaaagtcaaaggaaagttgtccccttgctttattggacccttcttgatcttaaagcgagtgggagaggtcgcatatcaattggagttaccggatcatcttgcggatgttcatgatgtattccatgtgtctcaacttaagaagtttctccgtgtccctaaggaactcttaccaatggaagagctcagtgttcggggtgatttgacttacacggagtatcctgtcaagattctgaatacattgactcgagttacaagaaataaggtaataaagatgtgcaaagtgcaatagagacatcatggagaagatgaagcaacataggaaagagaagaagagcttcacatagaattccccctcttttccttagtccttcctaaatctcgaggacgagattatttttaaggggggtaggatttgtaatacccagctttggaaaataagagaaagaaataaatcttcatgtgtggtaccttttcatgcatgataattattagtaggcatagataaagtggataaatacttaataaaatgtgcatcatgctggactttttcttgtttgtgcatcaaacacaaaatttataattaaggcaagtctatcattgaattcaaaattagagcactaaataaaatgggaaattagagttggaaaataagaaaatggaaatgagaaaaaggagaaaggatacaaaaaagaaaataaatatgtgaatgaatatactatgttcttactgatatttgaaggtaggcatttaacctaggtatgaagttcacaaataagtttgaattcaaatggagatttaaaagtgagaagaaaagaataaagaaacataaaaagaatgtcgcgcgggcccaatctctgaacctggcccatctgacttcactgcccccagcagcccattccctac

SEQ ID NO: 37861 - DNA, 5720 bp, Arabidopsis thaliana landsberg
cgatttattaaggtttttaaaaaattctcttttgacttcttccatgttagaaatggtcaattgaatttatagacgattccaatttacttacagatttagtgaaaatttgagtctttgtttgaatcccaatgcttagctattaagaagcacatctaagaacattcatgcttgttgaatggaatcgagaactgttctaatcggagtcatgagtgttagaagaaagccaactacttgtgaaattggtatctattcaagaatattaagatcttttgttttggattctttcaggcagcagaagaatgcacttgtgttcttgagcttgatcagaaacatagcggagcgttgatgctgagggctcagactttagtcactcttaaagaataccaatctgctctttttgatgtcaccaggcttatggagttgaaccctgattctgaggtttatcagaacctcgaagctcgcttgaggacgcagttggtatatatatatactctctgtcttgctttcccttattgatagtgttggctcgttggatttggatctaaaaagtgtgtcttgtttctcttggtcaaggaaagtcccttgctccaattcctgagtctgaagcagaattggaagaagagagtgacgttgaacaagacgctgaagataaagaaagtagagaagttgagcttggtgtcaatgagagaagagataagaggtttgagtcggtagtttcccttagaagagatctagagactacaggagaagatgcgataaacaagggggaagttgttgcacctaaaacaccagaggttagagaacagaacagcaaggaagtgccaatgtctggaaagcaatctaatgcatggcaagccatacctaagcctaagggtcattcaacactcgattacgcccgttggaatacagttgaagatgattccagtgaagaagaagacgatgaagacagcgatgacagtgatgagtcgccacctcagtacagattccgtgttaagacagtcggggtgcgtcctgtgaagtgaaacattgtagataggaacatgggatggtttctttcatcctgatatattgcatattgcacaggagagctgtgaaaaaagcattagagtgaaggggatagtgataccaaagcagactagtcatgttttgaattgcctcttctgtaattggtttcagcggtcaccatgtatcaatgtgctgtgtctttttatacatcttcgaaaagaaacataccgagtttagataagatacacaatacagaagaccatgttcaaaccaaatggcctgttgttctatttgttaatactttctttgcctcagagactctgctttgttatcaccatgaagatgataatgatttagaattgaacagaaatggaatttacaagcttcattattgataagtcacaaaaatacatcactgccaaagttttgtattcatgacattaccaaagctagatttgattagctcatatgaataggcccatgcctttatctattccttctcccatcccttgcttctctcccatttccactgtgtgtctctcttgccgttcctttataatctctatgactccgacgatcatcatctctatctcgtcaactctccacatggtgtattcatcttccctattgtctctttcttttctctctgtgtttcttctccctaccaataccatcatcattcctcctctccatttcccttaactcatcccgatgatgctgtcttctaccaatgtacttatctgccttgttctcattgtcactttcatctctgttgccatcttttgccttctccattaccacgaggacttgtccgacgaatcttctccctaacacccctctcatccctgtcatgactcatgactatgaaccctcttggggatttcaggtacatcaccctcaaataccatatcatagccgtacaaaaatctggaaatccaacataacaggaggttagaaaagttgacaaactaatggcattgacagtaggaaacacaaataaggaggtggcaaagcagcacattaggcaacacagagtaaaggactcaaaagattaagtatggccaaaatatccacatatgattagagatcgtaagaagaaaacaacatcttacttgtacattgaatccccaccagctcctgtgatcaccggtctgtgctgtgaaatctttttgcactgtgtggaagagacacccattgtagtacttgatcctatccatatagtaagttaaaccccttaagagacataatgaatatcatggaaatgttacttagtagataggcaaaaagacacttacttgcagatcttaagaaagttttttgcaggtcaaagggcatttatttgttagatatcaatcactctatccccaagacttgtcacaataagaactgacatgttcactacctgcataacctgaaaccaaaaattagaagtgagaagaaagtagtacgctttttcactagcttatctcattcatcaacaaacccgagcattactgttggggaagggaagaaaaaagaagaaccaaagttgagtttttcagatatcgttcaagttcttggggtttaaaagaagggttaaattgtgacaaaaccaaagttgaaggtatttaaataagaacaaatagctaaaggggtttaaacatgaaatatataaaaggtcagggtttcatggtcaatatataactatctctctctgtctcggacaaagacaaataaaaagtgcgaatcttccaataaaaacacgccacgtagtttatttaggcagccgaagatcccgagggccctttgcgatgtctcaaagcggcggtgacttcaacctctccgacgagattctcgccgtgatttccaccgacccttttgagcagctggatctcgcgaggaagattacatcaatggcgatagcttcaagggtgtcgaatctggactctgaggtggttgaattgagacagaagcttctgggtaaggaaagtgttgtccgtgagcttgaggagaaagcgtctcgcctggagagagactgccgcgaggctgattcgagattgaaggtcgttctcgaagataatgtaagtcaaagagcttcaatttcattatccaattctgttgcttttatggctccgatacttctgcattttaggtttcgagatttggctagatatgattgctgagatcgttgcttaacattgaagagatagtgtctcgggcttgactggtatgaatagattcaggactttcttggtgttacaggatacttaagggtatttctaagtttgggagcaattttgtgtgtgttgttatatgtttagagatctgtatgatgatagatagtctgttttagtttgttttattgagatttatgctcttcatcaaatcagtgattgaatatatgtgctcaagaatcgaatcacctggtgtcacgcttttttggtttcctctgctcttatatgattgtaaccttggcttatgttgttctttttaatgtgatgtctttattttctggtaaagatgaacctgacaaaggagaaggattcactggcaatgactgtaacgaaactcacccgtgatttggctaaggtgagaattttgggggttttccgatgatttttgtttgtattataagagagtttcacatactatacttttgaggggagatagcagctaatgttctatttttagctggagacattcaagcggcagttaatcaaatccctgagcgatgagagtggtccggtaagacattcaagcttttgttattacacattcttttgttgtttgtatgttttttttgcactccaacgggcctctagcttttcctgctacttctctctatcttgcaagcttctgagctctgattcttctccatttgttattacagcaaacagaacctgttgatattaggacatgcgaccagccaggatcatatccaggcaaaggtactgcatcaataaccgattcccaattataagatacgtcttgtttttttctatctgtgaactatttatctttcaaccagtgcagatggaaggatcaatgcacactcaattaaacaagcttacagtggatctacagacacgaacaatccagttgttgaaggtaacattgaatcatctatccagtgttatacttctctctatatgctgcaactaaagaataacagagtttttatttgcagcttcaaaatacactggaaacaaattttcaatgacatcatacatatctccacgtcttaccccaaccgcaacaccaaagatcatctccacaagtgtgtctcctcgaggctattctgcagcaggttctcctaaaagaacatcaggtgcagtttctcccacaaaggcaacactctggtacccgtcaagtcagcaatcatcggctgcgaattctcctcctcgcaaccgcacactcccaggttcataggatcttaaagattgttacttgtataaaattggtaaaactcaagtatattttctcatgtataaattcttttccagctcgtacaccgcggatggatggtaaagaattcttccggcaagccaggtgagtatttatttcttcagttcttgtcttagctagtgtcggtttttcattaaccagaatctgaaattgttgatctttttctgtttcatttgtaattcacaggagccgattatcctatgaacaattcagttccttcttagctaacatcaaagagctcaacgcccagaagcaaacccgagaggtaaaatttgtcgtagttcatgcgcccttttttctttcgatatgtccagattacggattcaaaaaagttaatgcatttcacaggaaactctgaggaaagcagatgagatatttggggaagagaacaaagatctttatttatctttccaaggtctccttaacagaaacatgcgttaaactttcataagccgttatcttgaatctgggccaatgtgataggatggatattaaccattgtagtatgtgtattccctacgggatttagtttgcaaagtgttttttttgtttcatcacaaacaaagaagaagaagtatctcgttttgggaagtgttgagtttctctcttataattggctttgaataaagctttatatgaaagtatgtctaatacacacacttatcaatatgtaaacatattctttctctacagaattaagaaattatgagttcatacaaaaatatataaaacattgaaagaaggcagattgaaataaagtttacaatcttagttcttttagctagtactttgctaatctagacaaatactttaatttaattgtatatttatcatgttcatattaattacatacacatcttatcatttatttattttaactattgcaaagatatgatagagtgctaactaaagctagcacgaccaaaggaagtctccggcatcatccgtatacgcaacagccatgtcgatgtcactgtagaagtctttgttcgaggggaaagtaacggtacttgccgtgtacggcgggggtttggtatgaatacggtggagcgtccttatatgaatcaactcggcttgagcaaaagcgagctgagtttggagagtttccagttgtctgtgtaacgacgaaattgtccctacacatccatacacaggatcttgtatcctcgcgttggcctcgtacaccatcgaatccacggcgtcgctccggtggttctccgacagctcctacggtcgttaaattaatatactttagtttgaattttaataat

SEQ ID NO: 37862 - DNA, 2945 bp, Arabidopsis thaliana landsberg
ctccagggcttacaataagggcttcctatcatcccgggaaatccacgtatctctctaatatggagtagtcgtatgagatcttctcgagtgggtcttcttaggtacgcatccctgaacaaatatatgattccttcaataaaattttccaaacataacattgaagtattttcaccaatccgaagatatttgtcaaccggataagccgctaaactatacgatatcatacaaattgttgttgtagccttctatagtgcagaaaaaccgaatcttccggtagcatctcttctttgttcgaagtatggaatttcatgggagagtcgatcaatagtatgtaggaacaacggtttgttcattctaaaaaggcgtcaaaatatatgaggagaaaatgttagatcttctcttgaataatcgttccataactagatgtgtccttgttcacagtctctttcaatataagcttgctttgttgttggcttggcttgacgacgatcactataattctctaatgcttgatccacatattgatcaaaattgtcatccatcattttgtcaagattataatgcgaagaacctaccattttggaataagtagaatttcttgggttttgaagttaaggaagagtgtttcttgggttttgttgttgaagaagagtgttttgtagtgaaatagaagattgtttggagttaaagaagagtgttttgtattgaactagacgattattttctgaacaaagaagattgaagaacataaaataaagaagagtgaagaagagtgtatatatagaaaagtgagaaaaattgaactaggacagaaatggtgttccgattttattgtgtggtctcaaaccaaaaatacatgtcctagtggcttacaaaacaagtggtatcaaacaaaagtacatgtcctagtggtttacaaaacaagtggtatcaaacaaaagtatatgtcctaatggcttacaaaacaagtggtatcaaataaaagtacatgtcctaatggcttacaaaacaagtggtatcaaattgtgggggtaaaaaagcacaaaacgcataacaagttggtcttgtccaagtgatgtcggtgagaagtgtccttgtccacgactttcaaaattgagtagactcaaataattaaacaaaacacatggactttaaaataagtaagagcagcaaagacaaactaaataagacaacattcattaatactaaaacacaacatacttgtaggaaagtcgactttttatacctgtacaaataaactgtgttgaatttatacatttaacttatacgtgtgctaaatcatacctctacttttaagaaatttgaattccaaatccaaaattaactttttgtgctaaaacatacaaaaacgtgtaaaaagttcaacggcgttaaccagtcgtaaaatcgcggtgacgtagatgcaacgtctacaacgtcaaaatttgggacatctgacttatttgataataaacttgttgattttccatcttaatgttttttgttaggagtgaaagttaacgcaaaaaaaaaacctttaaaacttgagcatgaattccacgagattatcaatatttctcaggttagtttaaatactcataacttatgtaagtgatgttaatttgggtatggaagccatatttaataaataggtatgtataaaagaaattgatagatttaaacccatttaggggaagaaaataatctcatttatgaaatggagtttgacacaaaaaattaggtacccaattaatatcatttattttagttatctttattacaaatgttaaaagataacttgtagacgaccccagagagttcacctatatgatcgccgaagagtttgccggtacgaacgtcgtccgccagaaattcggagaggagattctcgagactgcaatcggggatttcaccggtgtggatgtcggattcacacactcaagtatttatattatttgtgggcttaaactctcaagtacaaaagtacaagacagatacgcatagctagtaaaagtataagagagtatatagaaatgtacgaagaatttgtacatagaaaatagtatagtattccttatgtaaagatcttacataaaaatagaaaaaaaaatcttttgtgtattaatgagaaaataagaatgtttaagtttaagctttgtggtcaaaatgtaaaagccccatttttcttggagtcttcacctatctttaatagcctattttcttcttccaatatgccattatttggtcattaactatagaattaattcacaaaataactttcacaatcaattcataaacttcattgataagtttattcttttgaccatagtcattaatccatgaattaaactacaaattaatgttaagatttgaccacctcctttgtgcaacatgatccttcttgggcttggaaactgatgggccttcggaatacataagagatccagtttgcgggatccggtatcaaaattcgggttctctacaaaaaaagacacggatgatcccctcccccacactcttgctcttacacatgttgacatgcaatcttttacagcaagccaagctataaatgcgaaccgcgacacaacttatgaaaaccaaattgtacaggcccaaggttgctctggacgacaaagaagaatttgtttccgtgtaatcatagctgagaattcatcttcatatgtgtctggtgcataccaccatagaatatgatcttgactagccgagtgtacggacggatctttagctatgatctggtccacaatcaaacttatatgttggttctgaccacgacggattgaccagtgacctcttgctacaacctctgcaactgtagcatctcggtgcactcccaattcatatgttcccctttttcaactacgatcaataagacttcccattgacaaccaagtatccgactggatcgtgtctaactccatttttac

SEQ ID NO: 37863 - DNA, 1346 bp, Arabidopsis thaliana landsberg
accaccacgtcagttgcaccttataagttccttgttcaggttccaacttctcagcatttggaagaaccaggttttctgtttagcttcctaagtggttgagatagaacctagacccaagatatataacttctcagacagccttagtcaaagaaagtgtgctgcgacagaatttagtgaaacctaccgtgatgctctctcctcttgaaataaggtaggaggtagggactccagttacacgagccatttcgacataattatatataaacatcaggttttcaagaagcctctgtgggaggtatgcatcctgtaacagagaaaagaaacgtggtgaagttgtagcttcttgtaatatttagttggttgactattaatagagaagcagctaagttagtgtctgaaaatccttccacacatcctacgaaacacattattccatgtgtcacaaatatcgccagcaattgccagaagtccttcaagcctacctcacatccagattccagcatgctcaaaaaaatcatgaatggacatatgagcaaccatttctatacacccttatctacaaggtttcctcttgccacacgtacaaaaatataagcagagattactaaaaaagtttttaaaacacacatcaatgttcatcttttacactagaaagggtgggacttgggactcccatcatagcttgggacaacatgcaataggacctttaggtggttagacaagcttgatagctagttagaaaatcttaaagttatctaataacaggcaatgcatcaggacatagacagcactactccagaataaataaaagtaggtaccttcaaacaataaacagcaagacgcctcctggtttccgcattcccattctggagatcagttattatagaatggtggacatcttctttctgcggtagacattcaggttagccacatggtaagtattaattcagtgaaattctgagcatagttactctgcttcacctgctcggaaagaaagtgagctgagacagaattcagcgaataagaacttaatttgaggcctctgtgtattgcctacaataattaaaagacgaatcacgttgatgttacaaataaacaatctaagaatgactcaaccaaaatgaatttgttaaggacaaaaaacctgaataaggtcaaactgaaatcttccttcaattgtggtctctttactttctcttattccttgttgtctgaaacatggcgatataatattataagatgcgagtttggagaggtcatgaggcactaatagtatgcagcagaccagagtagcaatagaggaagcgatgatagtaactagcagcagttagtcctatactcacctt

SEQ ID NO: 37864 - DNA, 1172 bp, Arabidopsis thaliana landsberg
ctcgggccctcagacgtatggcctacacctagccttttctctttatgcctgacgacgaatccagatgaggacgggacgatggtgatgcgacatgctcacaatccactatttcagctccattgcatcttagaaaaacatgccacggtgcgagaacatcacacacgaaagctttatatatcgttatagataattgcaaactaaactttcaacttatgaaaataccttgttttaagataccaaatacaggtatatgaaaacaaggtttactgggcaaatgtgtttgttggggaaataactttcatcatgttttcatattttcagcaaattcggagatcgtgtgtttcacattgagttgtattatgatgtataattattgtccattcaacacatggtcggctcaaaataataaaggatccatagctggaaaaaaaattagttcccatttcttgtgttttgttatgtaaatttttttttggatcgtaattgtactagatttacttaaaaaaaggagaaattttgggtggaccctgtgcctcatctcctccaacacatatgtagagtcgggcctgaatataatgataatatatctcttaaaagtatatatatttgactattgagtcatatacacctatctttgttgaaattcaatctaatatatttacaatctataacaattaagaaatataaatacaactacgaactatgaggagaactttatcatttaagaaagaaataaaactacgaggaggaaatgtaaataaatatacaataataatgctataatttcccttgaggtggtgggacattgagtgataacaacacactgaccgtttcatctcacaaaaagacaagtatacactgacaccaaaaaaatcacattaaaaagtagactcttttatataccaaaaaaatcacattaaatccctgcaaataaaaataaaaatatcgacatttgttttttctttacttgagagttgagatgttccaattagatcatgtgtgaattaatttctcggttcatttcgtttttctcgaaaacacaaaaaagatatttggaaaggttcatttttctttagcttttgtagtaaattttcatggaactatgtggaatataattcatagtaactgaagtacatacagtagttgttaaaaattatgtgttgtcagcaaaa

SEQ ID NO: 37865 - DNA, 3888 bp, Arabidopsis thaliana landsberg
gttcaagtttttgaattttcatatttcaaaaatgagagctctggaacgaaaaaataaaaaaattagcgccaaatcctaggttgcccgccacgttacttatctcactggcaatgagaggattttactgaataatttgtaacagtttttcctttaaaatagaatcatataataacagaaacaaatatattttcttactggaaaataaagattgattccctttttacattggtcggaatttactcatttggaacataaatatagcatttactcaaatagtatatttactgttgaataagcactttaggaaaacacatcacgtgacaggttgttcataagaaatgaatgcatgggacgaaacagctaaacgaattcgctacagatgtcggtcaaacctgggtgaagtcatcatatttttttaaaaaatattttaatcttcaataatataaaaaaacatatttgtctgtaactaaaacattttcaaaaacaaaaacaaaatagtagatatcttttcaaaaaatgaaagcagttaaaataaaactgggaccgggtatcttggggtcacgtgatatgcatcgtagatttcgagattagaagccacgcgctgctgactcagcagaaagatagtcatctcaaagaagaaaaatatctcatttgtacaggtgtcatcatgcgatttgcttatatgaatgcggcgtcccgtttagtaattcactcctctctgtatcaaaatttgtggctaatatatcactgcgaattgacgaattgagaatgtttaaaaaccaaaaaaaaaaaaaaaagtagataacttaacaatttttaaaatatatagtttctacttatcgttatcaataatgactaccaaaatatcatgtaaatttttttactttttatatgtttcacaaataatatagtttttacaaagacttttttgttgttttacattttttattgtcactttaaaatgtgttaggcggtgtaaaaatgtaaaactgatacagtatatttatgtgacacggtaaaagaggatatttcaaaagtgaaaaaatggaaataagtaaataaaagcaaagaatataaaaatattttattctatttattactttatatataccaaatatggctaaagcccgaaagatcctataaagtaggatttaacagtgacttctgaatcttctcactctaaacttaacagtctctctttctctttcattttatatacccttttcctctctttctccaaatctctgaaaattttcaccagaatctctgttctttttttcaccagaatctctctgtttaaaataataggtgatgatgatggatgagtttatggatcttagaccagtgaagtacacagagcacaagactgttatcagaaagtacactaaaaagtcgtctatggagaggaagaccagtgttcgtgacttggccaggttggttcgggtctcaatgacggatcgtgacgccactgattcatcaagcgacgaggaagagtttctgttccctcgaagacgtgtcaagagattgattaacgagatcagagtcgagcctagcagctcttccaccggcgacgtctctgcttctccgacgaaggaccggaaaagaatcaacgttgattctacggttcaaaagccctttgtttccggccaaaaccagaaagaagttccgtggtgttagacagcgtccatggggaaaatgggcggcggagattcgagatccacgaaaaggtgtcagagtttggcttggtacgttcaacacggcggaggaagctgccatggcttatgatgtagcggcgaagcagatccgtggtgagaaagccaagctcaacttcccagatctggatcatcatccttctactcctccgccatcgtctacttcactaagattatccgatcagccaccggcgaagaaggtttgcgttgtctctcagagcgagttagctcagccgagtttcccggtggagtgtgttggatttggaaagggggaagagtttcagaacctgatgtacggatttgaaccggattatgatttgaaacagcagatatcgagcttggagtcgttccttgagcttgacggtaccacggcggagcaaccgagtcaactagatgagtctgtttgcgatgtggatatgtggatgcttgatgatgtcattgcgtcgtatgagtaaaaggaaaaaaaaacagaagataatgtaatatgtaaaaaaaatcaaataaagtctgtaatatatatgtaaccgccgttacttttaccgtcgcattggactgctgatgatgtctgttatgtaatgtgtgatgtgtaaaatgtgaccaaatggacgttatattacggtttgtggtattattagtttcttagatggaaaaacttacatgtgtaaataagatttgtaatgtaagacgaagtaattataacttcttaactgttttgtggtagtcctgattttgtatatcaaataggggttcctaacttgttattattaggttaggtggaataattctagggtttttattgacaaaaattaacaaatagtggtttttatggaaaaaggtgatggtaccagtatagtgggaagacacagaagaatttgcagcctttctcaattcttatacgtataattctcgtatgtctatgaaaagggttatacgtatgatgatttatgagtagtgagtacatacatctttttcactactttacatgtaatatttatggaaaaggtctgatccgtttgctctatcgagaattggaattgtgagatatcttgattttaacaatttcaagattaatgaagaacaaaagcaatggcaacaacatacaaattaacattcggaagaaagaaaaaaacttacaagtgagatcaaatttggatttagtatttaagatgtaagttacaaatatttcataaactaataatctattaaaaaaaaattattaattgtattttactttataccgtaacctaaacaataaaatacaaatttataattgaaggattttaattgtttaaattactctttctaccatatttgtttttatttctttaaacttactctttctaccatgccatttaattatttttgattgcaaatattgtacgtacctttcaactgtgaactagtattatccttatccctatcgtttcccaaatttcgtcttacgtatagtattaatacatgcatgtgattaaatagaagataagaagatgttgatgtgttgagacttaaagactttgatgcatgaacctctaaagcctagttggtaacttggtataataagatttgaagtgggtccataaaatgttttgaagattgacagaatctatttgtttcgcgatattgtctatttctttgacgttttagagaatcattagtaatttaattagtaataaactaataactaagcggcatcttttcgatgtgataaccaaaatcatataatgatgcgtgtcttagactcttcgatacatatgtagataagatagcctaataaatctcgattggtttctaaaatttgtgtttacttcatgttataaatagtaaacacaatactaatcgaatcatgatattcacggttacgacaatgagttgacaatcagatatacttcaaaagaattgtggttaatactaactaatataacttgttcgctcaatctatatatataaatatataatcaaccttcaatattatgaaaccagatgcttatatatatctacttcgtaacatttaatcatttatcatgcattcaggctgatcgtttacgatttacccaaattcaatatatggaaaaggtgatggcatagtgacgttattcaaatagagtaagtgaacttaagttagttctcttgcatagaaattcgagcatgacattatgtttgaattttaattaaaaca

SEQ ID NO: 37866 - DNA, 5360 bp, Arabidopsis thaliana landsberg
cccccccccaccctcatcagagacaagagtggaatcgatgcttgagcagattctggagagccaaacaaagcttgttgtggaatttaatggcaagtttgatgatgtctacatagatcttaatgggaagatcgacaatctaagttctcacttgaagaagctagatgtacaggtagctcaaactgcacaatctatcaagagacaagagggttttcttcctggttaccttgatgctaacccaaagaagagctgcaatgccatcttgataagagaaggagatgatgtgtgggaagaattggaccctgaagaccagctggagctcgtagttgtagaggaggtgtcgaccgacaccttccagtgtcgatcgacagcctacgggacgctcttctctgagacaagccaatacaaaggtgccgatcgatacccatctagtgtcgatcgacactggatccggactgcaccttgtgaggtgcaaatcccaatggaccccgagtctatttacactcctcctgtcacttatctgaggaagcgtcattctaagcaggagattcatgctgcttagtgcacaaccataatggagaagatcctccattttcttcctaaagatgcatctgagacatcttctactccactcaacaggtatatcaagcgacttgttaacaatggtattcgctcagatgaagctaagctgcttaccagggacatcagtgcaatcatgctgcctaaggccaagaaggacaaggcatagagagtagacatagccgagtacatccgcaccattactcctggtcagaccactgagtagcttgtagatccatgtagctttgttcttgattgctctatctccagaagcagttttagccgctttttgtgtgatatgggatccatcatcaacctcatgcctaagtctgtttgctgagagactaggcatgactcactacagacctactcgcatcactcttctcttcgcggatcgttccaagcgaatccctgaaggaatccttgaagatgttcatgttaaggttggtaactctgttatccctgctgatttcgtggtcctggactatgagaaggaacccaaggatcctcttatccttggaagagcattcatagctacagctggtgctaggattgatgtgaagaaaggtaggatctctctaaaagtttgtgatttggagatggagtttggcatggattgttcagagttcactacgactattagtagcattgcctctggcacaaacacacctcctaaaactgctcagaatccccagacagagacacacacaatgctcccatcagctcagctcgccaatgaaagttgcagagcaacgatgtcgatcgacactatccctcctgtcgatcgacaccctcgggattcacagacagaggattctccacattctcttcagccaacacctcttgcggccctctatgataagttctcttttatctcttgtcctgctttcccttcgattaattctttagattcttcgaagtctgcttcacaagataacaagcctagagttctttgaaagcttgtttctcctattgttcttgcaggaaacgaggagagtatcgatcgacaccaccatgagtgtcaatcgacacatgcagctgccctgaccagatcagtttacacaccgccttggaaggcgaggaggcagcagcaatcctccaccactccaccctcatcttgaactccgccaagtcaagctattgactcaaaacaagcgcttagtgggaggcaacgcactagtttgatttttctttcccttctttttattttctttatttttgatttatttttctcacctacttcggatttgaatgccactggggacaatgtcgtttaagcctggaggaggttcttactaattatgcttttattttttattcttattatttttcgtttttgagtttattgagtcattttcttatcttgaaaaaaaaaaacgtttgtttattttagttaggaatcatgatctatatttcccttgattattgcctgattgatgagtgttgcaggttcggctcaatccgaatattggaaaatctagatggcaaaccaacagacttgaggatatcctagattccaacacaaccactaaggctggagctaatctcactgctcttccttttacctcttcaaacgttagtattcatagatcttgactccatgtccataactgatattgagaccaatgtgataaaaaaaatgtgttcttctccccttataaaaagaaaaatataatgagagattgagacgattttcagataatgtatagggatagaaatgtttcctatgacccaattattatacattatttggaatgatcaattacaaaagttagaaaaatgccgagggtgtcgatccagtatgcgagttcccatttgtttactctctaaaaagaataagtctgggggaaagaaagaacaccaaagaaaaaatatataaagaattgtcgatttatcatggtatagtacaggaatgagtctagaaggatcttgaatgttatcttgtttgatgagacccagagatgaaagcctggtggatatagttgtggaacttaggtatggaatctagaatgttgtgtaagcttgcagagaagtacatgttggttaggatttgattagacttgttaggcatatggacttagtttaaatgatcatggcaataagctaaagaatgttgggagttcctttgttttcaaacctcttccacgggttcggcttttgtgttttgcttgagggcaagcaaaagctaagtctggaggagttgatataaccctgtttttattgattttatctatgttttaggtttaggattttgagtctttttgttatttctcgagtctttttagagtcttttcaggtattctatgcagtgagacaacaatggagatgaggagacattttggagcaaaagctaaggaaagggagctaaggatgatttcagatttcagattcagagatcgacaccagtttcggcccagaaaagtccaatacgctttcaagtttacaaaagtggaaatttgccccaaaagacttccctatttgcattattagtccctcgacgttttatagggtttatatatagttttaaaggtcattgtttagacctaagttccttttatcaagttctttttaatccctattttcagagagacataagctattcatcccttgttcttcaaacattcattcagttcttaatacaatgaagagatcccttctttccctcctttatttgctctgtttatgctttctatatcaaatatgttgtttgctttaatcaatatgtctaagtaatctgcttgttaagaatatggtttctcataagggattcatatggttaagtagatcgccccctattaggttatctgtagaattcttcatcattgattatacttaatgctaaatctagagtaattgactagatcatgaatccacacaatagatatgcccaccataggtatctgtagttggatctattatttgatgagcctggtttataggtgtgtaataagaatcagcctatctactaaggtgaacaattgaactcgtttagaatgcatatttaggttacagatctctcggcttctccgattattcttagctatagatatagggagtttcgcggaacaccaccggttattccataattagaatttgagtttaaaaattgttcgataacaacctatctttcattagatctactaaccaatagtttgtttagaataccctgttcctagctcttttcctaatcggttacaacacaatcaacttgctgtctttttactttattgtttacaacacaattttgacatttaactcattgtttgaacaaaagcactttgtgaattcgatcctaaaatactgcaactgatctcttatttgagatagtagttcttagggtaatttgaaccgtatcagttacgttgtgaagttagcaccctacccattttgtgaacttaccccgaggcggttgaacagacaaaggacccaaggcgttttgacatggcccggggcaaacacatattttaccccaaggagactattagtcttcaactgtctggttcggtcttacctgtgggggaattcgaccccaacaattagcccccagctcgttggtttaagagttaatgcgacgagcttcatggatggttcagtcgagccaacaacttcttctttgaaagtgattgatcgttgtctcctaacgcttcatcttccctgacggtcaaatttctgttgcgtgtgacgtttgtttcttgagaagaggaagcgtctcgcgtatgtccgaattttctgcggaggcttgcgaggtgaacaattcattcctccaatccacagtcgacaagaaggaatacagcagaaccctgttagtcgacgatgaaagagccgaagcggcaaggtctgccggtgcctacagacccactcctcaccgcgaaggccacagcggccggttatctcacagagaacgatcaccgcgccgtgattcacctcggccttcctcccgaactggactaagcagcgaaccgcttgctgacctaattcggaaaaagagagacagatcaacccgcgacagctcctcccccaaaagagataagacgagagcccaaactgatccctctcctcgcctatcggcaccaccccgttctatgggtcctcctcctccagtcaccatatctccttcgtctggatccggaggtgaaaaggccgaccggagtgcaaacccccgacgagaagaagctgaggtccgagatgctggaactaaggttgttctggttcctcagaccaagtcgctcacgggttagaaattaccttccttttgtttatacctgccttatcgtttcgatttactgacttaacgctccttgcctggtctaatcctttctttattctaacagcgatggaaacagagggaaatatctttcgatgcttcaaaactcgaaaagacaccatcctgccagcctttgataggtggcgccctgtaattcgcgagcgattcctactccatgccgccactcatctcgggttagttctcttcacccgtaataatttttaaacttcatccctccacttagatgctaaatctttttcattattacttggttcaggcaaacagcaaactcaatgacatgattgagtactacgagagactgttgctagacagggagaaggaggttatgacgtggaaagacaagtattcgtcccttgagtccgatctccgttcttcaaatgacgccaggcagaaactggaggatcaactagacaatctctcctccgaactcatgaaatctaacggtgaattgcaggaccaataccagaggtatgacaagatccaagaagaactctcaact

SEQ ID NO: 37867 - DNA, 3289 bp, Arabidopsis thaliana landsberg
aactgttaatttccccctcgttccagcagcaaccgctacaaaagatgcaacatcctccttctgagctagctcagctcttgtcgcagcaaactcagagtctacaagcaacattccaatcgtctcagcaagcaatttctcagctgcagcagcaggtgcagtctatgcagcaaccaaaccaaaatttaccactctcacagaatggccgagctggtaaacaacaggtatgaatatagtctctcagttgcgtctgcccagacgggttcttcagctgctattgtgttgttttaacttaaaattatttcctgatagacatcccgttttttatccttcatgtgttttagtattctccccttttctaatgttcctctcggctgcttctttatcagtgggctggatctgcaattccaagagtggctagcaccactggttcgacaccagtgagctatgtgcaaacagctgcacctgcagtaagtcagagcgtaggttctgtcaaatgtacctggaccgagcatacctcgcctgatggatttaaatattattacaatggtctaacgggtgaaagcaaggtgagaaacgtggttcctctttaatatatttccttgtgagtttcaggagtattcctcctggtttattgtgctattgataatccttacacatgtatattttatatttgaagtccttcagtacgtgccatattatgtatataattcacttttgcagtgggaaaaacctgaggaaatgatagtgttcgaacgagagcaacagaaacagcaacaacatcaagagaagccaactatacagcagtcccagacccaattacagccgttgcagcaacaaccacaacaagttcagcagcaatatcagggccagcaattacagcagccgttttattcttcactggttggtttcgttttcatgctggttacattcaaatatttttgtcacatggtttctaatttgcatatttactcttgttcatttggagttgcagtatccaactccaggggccagccataatactcaggtgtatatctgtttaatctgtttacttatttttcatttcaagatttgattcttgatatgctaatcttgtggtagaaggagattgaccaccttaaagtaaaattcagtagccatggttttgccagcattttgaaatacagataacaaatctctaacgtgaatgcctattttcctttctaaaatgcagtatccatcattgccagttggtcaaaatagccaggtacatatctgaatctgtggacttatttttcattgaactgattgattctcagttacaacattgacttcctctgatgcgtagtttttgtaacatatcagaataaaaaaaacttcatctgattcgtatattctctggttgaaaatctttttttcttttttggaaaatgcagtttcctatgtcaggaattggtcagaatgctcaggtatatatctcattttgtattaacaatttcccataccttctgtacctttgaatttaatcacagaacataatgagttcttggatttaatgtcattttaaaaagaaacatcagtgatatgacttccttccttggttaaaaatggtttaggcagagcttattttctattctgtttggattgtctaggattatgctcggacacatatacccgtgggagctgcttcaatgaatgatatatcaagaactcaacaggtagttatggtttttatcagtgattcagaacttctctctgttcataattcgtcctttggtattcagatgttctttttcgttgaaaccgtttttttccttaattctctttacaatcatatctctttttcccagagccgtcaatctccccaagaactcatgtggaagaataaagcttgaggttcatatctaccctttctctcctctctcttgtattttctccataccgaaacacattccaatgtatgtggtttctttagttgaagttacctctgtgttgatcgatactctacttcaggtacatgagacgaggagctaaactatctcagtagctagatagaaatttctggaactaattagtcaaggagaggaaaagcagcaatggtagtgtccttagtctctgatttttttagttaaccccttcagttataatagataggcgatcgtagaccatctgcattctatcttttctctaatcagatatctcctcctttttcattttaagagctgccaaacaatggcctgttgtaacatagctagcgcaagttatgtctcatgttgtgttactagtagtaacttagctgggtaaaccaaactttgatccagattaggagtcatatataattatataaatagaatatgtacattcatagatagctcatcacttataatgagactagatcttagcaaaatccaactctaattgtcattttcagagatctatcaatttgtagtttcctgatcttcatatatgtgttcgctcttctaatgattacggtaaaatcagagtcctacgttggtggacttctttaatttttatatagataattagatatcattcaataagtcgggcgtttatttttagttaatcattctacaattcttcctaatctcgctattactaccaccgggtatccctcccattttaaccatagcgttcttaaaatcctcaaagaaaaccgactgatctgttgcgtaggtctcaacaatcgcccttgtccctgggtcttgaaccgctaaagcctggtctgatggaagcaatccctcacccgagaggaggtttacatagtactggttgtcaaatgttgatggagtcaccaagtcaagctgagtgatacctacactgggcccaacagtcgagcataactgttgcagtgactcgaggaactcaaggttgtctccgtggttagctggttgtccagtttgcagtggctgcaaccgagctgtaaacgaagtgcaccgtgcctttcccaatgtatgtccacctggtttccatatgtgtaagtatcaataacttgggttggtctagagaaagataaagaagagtacaagagaatgtataccggaaagagcgaccatgtcggtttgtgaaaggccaagattctggaaagtagagatgagagttgatacggttgagtttggtgagggtaagccatttgttgctgcctgtttgcttgctgatctactgtcttttcttcctacttccacctcccaccttggtccacccgacttcaaaaacccgatttaaaaatgtttaacatagacgatttgaattgagttcatcaactttattatatgatgataactaccacaacgac

SEQ ID NO: 37868 - DNA, 6351 bp, Arabidopsis thaliana landsberg
aggagtgaggtactgaaaccaaatccatacccgttatatcccccagttacgagttgtttcctacacacaccaacacaacacaaagatgatatatagatcataataataaaagtaaatacttatatatactagtatatattgtatagattaccgagaagaaggttgtgtcatgggctagccagaagaagacaacagtgactagagccatgtaggttccaagaacaactccagtagcaaaaatctctttaagcttccatgaatcaggaattggggaaggcttgactctatctttggaaatggtcatgatggttccgtcgtttaggattgcaataatgaggaccatgaagggagaaaagtcaaattcccaaataagagccacaagcatgaagccgaggactatacggattgtgatggagactgcatagattgtgtagttcttcattctttgaaagatagctcgactggtgagcacagcgctgacaatgacactaagacctggctctgtcaagactatatctgaggcgcttcttgctgcatcagttgcatcatcgactgctataccaatatctgcctttttcagcgctggggcatcgttgacaccatctccggtcataccaacaatatgtttcctttcttggagtttccttacaatctcatacttgtgctctacgcaagatcatagaattaggttagagagataaaaaggaaggaaaagtgaaatagaggatggttactataccaggaaagactccagcgaatccatcggccttctcaatgagctcatcgactggaactcctccggtggtgtcatctttgttttcaagtaaagaagaggaaggatacatgtttgttcccattccaagcctacggcctgtctctttaccaatagccaattgatctccagtgatcattttaacattcacaccaagatcaagagctcttctaatggtctctgcactgtcatgtcttggagggtcaaagagtggcaaaagaccaacaaactcccacggtgttccggcgctttctttgtccttctcaggaactctctgacgtgcaaccccgagtgaacgtagaccacgctcagcaaacttgtcaatgatctcatgtgctcttctctttgtttctcctttgagatcacagagttcaattatctgctcaggagcacctttgctgcatctatgccactctccattggtatcgatgtaagtgatcgcggttcgcttttctactggattgaatggcaagaaatgcacttcagttattccagctcttgcctcttttgggtcacccaacatgttaacaatggaagtatcaatcgcatcttggttctctactcttgaagccctagctgaaagtagtatcacatagtccttgtctacgtctttggggaatacctaaagaacagagaaatccacaagacatgaagcttctaacgtaaccaatttaaaaacaaatgatgatgatgaagagatttgtcttgaaacctcaatcaagttcttgtcaactgtaagtttgttgagagttagagttccagttttatcgctgcagagaacatccataccagccatttcttcgatggcggtcattcgttttgtgatggcaccttgctgagacaacctatgtgatccaatagccattgtcacggacaacacagtgggcatagcgattggaattcctccaatgagaaggacaagaagattgtcgattccatctctatactttcgatgttggatcggatacattataattatctcaatcaacattcctattccttttgaacagatacagaaattaccaatggcggttaagacctgcaacattcatcaaaaccattttagagttaaatcataagattgcttgcaccgcaaggaaatataattcagaggtcagtcataataccttttggaaatggccaacattgttggtactgtcaacaagatgagcagccttgccaaaaaaggtgtggacacccgtggcaatgacaacagcctcaatctcaccttgcttgcaggttgagccagagaatacttcatctcctgggtgtttggtggttggaagggattcaccagtaagagcagattggtcaatttttaaaggatctccttcgaggagacgagcatcagcaggaacaatgtcacccaatttgatgcttatcaaatcacccggaaccaagattgaagcctcttgctccccccatttaccatctctcaacacctacattcacacataggttatataactctcctttttagaaaatacatacctatatatatgtattgagaaatttgcataccttagtctttggtgcaagatatgacatgagagcagcagcggcattgccagcattgttctcctcgatgaaacttatggtggagttgataataagcaacaccataataccgataaaatcttgccaatccggcgcctttactcctccgttggccaaggcgatagccataatagcagcgtgctccatgacccatgagagagggttccacataaaccctaagaacttcaaaaccttgttctctgatttctcttcaagcttgtttgccccaaatatttcaagccttttagcaccttcatcgctggacaaaccttcttttgagcatttcagctgctcaaacacttcttccacagggatccgctcctataatataaatcattcaaaaattattacagattttcaacagttcaagatctcgagaacgaattaaactctgtaaaaatcttacaaggtccacattttctttcttgatttcatcccacgagaattcagtcgccatttttcttccttaaaagagagacagatataaaaagaagatatatccgatggacgtataaatcaacttctcccttctctccttgctctaaagccttctcttagcatgcaagacgctttcaagacgaggccataagagagagggagagagaggaagaagcgtgtattacaagaaacctatgagaaggtataaatacaaaagaataacacactctaaaacaaccattgttgtgttccatttaaaaccctcaccagcgatctaactctattctcggaacttttttcttttcttccagtaatcaggtttggtggcttaccaaagctttcgcttatttcttcctgtccttttctctacactttctaaaaatagtgcatctcaaatttagcctatgatttcaatgtaacatgcagaatttactttgaggagtcaatatgtctttctatggtccacaactccggataaaaatgtgcattaataatatgtatgtaattcaatatacatatctatttaacaataaaacattgtaaatacaggcatgtatgatttatatgtaaatctagtagcaagaagactctctaacctcaatgtttcatttcaagcatcggaaaagtttatcacggggattgtgatagtgagcaaagagtgacggtctttgcagcaaagatgtggcatgtagctagtaattccagaaaatctggtctctccgcaactttttcttgagataaactccaattagctttctatacgtccagtttttccgtggactgaactccaaaacagcttccgagctaagatggaaatcccctttccccagaacttcaaatgcaagtggatcagttaagacaagaggagaatcgtccagattcattcggttgtatacaaactccaaatttctcgctagtcgcttatccatatatgcatcgacaacacatccgaaagtcacaagatccggaacaatgttcaaacgtctcatatgttcaagagtgagatgtagatcccagaagagagccattctagaaaacgcaagagcgcgaatgttaaaggtggtaaggtcaggagagaaacccgcatcaagcattccaataaactctctctgcaagcttttcatcttaaaatcagctgcatatgacagtaatacagaattccataacatatttccaagatttcttctaccgagaccaacatctgacaaaaactcgcgtaaccgataaaacttccgttgtttcaagtacgctaacaccacagctcttatctcttcttcctctatcacaataccaaacttcttaacccggccataagccttctgcatcttatctaaactaccgaaaaaactatagtatctaacaatcacattagcagtctcagcctctaacaacactccctttgaatccatttcctctataacaccctccatcagttccaactgtccattcttaccaaaacaagatatagcaagtgaagacacaccgggaagaagcttcgagtgccttgcagcaacatccttggtgatcttggcaacttcatcaaaacaaccaaattgctcataagcagatataagcttagagactacaaagacatcaggtacaaaacaactgtttataatctcatcccaaatcgtacgtgctcgaagaacaaacccattttcagcaaaacaaagcataagagcacaaagggttctgtaatttggtaacaagttaactgatttcgtttggagaaaaatctcatgagctacatcaggtaatcttctctggcttaaagtttgaactaatggagcgtagtctacgatttgtatcttttgactgaagtccctagatagctttgattccttgatcaactgtacaaagtagagagatacctaaaattcaagatatgaagtgaactaagaaacagaagcaagtgtgtaggtacctttttcgcgattgaaggagcagacgaatccgtgtaacaagataagagcttgagatgttggggtttcaaagatagattgagcgacaacattgcgaccagtctcggttacggtacggtggtgacggaggaatcgaggagatttccggaggggagagagagagatttgggcctcagaagctataattagggtgttatttcagagaacgtttgggcctttattgggctttagaaacattatccccactagtaaataaatgttttcttttccttttataaaagatttcactatttaatattaactattttttttgtcatccgattaataattagagctcaaacgagtcaaaactaaagaatgttatttaataccaactagagtatttaaaaaaaaaattaaatttcaatgatagaatatagttatgaaatttgaaaattcgaccataatattacaaaagatcaagcataccgtctctaaaaaagtatttaaatatttcttaaaacccataacaacacaatacctatcgatcatttttgtaaaaaatttcataatcactcaatcattcaatcagaacatcttgaattcgtagcggcccaaacataagcggtggagaatcttatatattaaagcagatgtcaaaaactttcatgttcgctctcagaaaatgaactgatggatttgccctccctctcttaaggtttttaaggataaattaatatttttactaactaatgagataacttattattttgtttttatattttaatgtgtagaaaaaaaaaaggtttaattcactctcaaccctaaatttcctattctctggcgcccctaatcaaacctaaatcgcctattaatcctaatcaaacctactcaatcataagttgcccaacaaccctaacgggcttatgcttttcaaacaaagatattatgctcgtataatttacgctgtcgtatgtaaaaccctaaaaccttatgctgaaaattcctataaatataggatccctactctcaaacacaaatatcgtagtttgattttaatgcaaagcaatagcaagatcgtttatagttcttttttgtatttcaatctaggtcttttctatgatgcttttaattgattttttggaaacctttttatgttatggtcacttggaaactaagatctcatacatctttgccaattggtgatgagttgtttacccaagctttatagtttcttcgattacatgttttgatttttgtagctgtttggtttttatatttgtgagaatttacttgattttgattagcacttcttttttgtttctcaggtacaataataaattttgggggtgttggaattgcaaacgaacttcgaatcaaaccgaggtatctctctaatctttcttgatttttgtgtttttaaagtaaaaaataataatatttgtttggtttacttttacgtgatcatatagttacgatcatcataaaaggattagccatgcagccgtattttctttggtatgttctgtattcttttacgtgttgtaattatttttgccaaaacagtgtttcccatcagtgttgctgttgcaaatatttcatatttggctcaattttcttatacctaaattttaattttgtttagaatgatgtgtactatattatggagtctatgaagattat

SEQ ID NO: 37869 - DNA, 7646 bp, Arabidopsis thaliana landsberg
  unsure (1)..(7646): unsure at all n locations
tggagtgaagtacatagccgaggcggcggcctatgctgacatgatggcgaaggagggccatgtaattatttataactgtctccttctaatttatatcttttcgctagttgtgactttctgttttgcttttggtaggcgatagctgccacaaacaagctggttgctctctatgagcagcgtctaagccaggtcccctcgacgaatgagcttgaagaaggaaaggccctcatccgggagctgacgtcaagtgtgaaggctggtcaggatcgcgaagtctcgtttcaggtacacctcggttttgacttgtttataaataattcgtcgatgatttgatgattctgacctgattgttatttcaggcggagatcgagaggctgaaaatggagctgtccacttcaaaagacctcgagaaaggttttggtgagacgatcgggttcatggagacggagatcggggggttgcaagccgacaagcagacgacgaggagccagatccatcgcttggagtagaagagggaagagctctccaaaaaggtggtggacctgacttcgattgcacaaggggagaagaaggcggttcacgatgctaaggttgagctggctgctgcgtattcgaagctgctggctgggatcaaggagaagtgggtcgccaaaaaggagtacacaatactggaggggcaagcggctgaggtggagtcgaacttggctttgatcgacaagatcacaaaggctgctattgatttgaccgtggagagacctcggctgcaagcggagctggatgacctagaggcgcattgcaaatcgaagaaggtatcagacttcactctaagcaagttggatatcctgcaggttttggagatttcggtggtatgtccgatggacgtcgacgagcaagggatgccaatcggcttggatgagtttgggagcaacaaagatacgtttccgagaggtctcgtggagggttctggtattgtctttgctacgccagccgggaaactgaaggagtgatcacttacgctcctcgtttgttttaggcttttgtattttttgtttcagacttagtgcctgggaaggctttcatcctttcgtttatttctctttgaacttggtgcctgggaaggcttttatcctttgttcggttaagtacttttgatgcctgggaaggcttttatccattttaacaagtactttttgtcttttgttcgagtgttgacacttcgtcgattttggtgtatgatcacctcattttgcttatgttccggataataattggaactgttttcagtccaagttatttcggattatggtatgttcttcgtaggttcaaacttgaataagtttgagtgattttatctcgagaacctgttgaagtgaggtcacacaggggacctgccagattttgggaactgggcttgtggtatcgccagatcacgaatgaaaccttcgtttcttccttgtttagtatgttatgtgttgatagtgaaggaaggagttaaatatggttgtcgtaggtgagctcgggtgatgtcgaagtgatgtatttttataggtaaggttcacttgtcgactttttggaagcgagatcacaaagtggatccgccaacattcgggtgttgggctttaggtatcgtaagattacgaatgagttttaaatcatagtgtaaatgattgtttttgcgaaacatgatattgggtatcaaaattttcttttattcttctctcgaaattgttaagtacaaaaagaggtaacgcaagcgcggatcttgcgtttgatcatcgagtagggacctgctcgataccgaggggttattgaactgtcaggtgagaagctgatcttcgttgatgaaagatgtgatgtctgtttcccttgttgaagtttcgtctttcaaatagaagggttgagatggtaattgcatttgaagagggaactgcctgcatacctggttaggggattaagcccttttgtaattcgattgaagtggtggttgcgctcttggggggagctgcctacgtaccctgccaagggatcaagccttatcgtagttcgattgtttttgagtacctattagtggtatttcttgagatgcatggcattccaaggccgtaactcaggtactccgttgataacttttacgagtttatagacgtcgtcacgtaccacctcggtgattcgatagggaccttcccagttagttcccagttttccagcgtttagctctctcgtgttgctgaacacttttcgtaaaacgagctctcccacttcgaatgtccgaattttgatattagagttatagtagcgggctgcagcttgttgatagttttgaactcggatcattgcctgatctctgcgttcatcgatgaagtccctgttgtcctgtaatatttgcgtgttcaggtctgagttagcaggactggtggtcattctcacgcttggtattattgtttcgacagggattactgcttctaaaccataggcgagagagaacgatgtttcttgcgtttatttgcgaggtgtagttcggtaggcccagagaactccgtggagtacgtcggaccacattgattttttggaatcaagttttttcttgatgttgctaagtatagctttgttggcggcttctgcctgtctgttaccttgtgggtaaccgggggtggatttggtaagacggatcttccacttgtcgcaaaatgttttgattcttcccgaggtgaggttagtcccattatcggtgacgatctcataaggtatgccatgtcggcatacgatagtttcccataggaagtcctcgacttgtttctcggttacctgttggaaggctttagcctcaatccatttggtagagtagtcggtgaggactagtaggttttttagtttcttcttcccaccgggaggcttccatgggacctacgacgtccatggacctcttcataaacgggtaaggagaagatatcgaggacatttcctcgggaggttgatgaagagtaggtgcatgtcgttggcatttatcgcacctgagtgaattagctatgcaatcggctagcattgttggccagaagtagccttgctttttaatactgagggcgagggtacgtccactacagtggctaccacattgcccctcgtgcatgcttttcatgagatctttcgtttgttgcccgtaggtacataccatatagggacctgcgacgctgcgtttcatcagtctcccctccatgatgcagtaccttgcgctctgggctttgagttttctggtctcccatttgtcgggaggtgtgatccctcgttcgatgtaatcgatgattgggattctccagtcattgtacggttcagtttcgtgcgaggcaggttgttcgggggttccgagcttcggctcttcctccattgcaactgcctccgcggccgctgcaagggctctagcgcgacggtggtgcttcgggttactcgcgtaaagttgcaagttgccgaggtttccgtcccagcgtgtttgaccgttaggtcgatgctcgggtgttctattccttcaactgggataattcttttgacgaaaggatctgacgtggaggcaagagttgccaaggcgtctacagaggtgttttcccctctggggatcctggtcagttcaaactattcgaactgtttgatcaaggttttgactagtttgaggtacgcttccatgcgctcgtctttagcttccatgggcgtgtatatcgcagattcccattccttgagctagcttaatgccagcaatgagggctttgtactgagactcgttatttgatgcgttgaatccgagtcggaacgattgttcgatgacttccacggtgggggaggtgagttgtattcctactccggatccctgtcggttggaggagccatcgacgtagaggagccatttcttattggagttggttccatccaggtccgctaacgggagctcgattacaaagtcggctaggacctgtgctttcaggctggttctggtgcgatattctatatcgtactcacttagttatatagccaattttgcaagtcaacctgattgagttggactgtgcagaatggttctgattggttgagacgtcatcactacgatgggatgtgattgaaaatatggtctcagttttcgagctgacatgactacggccagtgccagtttttccattgctggataatgggtttcagcgtctatcaacgttttactcacgtaatagatcggtttttgtccttcgtgattttctctcaccaggacactgcttatcgaggttcgggagactgtcgtgtacaggtacaacggttctccttcttccggttttgcgagtatgggtggttcggtcaggtatgctttcaattgtttaaaggcttgttcgcagtcctcattccagtcaaactttttctcctttcagaggagctgagagaaagggacgcacttgtcggtggacctggatatgaacctattgagggcggcgatacggcaagttagtcgttggacctcccgtgccgtttttggtgatggcatttcgatgaaggctgcaatctgcttaggattggccttgttgcctctttcgcttactaggtatctgaggaattctcctgatggaactccgaaagagcatttctcggggattagcttcatttcgaatctgttttggattttgaagcattctcttaattgtgggacgtggtctttttcgtgagctgatttgaccagcatgtcgtccatgtagacccccatcggtttacctatctagacagcgaacaatctgttcaccaatcgttggtaggtagctccagcattttttaaccaaagggcattactttataacagtaggtgcctcggtcggtgatgaaagctattttttcttggtcatcannnnnnnnnnnnnnnnnnnnnnnnnnnnnnnnnnnnnnnnnnnnnacaatagttcgtgtcctgcggtggcttcgaccagtcggtcaatatgtgggagtgggaaactgtctttaggacatgccttattaaggtccgtaaagtcgatgcatactctatacttcccatttttctttttaacgacgaccgggttggcgagccagtcagggtatttttcttcccttatcgatctgatcttgagcaacaggtcgacctcatcgtgcacacctttggccctttcgggacctagcttgcgacgtttctgctttataggtcggtaggtcggatcgacgttgagttcgtgtgaggttacctcgaggcttattcctcggaggttcgcacttgaccaggcgaagctgtctttgttttccttgagaaaggttacgagatcctctcgtattgctgagtcgaggtcttgacctatcctaacgcaccatttaggatccgattcgtctatgcagacctgcgttatcagcgatttttgaggtccacgttgagaagggtcggaggacctgactgttttcatttctgcgagtttgtcctctaacattagtaccacggggtcggcttttttgatatgctcgtagccacccatatagcattttcgggagatgcgttggctgccgtatacgactgctatccccttgtttgaggggaatttaatgcattggtggtaggttgatgggacggctttcatggcgtgtagccatggtcttcccagtattgcgttgaaaggagctttcttatcgaccacgagaaagttcatgagttgtctcattcctcgtgcgacggttgggagctggatggttcttggagaaaaggtcgtatctccagcaaacccggtaagtggcgtttttctgccttgcaactcgtaattgaggtgccccatttttttgaaggcatcgtaaaagagtacgtcaactgagcttcctgtgtcgatcattatacaggagagttcgtagttgcctacgtcgattcggataacgagagcgtcatcgtgaagtttatcgaggtcggtggtctcactttcccaaaatgtgatctggtgatcaggtcccatcatcgggcttttcccttttgtgtaggaatctgccctcctctgatgagttttgatcgaattgattgagtcgttgcagagctgagatcctcccatgatgaaatcgatgcgtttcgggaagaggtgctcggttgcgtttctacagaattttgagaggcctagtgggaacctcctgtttttcttttgcggggcgggaggaggtgtagtgactgaccatcctgtcctgccactcaggtctagtactgcaaagactaggtctatacgctctttcctagcaggtggaggagagtcacctccctccggtgttcggtcccgtttttttcgtttgggagtttgctcctcctcctgctcgtcgggaggaggggtttcggctttggggtttgaaccttttttagttttgcccccagcttcgattaatgttttaacggcgcaacatttctcggtggaatgtcctcttttttgtggaacttgtaatattttccgaggtcaatttctggactctcgtcctcggttgcctcttctattgcgaatagggtatgctgcccttgcgtttggttttcctttttgaagggttttttagttgcaaggggagcgctttgtgttttagattctttgaatcttaaggctagcacagagacctcctcttcgactttggcgaattgaaaagctttgtgaagggcatcgtctaaagagacaggttgcctactagtgagttcctcacagaatctagaggaaaaccacaagccgttgcgaagggctgctatggctacctcgtcgtttaggtttgcaaactttgatttgattgttttgaatttttcgacgtaagatcgcagggattcgttctgaagttgagtaagacttcagaggtcggcttcagacgtcctgtgttcgataagtaccgaatactgttttaagaaagcggcggcgagctggtcgaaggtatcaataaagttcccttctaggctagcaaaccattcgagggcgtgacctacgaggttttctgcgaagaaacggcaatgacctgcttcgttttcttagtctgtcaggtacggaagaatctcaggtgagtctttgggtcgctcgttccgtcgtattccgggaaacagaggctctcgacgtctcggatgcgaaaacgagcgatcctatccgtgaatggggtgcacctgttttcttcgatctcgcaatctatgtcgggagcatcgctcactcctaggtgcattcgtatatgcggaatgtttcaatatccacgacgttacgcggatcgactggtgctcggggatcggttagaccgttaaggaggttgcttcctggtatccagggaatgaatggcggattagtgatagaggtccgttgttgcgttgagttcccgggaacgcccatcggtagcaaaggtgggagcggtggccttggaaaggcagtcgttgtgcttgtctcgtttcctgttgctgggttttcgacgagagtgttcgcaggtgcctgtaaaaaggcgacctgccagttgataggaggtgagacgtctatcgaggcgaagtctagacgagtcctcggagtaggatatgtcggggagacggtacctgtcagatctgtggggatctgggcaggaatcccagttttgcaggggaggggggggcggaatttccttacccgcggtatcgcgcggggatcctctagagtcgacctcca

SEQ ID NO: 37870 - DNA, 2200 bp, Arabidopsis thaliana landsberg
  unsure (1)..(2200): unsure at all n locations
atccacagcctttgtcattttcttgtctactccgccttaagctgttggatttacatacactctcataccataagtgtcgggccagaacttagggcccctttgtggaaaaaggccatccgtgtaattcttcctccacattgctgtcctaaaccagcaacatacaaagttctctggttcaagcttcttgtggatgatgaccctatatgcatgctcacatgggatgccacaaatttgccactttatgcaggtacaagtgtaagcctgcaagtctacacggtgaagatctccaccatgcctcacttcatacatcccattggtacttggagacaccttcgcagcagcagcgactttgtgctcaccagctaagaactttgtaacataaggtgtacaaacacctacaaagtaagagaaatatatgctttaaagggagtcaaggctatatcacatgttaagaatctgcaaagaacaaggcttaatagagtagctaacctgtgtgagtatgggattcaacagatcttttggcaatcctcaccatagccattcttctgattgtctctaacatcgcaacaaatggcttctctcttgccttgttcaaagatccgttgaaagactccactgagttgttgtcaacgtcttcacagaagctgcctatcttctggaatgccctaacccaactccttggttttgtcttcatcacagactcatagactttagtgtcatagcaccgtatcttctccaaatgctgcttatactctttctcattgtaagaccaagccaaattccatagcagtggttttatcattgttttactgccataaatcttcttcgagttcccataaatgtgttgtacacacatccggtgctctatcttgggtaactcaagttgaaccgctgctattaaacctgaaacaataagacaaacatttttttttgggaatatctggaagttcaggtctaaaggccctacatctccgagaggcgagacccacaccaggttaaattcatctcctttggagaagagatccctccctacgtgcctcaaacccagcacctccacctggaagatttaccactaggccaacaacacgttggtaataagacaaacattagctaacactaaacagacacaaatgacactaagctaccttttgcctatctaatatcatgatgaagccttcaccatcacttaatctgaagtcttctttcagcagcttcataaaccacacccagttatctgtgttctctactttaacaaccccccaagctataggatatatgcgattgtttgcatccctaccttaggctacaagtaactgtcccttaaccttattctttagaaaacaaccatcaatgcctattagaggcctacaagactccttccatgtccttctaagactgtcaaagcatacatagaacctattgaacatgtctttaccatcatcactcgtgagacattcaacttcaacccgtgaatccttgtttgcttcaagtatctcagtcgcataatcccttaatcttgcaaactgatcatcgtactccttctcaatccattgcaaagccttctttctagcagactgacattgattcctagtgacacttatcttccattgttccctaatgatttcttcatcatcactctccgggtacatatcgtggcgaattggtggttcgtcagtccactcttttagcagttcttccatgtgaaactcatctctttcttcagcttcggaatcgacatcaccaacaagatcannnnnnnnnnnnnnnnnnnnnnnnnatcaaagcttttggggtttgggaaaaatcgatttgggtttctagggttcgtcgtgagaaatttgggaatttttcgatttggtttcgatttgttttttggtcttaaacgggttgtaattcgggtttaggttggttctaattagatttatttggttaaatcatcggtttggtatacagttaaccaattaaacccagagctatggggttttaaatctcgaacttacgattcatggacattaggctctcgaactttcaattagtggggaaattagcgtttaacttccgtttcatgggtatatagatagaggtcaaagatcggggtttatttagccagatatgatagttatcgtaaaaaaataaaccgtttttctgccaaaaagatataccgttatcggtctggtaacgttaaataacgtcgtgtggt

SEQ ID NO: 37871 - DNA, 5323 bp, Arabidopsis thaliana landsberg
  unsure (1)..(5323): unsure at all n locations
tggtcactaccgggaaatctatggctttttgaattgcagcatttagggactccgagatattgcttctcatcacaatgtatcgcatacccgggaagtacgccagtgtcctgtgagatagctttatctctactaaatacttggcacattgaatgtttctcttatgtatttcttcaaaccaatatcgtaaatctcccacagtataagatctcgctgacatggagaccatttttacaagtccctcacactggaaattatggacaacgttcctgaacaaatgtactgtgcaacacgcatgcttcgcaagagagtgaactgtcctaagcccaacataaatggccgcatgcctgtcagagacgaaaactagatcttcctcatcagggataaactgtgacaactattcgaaaaaccactgccaacctgctatgttttcattgtctataataccaaacgctaatgggaatatttggtaattttcatcttgtccacttgcagcaactaagcagcttttgtatttccctttggtctgtgcaccatctatcacaataactttccgcaaatactggtacccaacaatcgaagcccaaacgcaaaaaaaaaagatacttgaaacgaatattcccttcctccgtataatccgtatggactgtggacaacgtacctagattagttgtcctcaacaggtggagacatgtctgcgaaaaacttataaccttcttcctcactacgacgagcttttttcattgctatttcttttgcgtaccaagccttcatgtatggtagttcagccaatactatttctggtagttcacaggcccttggtcccttcttaccatgcgtatattttgtcttaagcaactcacctaacatcgatcgtgttgctttcatcccatacttagaccgcgcctcgacatcacaagtatgctttagagtcgccgtccgaatttccaccttttcagaattctcgtgaaacgttgcatataccctccaatcacactttttatcatcgcacaccgcaatgactcgtgtcttgtcggacgcttttatacggaaattgaatagccttttcatagagtacatagttaatgttttatgcaactcgactttgttgttgaatacccacccgatatatattgcatcgccacccttcctaagattcatattagctttgtcggaagcaaccccggctgcgttgtccttgaacggaacggcatctctacacatcaacatctcgtcccctgctaattcagtaaatatagtctctccgtctgttaatcttctcgacatgtcctctgccagtgcccttgctgtattatcatttcccccactgttgtattaccaacctctacatcactttgtccttcctcttcagatgcacttgctgccaacgatgtcactacaacgtccactggtcttacatattctccagattcagggtccaaatcacacgtatccaacgtctctgtcattgaatctgtcctcatatttgggactgccctctgccccaattatatagacattgtcgtattttcttcatcattatcctcaattccattctcactatcaccttgtgcatcaacgtctgggattgttgtaacctcaacgtccactatacctaccccttgcaggctttgtccatgcacgttgtccaaacatcttggacagtccttgtctaacgattcttccaatgttgtcgcttgcgtatccggtaattcagctctcattatactttgccccagctgaatcgacatttctgcactctcatcgcccattccatctcaacaacttctacttcgacaaggtcaacccggctttgtcccccgacagagctgaatatatcgtctcccatattattgggcctagatgactcatcccccaaagttgttccacacatttgtgtccccggctgacggtcaaaacttgtcaatgtgttgttcctccaatccttccaaggatcccaatccggcgggtaatctgtatcaatcatatccctcatattatcaaaatcataatcatctgaatctgatacctcccttaacaattcgtcctctaagtctgatgcccatcatcttctctctgttgccaattctacatccacttctttttctcatccccgctttgcgcagcccaactctagtaaaccagccttcctcttcaaagttccttcacacacatttattttatctaagaagccgtcttcctcataagtcaatggaattgcatgcgtgctattaccatcacccattcgcccgcccatgtatcatgccacttctacctctacaacactattgtctttgtgtccccttatttcaggggacgtaatctcagccacgtcgacatcgtctatagatagatacatgttcaaacctcctttttcttgctttatctttttgaatttcttcaacgagctttcactgtcaacagagacaggcgacatcttctgctgcgtgtaaacagtgtctcctccttagaaccaaaaactcagctgaaatttggtcctcctgtctagtccaaacgttgttccaactttcgatacaacttcagtcaacatatctccctcgcttacgtcaacacactttgcgtacttatttcccgacatcttgaaacgccactccccattgtctttgcattcccagccaccgaccaataccataactctttcttccatccttttatgtctttcaaacacaacataaataattacatttatcacaaccaaacaaacaaataaaactaccaacctaaaacgaatcgaaggaaagaaatcccagacaataaattttacctcgtccgcaataaatggccatgttttcaacaacacctcctaaaatccctagtttttagtctgttcaacacaacatctttcctctccaacattaataacaattaaagtgactaacccctatattactatttttaaaaagtaaatccacataatattcaatcggtaacggaaacatttattacggaacagtagctgtctcttttcgccggacgaagctgtcgctatcttcgtcagagcgctaacccaccttaagggtaatttcgttcacgaaatttcacgtgtggtaaaatatggcagattttgtaaagcctataaaaatatggcatgaattgtaaattcttgagtgaaatatggcagattttgcaagattccctaaatatttggtaaagataaactgtagtcgctcataattaattatcggctaagcttcatcggccttttgctttttcttccacccaaataaaacttcaggtaccgaagctaaattaaaattcattagggttcttctttccttacatcgctgtaattttcgtttccttcttcttctttagttttaatttcagggtagatatggagattgagagtcacgtttcagtccctgggaagaatctagttaaagtagagttcaagcttgggacagagagctacacaattgattcaatcaagggtgatactgtattggaccaattggtttcgatgaaagaagaaagtatgaagatacttaaggattttatcacaaagcataatgttccagatgatgatgtccctgaccaaatcttgtctgatgatgaagaaggtgatgatgatgatgcttctcctgtaatatgtcctgtgaaaccacccaagaagacaaagatttgagtttttccttttgcttatcacttgctgtcttgtcttttttccattgatgttgcttagattttgaacctttgttcaaattttctgtttgtggaacagttctgtttatctaaagaagaatatgaggacttgggttaagttatgttcaaatgtttgcatctgctaggtggaaattagtaatggtgatgttgaattattactaaaggttggtgattgatttgctttgaatgctcattgagttattgaaggaagctcttggaacttcagggaaactgtgatgacactagagaacagaacaaaggtattttgggcattagatgcaggactgatttggttacattacgtattactggttagtgttaatgttcatgannnnnnnnnnnnnnnnnnnnnnnnnntgtttgacgcttagtaagtctaacatgttagagtttaagaaagagtagggttggtaagaaaacgtctcatgttcttatgttttgtcgctgagatgtaagagattctgtgacgtgatgaatcttatcagtggaggacaaagaaggatttgggtatcagcacagaccagtcactggcagagatagcagaaaatggtttagtcgacatgatcataaaggattttaaagttgtcacgagaaatcgattcatcacattatgttgataattcaacagttactatcaatattagttatatatcctctcaaagcatgtgtggtatcatagttctacgaaacaaatagtacatcactagttgaaatgaaaatctcacaggtaaacaaaatgttggatgagagatctttagcagaatcactctaaattcttcattcacaatgtaaacgctacaccattgtctaacaactcaacaaagtatagcaaatctctgaacatgccaagaaacatctggcaggtacgcagttaaccaagtagaatgtgattcttaaccgtcatcactgtagcttctcgagttctgacatcctttcgatgattgcctgcgaattaaaacaagtccccaacatttaaaagtttagcacttgagcaagagcatgtgtgatacatttaagtgaaagagagaagcttgaaacaaaaatttcacacccttttgcttgtttcttggagctccccagcaagaatgaactcatcgagtatcaagtacacctttcagtttaagtcatagggaactagttagcaattattagagtacaaacacagatcaaatctagacacactgtagcatctgcatatataaacacaaatagggaatgcttttcaaggctgcatacagatatttatctaatgggtcacgatggtcagcttagaattgggacaagtatactgagaagaaaacgaaactagcttttgattttcgcaaacaaaagcttagtttgatatacccttgtaagcttaatatatgagaattctcagaaaaccattttaaaacatctgggagaattcacttaactagttcaaaacttgtaagcattcaatactcaaaagacaaagcaaaatcccagtgtttattcaaaaccagttgttgtacagcatcacaacttaaagttatgaatccaacgaagcagttccagaagctatttacaaaggataagagtaagataaaaaggttaagtaccttgtggaaattaaacaccaaatctagctcacaaacattgctaagaaatggtccagtatctc

SEQ ID NO: 37872 - DNA, 2653 bp, Arabidopsis thaliana landsberg
cggagatccacgggtgatgcttaatcagatgaatctccagcggtcgcgagcttctccatctcaagacgctctaaagctttctgatgagcccaagtctcgattgaaagatcaggtttggcattgagtccaacgccgaggataacaattgtaaggaagctggtgatgtaacaaggaagctcccaatcttcccattttcgcgactgtcctggtgccggaggagtacggttcataaagtaacccttaggtcgctcctcgtgacctggcgtcgcccaccgactcggaccggcggatgtagatccagacctagagaagatccgatttcgtagcgtcttcgctgcgacggtcaaggactgcgtcgacggcatcgcgttggttcagatatttccgctgtaagcaaaaaggaaatgctcagatttgtcaagtgtccaactatatacgaccacgacctacaaaaggtttcattcgaaccgaaccgagaatttcaattttggtttattgaaattgtcagtttaattgggaattatataatggtttcagcttagattatccggtctaacagatttatatacgaaattgactctcttttatgttcggtatgacttggtattctcagttctcattttgttttacggtttgactggaaattttgtagtccaaatcggttctggcagtttggttataatttaggtagaccaaattgaattggtcacactagtcggttaagcagtattggatgatagtattcgtgtacgacgtcgtaattgctcagtaacatatcaaatcttcatatacttctctcaagggaaacgcaatttagacattctgaattctacattgaggaatctagtaaatatagaaaggccatgaacaaagacctgaaacaatcataaccattttctacctctaattcaacaatcgaaactttagtagatatatataactcttatatatacacataagcataacaaactgtttccaacttagagctccattttcacctgatttgggtgtaaagtagctgaacccattgagaaatgggctggaggaggatcctcttctcttccccataccggctggttcaagccgtcaaaaggccattgttgcagctgatgataagactctgcattgaagctaccatccataagagagccgttctgcagaaaagataattggacctcatcattattaacacaatttgtaaaacatatcagcttctcttagagatgattgatccaacatcctagattctcaatctagtcaacaagccagctctattttactgtaactcatcctagaagaacaaggtttttaatgagtggggtctggttcttaaatggtgtacaagctgtaaaagaagaaggtcatttaataagaaagttatttgcagagaaacaaaagttgattattagattagataggtgaaacttgaagcaacaataacttaagactgagacccacagaaaaataattgtgcaaggataaaaaaaaaagacagcatcatagaccatagaacaaaggtggtccgtgtttctgaccacttttatctctctgtatgatataattgagagaactaatgagtcctttcaaaagattttttagagtccttgatctcactgtttgtactgcatttttgtaaggtctaagtatttatttcccccacgttgttcttcttctttaagcctagtctagaatagggtcgattaatgttggatcaataaatatccaaaagtttctctttttgtgatacaacttaaaaaggttactcaaagaaacataatccctatggttacttaaacgagtaacatggtcaaagggaagtttttcccagtgaacattgaatttaagagtttttattgtaaaagaagatcacatgcaaccttaattctcctatatgattagttgatacttacctctgaagccagtatgctgtctagattgaagtcgattctggggtttactgcagcaagtctcatagatagcatctgggaaacacaagtcacagtttcatgagattgcggcacataattctattcattttcaaattgttttgagttgacccttttattgtgcccagggctattgtaaaatataggtataaagaacaaaaattggaccacggaaagtcctacctccacttgacgctgtaaagtttgcacatggttaatgatttcatccagaaccaatgcagtgccctgaatctgcaggccaaagctttctgataagctcggattcatattaggtagatctgctttcacataccaaaaattctttctagacagctaactattgttaagatgatccaatatttcaacgagaaaataccaagattccaaaatacacagtgaaaaaagcagcaagagaatgacgtgctaatctaaagctattataataaatggtatctactacaatcacaagtaatcagtataccctaggggggctaaaggaacaatcaatcaagtcctcacagctcacctatagaatccaaattttaaacaaacactgatgttccatatcatcatctctatcacaccaataattgctgctaacttctaacatcagggatgattaattagctgtctgggggagtgtcacatcatgtttccaactaattagggtatgggggactcaaagcatatcaatttttgtgaaggat

SEQ ID NO: 37873 - DNA, 3668 bp, Arabidopsis thaliana landsberg
  unsure (1)..(3668): unsure at all n locations
ggaactccgaaaaagagaaaaacgacaaagagacgtaagatgaagaattgaatttataatgtctatgtctctcggatcgttctctattctggtgatattaatgagactctgggttttgagattgtcaaatattagcgctaacccaaactggagaagtttgtctaggacgcaaattaactgctcaaaccgagtagtctgggtcgagcatgaaaacactactttatatcctttatcgtgagtttttttagaggttctttgtgtcttgaagacaatatagtacgaaaaatgcagactatacaaacacaacgatctttataagtcctctgtttatgagctttcgaatcttcatcattcttggtgaggttattgccaggtttggtttatagagctttacctcaattcttgaggtagtgttctctattttgtgaggttttcaccaacaaaaaaaaaatatcactctatgtatttacttaaagttaaaacatattaattctaaaggaatgataggcaaagatgccaagattcctaaagttttttatttcaatattcaaaatttacccgaaactcaaaattttatccgagaatctgattatttatcaaaaaatcnnnnnnnnnnnnnnnnnnnnntggtatcgattccaaaaaaggcctgaaaatctatattcgaacccgattggacccgaatcgaaaccaaaccgatattttagaattactctattgggtcttaaacttctctatccaaaaaaacccgtacccgatcggattttatcagaatccgacccgcttacccgaatgtctacccttaagaaaaagttaaatgattattcagatttattgtttgtccaaatatgactcatattggcctttttcatttctccatattttaattttgtttggggtctctcttttactttgtggtcaacattaaacataaactgattttctactgataaagataaactattttcctcctataaatataagtgtatgtataatcacagtgcatgacttttagtgtgaaacaataaaaggattgaacacatacatgcttgacattttgcgtcaaagatagtaacaagtcaaaattggattcaaaaagtttcatctttgtttcttgcattagcgtctgtgattcaccaggataaagaagaagaaacaacaaaaagagagaagaaaaaaagagtcacatgtctcaacagtttttccatgaagacaaatacttccttccattcacatgatcatgtccaatcatgtcatatatacatctctctactctctctatacatgtagaaatgcatgtatacaccaacaaaacaaattgtgcttggtaaaaaaagtacaactgacactttgtaatcaatagaatcttctaatcaatttgttttcctcatttttcgtagattattgacaacaacaaaaaaaagagaatctaaggttataaagcctgcattatgaaaaccataatggctatcaaaaatatatgtacatgggaaaaaaagcttgggggttccacctcctttttttggcatggggtaatctaatcttttgtattctactttcttctactcctttcatcatattccaccaaaatatataaaagggaaaagaaaactaatggtctgacggcattttaaagaaagcattttaatcataagttaaaacttaaaatagaaaattggagaattttcattgccttttcttgtaagttcactaacaacaatttagttcggatcaatgtagaatatttttagtctaagtagaattataaagtcttttcatagcatgaaaatgcaccatgtgatgcatcatagcataaatatgtattatatgcaaattaacgtaaacaaataaaaaacatacgtgtttgtgatttcgtgatcttgcagcaattatcgatgacatttgctcactcctgtttttggacttacgctcaagtgggcagaagctacaacataaaaattgtacatttaaaatataaatgaaaaagacaagttttgggtggcttactaatggacctttgtccagatcatccactatatcatacacctcttctttttcattttcttcctcatcttcttttataattcaatgtattgtctcaagactctaaccattgcatatggtgaatcactaagaaaccaatcaccgacagaaatcaatcacacttatcatagcaaatgtattgtctagatttatgggtcattagtaaaatcaagatccgattattagtataacgagataaaaaaatgttgaatattgatcgaaattgcataagaaacattttaatgagatgatcttggttcatgaggttaatgtctttttgtaatatggagacttacctttacacgattgcaattatctatcttctttggcattggattcccaaaattatctattttgaccgttggctatttttcacctaattccggttttacccctctccgtgatccgtgcgttagccatgggctctctctctctctcacgggcgtgacatacgcgtacggtgagcgatgccacttctcacacgtgtggcctttggttacaacacgtgtgaatctctctactcgtaagctttttctggctagtggcagtgtgactcggacggagctgacgctacttaccagagttaaacagaaatctaaacggcagattctctcatagtggcagtgactatgaaaattttctttttttcttttttcacgacactaaagttaataatgtcttattatgagatattatagacattttttaaaaaatcatagacatttcttcatttatcaatcttgtaaatttccatctctatttattagatttccttcgtacacaaagctgaaaccattcatgattcataataaatttcataatttattgatatgtatgtgtttttgacgtaacttttgtactataaaatttcgcatttatggtaattatgggcatgcaagttaaaaataattgatggacgttcctttgaccagtcgtccacataaaaacattttaacgaatttacaaaacaaataatcctttggcagtacaatttttgttctcattatattaaaaaccgtgtgtgtttctttattattgatctacttttttttcttacttttcacatagttttacggttaattacctttcaccgttgacgaaaaattggtaaaataataatataaggatcgtgtaaaacagattaatgtatagaaaaacaaattgttgcagagcaacatgcgaccaggattagagagcataaaagaatctttgtcttagtgataagtgatgataacattgaaatttgaattgatcttatttaagaattatataaccgnnnnnnnnnnnnnnnnnnnnntctgatccttctgtccatttcacattgtccctctttaaaatgaattaaattattttcttcaactttccgccagattcctttattttcttaccatttttacaaatattattgtttttattaatttccaatcaatattttgggtcctatgtaaccaatattatagcaaaatttggttccagtcattttcattatctaatgtatatattaaattgtatttacatattcatgtacattaaagttttcgaaaaaggttttgcaataaaaagatttggtaattggaaaaggtgcaatattcgccataaaagggcttattttatgaaggccagcg

SEQ ID NO: 37874 - DNA, 1642 bp, Arabidopsis thaliana landsberg
aataacaggattaaaaagtctcctctcatccacacgacgagcatcctcataacgaaccacaggttgctctggcacagctacagcaatagcattcacatcttcattatcatcatcaacccattcctcttcttgaaacggagcaccatactgttcaccattcttaggaccagccccacttttcttgaacaacttataaagagcatagtactcctgagggttcttacatctccctagttcatcttcatccatcgtatactcatgcatcacccaatcagtccgctcaccactaggagcccggcctctatagaaaacaagagtctttttaagtcccaccgatctagaattatactcaatgactcgatccttccctgtagccttccaatacccattttcagttcctctattagacctagctgcgtttggatacttcctactccttggagtgaaatagaaccactgtctatctcccgtcttcaacattgattgacctgtatcaatcgaaatacacaaaatgaaatcagttccagtataatgataacgaatttgatgtagtcaacaacaaccaaaactatatgatcaagaaacaatacaaatctaaacaaagcttaagctaatttgtaaacgagagacgaaatttaccaggcaattcctcaggatccattttgtaaacatcaacaacaccgataacattaactctaagcctcttcctacaaatcttcctcttcaaataatacatcacaagctcttcatcagttggatgaaatcgaaaccctggagcactaaatttgcctcctttgaaacacgaatcgggtgaagaatccgccatctcgatcggggtcaacgagaagtaaaccctttgaaacagaaacacacaacctaaaaccctctttctctcttcgcctcttagtggagacaacaagatcaaacttacataacagtggaagaaattctagggttttttgatcggcggtagatagattttgcatagagtcaaaagaatgattttgtttgtgattatattatgtgtcagcttttttctgactaacgaagtttccgagaatctactgggcttttggaattacacgcccaaggggcctacacttttatttatttgattctttaggatattttaccaaactgataaattttagtattcgttaatttgtcgttgttacaaaggaactaaatgttgaatccaccactcactactatttttcaaacttacaataaaataatcgtatacaatcaaatcaaataaattttgtacaataaaaacttgtacaatataaatttgtagcatcaattcacttcaataaattttatgtgactgattacatttagtaagataacataatttaatattacattattcataataacttaataatatttgatatattagttagtatttgataaaggtattgaaagtatataaatagtgcttagaagttatgaaagtcttaatattattgtagaaagtaacatatttttcattataaatttttttttttttttttacaattgttaatatattttccaaccaaaaaaaaaaaaaacaaaatcccataatagagtgcaattcttgcatatcaaatgaagagagtgaataatccaaagacgggaagagtaagctttaagacga

SEQ ID NO: 37875 - DNA, 2728 bp, Arabidopsis thaliana landsberg
taattgataaatcacttcatctttgtttgtacatgcggttgtatcaaacttgttcattgcatctatggctatacatgaggttatatcagacttgttcaatgcttcttgatcatctctcttgagtctaataacgagtaagaacaccaatataacttcaatctctccctttattactgagttatagagctcaagaatactttaaccttgaatttgatgatcttcaagctttcatgatataacataatctttggcagcttcattgttttatgaggattgtgtcattttctacttgtctcacatgtctctagttgctatgttacgtcttgttgtcagtcttataattctgtcaacacaatgtatcttcaatctctctcttatttgagtgagttgtgagagtgacaaacgttgacgatctgcaacctctatatatcatgttatggtttcttgtggcacatttgtctcaaacaatttcaattttggtcaacacatagtatttaacttttttttttctcaaggtacatagtatttaactaaataagaaaatattactaataaatatcatttattattgacaatattctctattaacattcgtcttgtcctttatcaaaaaacatttatgtcttctcttaataatagaaagatgaaattgatttagttaattatatcgatcagttctattgaaacctatagacatgttgcatagctcctccaaacaaaaattatttgttttacaatgattttcttagttagattccaatgatccaaaatatataaaaatatgattattgaaaattatgcggatgactgaacaaacactgttgttacttctgttactgtcctgtactaaacttccattacaaacaaaagtaatggcacatggtttatggattatatagccagggactacgggacggttatcattcatcagcctcgtgacaagctttattggctgaacattatatatagtttatatgctcattctacataatagttagactttagatgaaaatggaccacttaaaccttaatgctaatagttacaaatttacaactaaactagtggaatatgaaacatcaatgcgttgcttttggatcacgtggtgggacattgatttattggatcgcttctaattgacaattaaccaataatctcaaactttttacagagtccttggcgtgtcaaatgtaattaaaatcaaagtataaatccatttggatgtaatatataaaaagctcttttcgaaatgcatatgagagtgtgatagtatacctatactacaagcatacttctttacgttaagataaacctaatacggtaagagattccttttatacacatcgtatatataactagagaatcggccgctaaatattaaatatgataaggaaggtgtaatagctcctttcttatacccacaaatatgaacacactaagccatttcaacttaaacctagcaagagaagatagcatatagttatgcatatacacactactaagtcataaaacttgttccctcagctgattctcgctcacgaacgttccatggaaaccataaggtaccctctccggcaagtgcaccaccgcgacttgcttcatatccgtcgcgtcgaccaccacaaactccgactcgtctttctctttttctctcacaaaccccattacataacctttgtcttcttctccttctccctccggtacaaagcacggttctccaccgaaccggctcggtccgtaattaaactctgaaacggtgccgttttgtatatctaccttcgcaatgccactgcatttgggccaaggatcggctattgctatgtaaacgaactggcttttccggcccacgtaactacggtttatgtgacccgcttctaaattcactccggttacgataaccttacggttcgattcttttgtacgcatgtttaaccggatctcacttaattcaacccgggttggttctcctgattcactaaagatcgtgtcgggtgggctcatacatgacccgattacgacgataactgggtctccctcttcggttctctcttcccacgcattccatagatggaaacagaaacaatccggtacatcaacccaatttatatccgacccggtcagatcctgctttgacaaaactccaaatctcgccattttttctttaacgtagataacgggtgacccgccccgaatcatttcggataatttgaataccatttgctgatccggtataacgacaaaattctcggttatcgcgaaatcatgaatcatcgttggttcagggagcgtgatctccacgtcacgtgtctttttcccgcacgtgttgaatttaagatacctgagatgaggtttattcaaaacgttgtagctcagtgtatggagatctcctgtggtcgcgtccaccttaggatgcgctatcactgaagagtcaatctggtcatcgaatctgaaccgtccgatcgtctcaagatctccttgaccgtcgatcttcacttggtaaggaagatcatcttctgacatggctaataacctgccgttaaagaaaaccacaccggcgttagctacgcccatgccacgtgtcccgtccactagaccgatcccagctcgagccgtgaagagagcgagtcgagctagaccggaatggccgtgaagctcgccgattggtttagggaaaaccgatcgtccaagcgcggtttcttgaacaagccggtttgttttagtgtaccggca

SEQ ID NO: 37876 - DNA, 2371 bp, Arabidopsis thaliana landsberg
gctcaagctgaaatcccaccagttgctcaagccccagctactggggaacaggcagccaatcctctagcacagccccaacaagcagcagctccagcagctgcaactggtggtccaaacgcaaatccattaaacctgttcccccaggtagggtttttaaactggtgaaccgatttcatttgctcgttttcccttgtgaatttgttttattgacatccactcttatctgtctctatccagggcatgcccgctgcagatgctggtgctggagctggtaatcttgatttcctgcgtaacagtcaacaggtattttcaatttcttttccattcgagaacggaaatcttcatttctctcctcttatgtcatttgcaattcttttgccttttcatagttccaagccttgcgagctatggtacaagcaaacccacaaattctacaggtaaaatttttaacctcttattctttatttggtaggttatatgatattgatttcccacttatactgtttctgttacagcctatgcttcaagagctcggaaagcagaacccccaacttctgaggctaattcaagagaaccaagccgaatttcttcagttactaaacgagccctacgaaggatctgacgggttagtactatatactggagatcgttttcttgtttgggccactggttgaatcgctaaattagtgattgatcagagcaatcacgtctatatgaatatatgtgatcccatgactcaatgcctcttattaattgcttaaaacattcagggatgtggatatcttcgatcaacctgatcaagaaatgccccactcagtcaacgttacccctgaagagcaagaatcaattgaacgggtacctacacttacattcctcaccaccattatctcaacatgtaatgccatttctcatcccttctaacacttgcgttaaacctttctgatcagcttgaggcaatggggtttgatagagcaatagtcatagaagccttcctttcctgtgaccgtaacgaggaattggctgcaaactatctactagagcactcagcagattttgaagactgagttccgagccttttaacctgaacaaagcacaagattttgttttgtttctccaccccttttatctgaactgttactttgctcagagaatcaaatgattatatcttacgggtccatatttaccttgaagaataatctgcgttttccacactgtaaacacaattcattgtgtttctctctactgaaatgattattaacaatatgatatggttttaaataaattgtggtcatactcgcatgttgagtgattgtgattattccagctcacaggtatccttattaaatcgatattgtctggctatatcatagtgtttatacacaaagcacaagaaacaataagcaatgttacacagtatctctcactaaaacatattttgtgagaaacaaaagattttcatcatgctctctgccatgcatatccttcttcatcacaccttccattgttctgactccaggttgcatttcactcattagcagcagcagccgcagcctgttttaacaataatccatccctattaatcaacatcctctgcctactacttccagagacccttaggtgtgttaatctgcaaacttatttgctacaaacgcaagatggattatcacttacctggttaagaggattatctggtgatttcttccacatcttccatatcaagtccttgtactgtgtgtgagttagacctggtttctcagccttgagccttggaagttccacttcttcatatgcctaaatcacaatcatagaaacaactcagtatatagatccaccagaatttggctttgcgtatcatgatcaatctatcaaacaattatcatttcaacaacagaactctcctaatatataacttcaaaaattcatacaagaacaatccggattgtctgctaatatgatccactacaaggagcaacaactaatttcttctataacgacggaatctgaacatcaaacacaataactatgaatcaagaagcattatagcaaaaggcacacgaggtataccttaaaagaagccttgagcctcttctccgggtgtcgatcaacgggcaggttatctgacgacagcaatcctatcgagagcctggtcaacggtatgtgccttgacgagagaataatctcaataggtattggtatccagaaccatgcgctcatactcattttaccctgccatgccagtcagtttcttctttaagtcttcagagtcctttgccatagccgccccagcttactttggacttcggaggagcacagcctgtgcgaccttaagaaccttcccagggacccgattatgcatcttgggaggtttttt

SEQ ID NO: 37877 - DNA, 4075 bp, Arabidopsis thaliana landsberg
  unsure (1)..(4075): unsure at all n locations
ccttgtatgcagatgaacttgaatttcaagaaaaagagattgaacattgctcacttcaagatatgttggatatggagctaaaggaattggataagagacttgaagaaaaggaggtactattctcaagtttagagtgctcttctttatagtctttcatctatttccttaagatagtatgtctataacttcaatttttcatgaaggctgaaatgaagcgcttttcaagtggtggtacatctgttctcaaacaacactatgagaaaaaagtttatgacctagaacaggaaaaaagagcactacaggtcagtattctgttgtttatactgtatttgagtggaactatgggcctatatttgactaaatcaaattgcatgcagagagaaatcgaaggtttgagacataatcttgctagcataccatctggtccaggagatggtgcccagaaactgaaggaagaatatgttcagaaactgaacacgcttgaaacacaggtaactcccgttttatttcttagttatactcgtctttcacatatcattttcctaatttattgtattttgtttctttttaggtttctgttctgaagaagaaacaagatgcacaggctcagcttatgagacaaaagcagaaaagtgacgatgccgcaataaaattgcaggatgaaatacacagaattaagtctcagaaggtgtttaattttttttgcagtaatctctattagagactctctacatataacctatgctaatctgattttatctacttttcaggtgcaattacagcaaaagattaagcaggagtcagagcagtttagggcttggaaggcttcaagagagaaggaagttatgcaggtatatttgacttttcagtttgtagccaattaagattcttcttaagcttacttgaatttattgattgattattatgctatctcttgctccacttctgaactacttagacaagtgtcattttctgtcattagtcacctgtagtatataaccagtatttgtatatacatttgacttgaaggtctcaaacttcaaactaattcttaagacatttggatttagttttcagaaatctatctcgtattgaaccattcattacatcgtattttaaatttgaccagctcaaaaaagagggaaggagaaatgagtatgagatgcacaaactcatggctctgaatcaaaaacagaagctggtgagcacatttttataaactttcagcccattggtaacgatcatttctattatcatggcttctcaaagtttgttttattaggttttgcaaagaaagacagaagaggcatctcaggtgacaaaaagactcaaagagcttttagataatcgaaaggcttcttcacgcgagacattgagtgaggatatttcgtataacattatttagtatgaccacctttgtttatatgtctactaactgtgtatcctattatatatgcaggtggtgttaatggccctggaactcaggtaacacccaccaaactctatgaaaccaatgttttgttttccaagttattgactaggtttagtgagtttggtgattcttctggttagtttgtaaatgcaactttttaataatttcaaatgtactccatttgcaggcattgatgcaagcaattgagcatgagattgaagtcactgttcgggttcacgaagtgcgttctgaatatgagaggcaaacggaagagtatgtctttcatcagtatttgtttcataacttattaaggcctgacaagaagtaattcttaaaaaaatgatttcttactaacctgtctcagatgacactgactataattcacgagggcaagaatggctaaggaagttgcaaggctaagagaagaaaacgagcttctcaagaatgccaagataaggtgcgtaatcaggactgacaaagattttgcataaaccaagaccattcataatgaaatatatcgtaaacaattagtgtcttctctgacaaaagcagcgttcatggtgacaccatgtctcctggtgcaagaaactcaaggatttttgctctggagaatatgcttgcgacctcttccagcactcttgtctccatggcatcacagttatctgaagcagaagaacgtgagcgtgtgtttggtggaagagggaggtggaaccaagttagaacattaggtgacgccaagagtatcatgaactatctattcaacttggcgtcaactgcgaggtaaaatctcaattagtgactggagatttttggtaatatgttgcttcttgaaggatcatcttcaaaatatgatgcaaaactcatcctacattcttctttctgtccattgtttaaatttgaaggtgtctagcccgagataaagaggcagactgcagagaaaaagatgtcctaataagagacctcaaagaaaaaatagtaaagtttagcagttatgtaagatacatggagatccagaaagcagacctcgtgcatcaagtgaaagcacaggttagtagaaaacatcttctactctttttgtataagacagtaaatgtctgaaatttagcatataaaaccattggcattccatattacagacctctgcaatgaagaaattgtcagcagatgagaacctaaagaacgagcatagtatgaaaaagcaggaaacccgaaactcgactatagttcttgaggacatggatacctctgattctgaagcgtcagaccnnnnnnnnnnnnnnnnnnnnnnnnatgatgaatggaaacctgaacatgaatcagagcgtgagtccgagcaggaatcggttataaagctaaataggaaacgaaacttcaaagtgggaagacggcgctcgagtgtggtcatgaggcgttcatatgaagagaatnnnnnnnnnnnnnnnnnnnnnnnagtgaaatctgacgtgtgttgttgcacttgcagcaagagctcctcttgcaagacaatgaagtgtcagtgtcgagctacaaagggatcttgtggtccgtcatgtggatgttcttccgtgaaatgctccaacagaaacgcagacggaaaggagaacaattccatctcggaatcagaggccttggaaaacggggagaactcgcaagaatctgatgaaaaggacaaaggccaacaacaacaagttcttgcttcacgtggagctatgctgctacagaacgctcttgctgacaagccagaggaggagacaaacgatgatggaggaacacgaagaagaagaaaacctctatcagacataggaaacacaacggtaaaaaactctctaaagtttccactgttttggtcatttcaacatatctgtgttcatgtagctaggaaacaacagctttctgatttaatgaaattttggtttcagggtaaatcgaatgtgccaaggccaagccaaagaaagaaatggaagaagactgtgcttcagcttgttcctgtaggtccaccagcactaccacccacacacacaaacacacacctgattccagaagctaattcagtgactgtggactcggacacagcgagaatgccagaaaacagtgactcaggagagtctaatagcatcaaactgaagctaccgagggcaatgaggtcagcgtcttcaaatggcagcaacttgctgagagaaagaaacgctgatcaaaacggaagtgaatcgggaggcaatagtggttttgtgcagagcaattcgggtagggcaagtggaagtagaacttcagatgaaaaggagaaccacactcgtcgggtctaaagaggagacgtcgcttgaggtgcaagaaagatgggtttgaaatcttttcaagggtttgtctttttgtttatggtgtgattttagaacataacaaacgtaaatttagggttgtgaattcaggttcctgttgtgaattttctcagacagatacagttgttaaagtttgaagtttgattaagatttgactgatttaagtatggtatttcttgtggtaaagtgaaaagggtgtctttaagattattgttgatagtgtcggcaaaataaagttatactctgtatacgtaatcatcagccaggatacacgtaatcacaggaatttaataatttggaatggtagtct

SEQ ID NO: 37878 - DNA, 1698 bp, Arabidopsis thaliana landsberg
cacattagcaccatcaagaactaaaaccggtacccctgtttctgttgtcgaatattttcatggcagttcacaggctctacaagagtgggtggtaagtaaagtctgtctttttttttttactcaacatatttaaatttttcttttgtctctatatgtgttgtgtacttattgattgataggacatatttggcgtgatcttgcttgagcttttagttggttcacaagatagatcaacagctttgaagaatcaaagctcagattggactgggtctttcttgcccgataattataagattggggaaataatcgacccccgaataggaagcgattatcctgtggatgcggccacaaagattgtcacactcatccaaagatgcaccaatcgggacaagaagaaacgaccattgatgcaagaagttttgaatgctctgaattatattgcagggattaggtcctaatgtgagatgtccttatattggacacagggacatggataaatgctaggtgtttatttgtaataattgaaagagtcagtctagactaaagctgaaagagttaggggttaacaattgaagctatttaaaatcaagaagcatgctttaaacttttatagcagattttctgaagtcgagtgtcgcccaaaaagaaaaactcaaatataatttgtcactgtaaaatatgacaaagagagtacaaaactggagactgagattctgtaaaagtttactcttaaatgttttgctgggatataaaataagctattggcgaccttcagagcacaaacattgcaacaaggatgtgctttgaacccaagacctcaaccatctaatctctttacactttcttagatttctaatgaactcaccaccagtttaatatcagcttttgggcagagttttgctgctgcagaaggccaactctgaaaccagtgcaatgtgatcgcttccccatttctgtaacaaaccagaaatacaaacataaaaaagttttgtaaacaattcagttaaaaaggtaggctatataagaatatcatgggattttacaggagtcgggaagcctggagtccactgcattgcttgctttggtattggagcaagcacacgcactgtttgaagaccttccgaccgcctaacccaaaccagaaatcaaacatgagaatatgtcaaaacgcgcataatttacaataatgaagtaatctaattttaaggtttgtcacaaatggttttgcttctaatgctaataccatatgtagtcaactgtccccatgaaacatctgtgataactggtcactacaggttctccgttttcatcccttgtgtttgcttgaccctaaccacaaatttcaacagcttcctaaggatataatttctcaagaaacagaagataaaagggaaaaactgtagggaggatatattacaatacctccacttctgagtatgtgcttttaagctccagagcatgttcaaccgtagttctctctgggtcaccagttgcagttgctatctccattggagtccaagaggatggactataagtgattttgtcactatttaaagcttcagaactccatttaagtggaacttcactcacaagttcccctttttgactcaagttttcattgttatcgtgtagcttagccaaaaaggtttccccatcttcacctaaactttcttcatcttgcgcgaatactactggttc

SEQ ID NO: 37879 - DNA, 1380 bp, Arabidopsis thaliana landsberg
  unsure (1)..(1380): unsure at all n locations
acactagccatcatctttgccgctgtcttcatgattatccctgccatccttggtgaaaaagtttaggcgactgcggcagcatgcatggccttttcagtagtcaagacaaatatgatgctggctacgtaccacaaagtaagcgtctgcactggcgctgacgtacgctccaccgtcttattagtttgctgcctaacagcactgttaccacagtggtatatatatatcacagggaaagcgagaccatgtcggctgggctcacatgcatgtcggtgcgccagcaggctcgctaccgatccggcatcgttcggtctataaagagagtatgaagccacatgtcggcgtgtcagcttgcagccttttggccagtcccagttattaactagtacgaccgcgggaccgggttttttttgttttgtttttggtcatgttgtgcaggtgcctgaaatggatgcgttcgttcgaatctggccactgtgggggaacatgacatgatgctgctgcgataatggatggtttctctcgtattgttttgttcgtcacctgaatcacatggcagagccggatcacagcgacgcagtaatcaactgcaaataagaggaacgctagaagaaaagtgatcgtcataactcttggaaacagcctgtttgtggctcgttctgatgctaaaggtcctccgggatactacatatataagctcatgctacacgaagcttatattacaacggtctgtggccctttgcgtacgttattattccatcgttggactctcccaccagcttcggccttgttcggttattccctatacacatggattggatgggattggaaaaaattcttaagaagtttgacttgtttgggattgaaacccgtccaatcccacccaatccacatggattgagagcaaaacgaacagacccttaaggagaatggtttaccatcatatgagcttctnnnnnnnnnnnnnnnnnaaaatatgcacaactcgactgagaaaacccttgaagttacctggtcacggcgaggtggactaactgccgatgatggtcaccacctagggactggtacaccaagctctgggcagatggaccaagatattgggaggggattaactccgaggaaacataggctacaagagccaaggagatcactcgagctctaggactgcacggcctactggaccatgacttaagtaggagatgggaagactagggcagatcgagttggtggctgggaagaggagcttagacttacaaacacgaaccgctaagacaccaagtgaagcaactaaaacttgagaacagcagggattacagcagcagtatttaagcaaagggatggggagacagatgttccagagctcggccaggacatgatggagga

SEQ ID NO: 37880 - DNA, 1995 bp, Arabidopsis thaliana landsberg
gatggggagaccagtttgggaagagatgatcaagacaggaatctgtcccgacgataactcctacacggttttgatcagagggcttataggtgaaggcaagtcgagagaggcatgcagatacttagaggagatgcttgacaaaggaatgaaaacccctttgattgattataacaagtttgcagctgatttccacagaggggggcaaccggagatatttgaggaattggcacagagagctaagttctcaggtaagtttgctgcagcagagatctttgcgagatgggctcaatgctgatcggatgcatacagagattatggaagatgacacttgcggcggcagactggatcatgtactactcactcgagaagctatctgcgatggtatggttttcgagccacacctattacttgaatgaagaatgtgacttctctagtacagcttggactgaactgagcacattgcactctgtcacatagcttctatgtgattggctcctataacaagaaagtattaatgatcgattgtgcactctaatgaaaaaaaattaatcatgtctttcactgagaaagtgaagaaatgcaagtaggccgagagaatagcttaaaacagagcttaaatcgtctgcaaatcatttgaatacaaaacaaagttttaacaaaaggaagatgaaaagttgatgtaaatcatttgaatacaaaacaaagtttaacaaaaggaagatgaaacgtaaatgttttctataaaataaagtttaacaaaaggaagaaagaaacataaaaaaccaaaccagtgtaatgtggacactaaagatgaaagacaaaaaaggtaagaaacttcaacatttctatcatcaaacttgacattaagctttaaaatccccagaaacccaaaatgtgataacatttctatcctagatttctagttttagagaaagatcaagaacataaaacaaaagaataactctcttttattatttaggaaactctgtcaaaacctaaatctcttgatctctcttaaagtcatatataaattaaacttatgtatattggagcttaatatataaattattttgttttatgatttaagaaataagaaagaagctaacaatatatgaacaattgaattaatattgaaaactaagagaaatttggttttgggttattacaaaaaaacaattacagtattagccaagaaaagagagagtttgctcttatagggtctaaaagaaggcccatttacaaatgggcttattagtttaaaggactggtgcttctcttcgtcaatggaggttggtataataatagggtttctgtaggtacgaaagaaaaccctatttgcgcggcatctctctcgtcttcctttactccgtcaaaaccatgtttctaagtcagtgccggagctgtaaacctttgctcgagtctcgtatacctttgctccgcctctctctctctaaatgtctcgatcagtccttcaaaaccacggctagtagcgaatacggtagtaagatcaacaaagtcacaaagcatgtcaatgaggaggatggtgcaactttctatgttactcgaaggggggcaatcgatagttctgcccctgctgaatcaaaagcatatccaaaagcagctaatatctgttcaatccatagtatgaggtaactaactcaaattacttgtagataacttactaatttttgaaatgtttattgattaaaatcaactatagggaatctcttctggaggaaacagaggaagactactacagacgcttggcactttttgccctgaggaatcatggtggagaggatgccataaatgttattatagaatctctaggtgttgagagttctatgattcgcattgaggtcaatcaaatttttatgtatatattgatgactttgagtttgtctccttgctctctaactcaaaatgcattttgtaaatgataattcttaggctgcatttgtgttgggacaattggaatccaaagcggcttggctt

SEQ ID NO: 37881 - DNA, 1591 bp, Arabidopsis thaliana landsberg
tgtttttgactaatataagagttcgagatggagtagcagtgtttagatagtttttatacccatattctcccaagtgaggcaaaaacaaacaaaaaattgcttagaatcaataaacagctttgttagtgtttctatggtcaagatgtgtcacaatccaatgcatttaactaatcataagagttagagatggagtttcagtgtttagacaacatttctacccattttctcccaaaagcggcttaaaccaacaaaaaattgcgtagaagtagtaaatagctttgttagcgtttctattgttaaaatgtgtaacaatccaatgcatttgactaaatataagagttaaagatggataaagaatgtttagacaacacttataaccatttgtcccaaaagaagataacacaaacaaaaaattgcttagaagcaataaatcgctttggtactgtttctatggtaaaaatgtgtcacaatccatttcatttgactaatcgtaagagttagagatggagtaggagtatttagacaacatttatacccattttctcccaaaagaggctaaaaccaacaaaacatttattagaagcagtcaatagctttgttggtatttctagggtgaatatgtgtgagaatctaatgcaattgactaataagaagagttaaagatggattaggagtgtttagactacgtttatacccattttgtgtcaaaagaggctaaaacgaacaaaaaattatatagatgcagtcaataggtttgttagtgtttccgtggtcaaaatgtgttagaatccaaagcatttgactaattaaaagatttaaagatggattaggagtgcttagacaacactttaaccctttttgtcctaaaagaggctaaaaccaacaaaaaattgcttagaagcagtcaatagctttgttagtgtttttatggtaaaaatgtgtcacaatccaatgcatttgagcaattataagagttagagatggagtaagagtgtttagacaacctttctacccattttctccctaaagaagctaaaaccaacaaaaaattgcttagaaatagtaaacaacttgttagagtttctatggtcaaaatatgtcataatccaatgcatttgactaattataagagttagagattgatttgaagtgtttagacaaccccttatacccattttgtcccaaaagaggctaaaaccaccaaacaattgtttagaagaagaaaatagctttgttagtatttctattgtcaaaatgtgtcataatctaatgcatttgactaatcataagagttagagatggattaggactgtttagacaacacttatacccattttgtcccaaaagaggctaaaaccaacaaaacattgcttagaagcagtaaatagctttgttagttttgtatggtcaaaatgtgttagaatccaatgcatttgactaattagaagagttaaagatggattagcagtatgtaaacaacacttctacctattttcttccaaaagaagctaataccaacaaaaaatttggttagaagaagtaaatagctttgttattgtgtttgtagtcaaaatttgtcacaatccgttag

SEQ ID NO: 37882 - DNA, 3262 bp, Arabidopsis thaliana landsberg
ttgatttatttttgttttttttggttggccttttccgttaataagtgcaaagggcaaaaatatagaatgtatagtaagattacgtgcgaatagaccaaaacccaagactaaatcaaagtataatgaagataaacatgaaatcgaatactaggatttagtcattgacatgtgggaaggacttgttttccttatgcgacgcgtcgagcaccgtcgctaacttcgctggacaacggtgcaaatccgactagctaccactagttgaccagagaactgtgaaaaaaaattctccttccgactaccgatttcgatttagataaaccgcatcaaaatttccactaatcaccggagaaggtccaccatgaactacatccaaattgatatagactaatcgttgctcctatttcatatgagcaacatgatttaatgaagatattattctccgaaacaacttgactgaaatagagaggattgtgaaaaagacggaaacattgacaacgataaacaccgacagatggagatcatagcttgcctaaagcaaaagaaaaaaaaaaacccgaaaaaccagacaagccggtagaaaaagtccatcataaaaccataatttgtttaggtcgcacaaagcaaaatatacatagatcatggaaaggccagaaacaaaacctaaacaaatttccgatcttagtcagaattaaacgatggaaaagactctctatctaaaagatctgagagagttaagaggaaaacaaactattttaattttttttatcagttctaatgatccatttaactcaacggtaaaattactagcttacacacaaaaaaattctaacatttattcaaaaatcatttgaaaagaaaaatattgataaagacaaatcaaagtttcaactcttcaaaactattccaacttcataaagtaaaacatctttgcttattcgagcaagcaacattaaaaaagttatatgagcgtcattagatatttagattaggtacaattcttttaataataaattgttttttaaattctttttttttgggtttcatatacttgttacaagctctgacactctcattctatttataacaaacgttttttaagaaaatgaatctcacttgatgtatcacaaacaagacatacttaactaattaatcccatatagctaaaaaaccttttgaaagttaaatgtatgaatttcatacagtaaattcatgaaaatttatggatcttaagtctattcagcaacataacataatcaaatcagccaaactgaacaaaaaattataactaaattccgttaaattcaaccatattcaccccgaattcaactattactatttagacccttaatctggtgtataatttttctcatgttaaaaagaacataaataaagatggtgacattgacactggaggggtgtgtaagcctttaaggggttgttggaagtgctgctaatgatgagagtgtgataacgtagggtccaattctatttgctacgtagctcattccatttacaattacactacaatctttatcaaatcaaaaacatttccagttaagaaaaaacctagcattttttcatcatttaacatataaaacaaaaatataacattaaaaaaatacataatatgtacgtatatatataaatatatgttctcgtgtttaggaaaaaagattgtcagctacctaaaatatagtagaatatatagtcttacatgtcaagtaaactataataaaacttctataatttaatattcgataaattaataacttttataaattaataaattcttacggtctcaacttggaaccaatgtaaaaaataacataaatcaataaattaataagataataacttttttgaaagttctatgtaaatatatggtctcatcaatatcataaattaataattgcataaatatatcaattatatatatatatatatatatatatattatatgtacaaaatttctttgaaatatatttataatattttttgcttaaagttgtatttattcttattttatatgtagttctaatatgttactgtatcaaaaacattttgtgttggtttctacatatgacattaatttttacttgtaactgattctagaaagatattttctataatgaataaattgtacattttcttaaaaaagttattaaaataggaaattctctttataaatcaataaatattaatttatcgataaattaatacttttataagttagtagaaatttatggtcccaatattattaatttatagaggttttactgtatatggaataagaagcaaatctgcaaaagttgaaaatttataaattaatatcaatatttatgctattacttcttcattttttaaagtcttgttatttacttaagtaagcctaaatttttaataatgatcttatcttatgtaattgattaaaaaatcgtatagtagactattcaacaaaacgtgaatcatagtgttgttaccaaaacccattagtgtagcgacaactgtcctttcacatccttatacaaattctcttccctccggtcatctcggaaacttgtatcatcgacaaaacataaatactaatggagcaccaccaccagcatcaccgtcaccaccaacgcgacgacggagaagacgatcgtcaatcctttggagtaccaccgccacacgtcgatgctccgccacaacctcatggtctttaccagtcacagcctcattttgatccttacgcgcctactcctcaagctccggcgccttaccgatcagaaactcaattcgaaccccacgcgcctccgccttaccgatcagagccttactttgaaactccggcaccaccgccttcatttggtcatgtgagtcatgttggtcaccaatcacccaacgaatcttacccaccggaacaccaccgttacggaggttatcaacagccgtctaattctttactggaaagtcatggagatcacagtggagtcacgcacgtggctcaccatagctcaaatcagccccaatcgtcttctggtgtctaccacaagcctgatgagaatcgtctacctgataatcttgctggactcgccggaagagcaacggtgaaggtgtattccaaggcggagcctaactataatttgacgatcagagatggtaaggttattctcgccccagcggatccatctgatgaagcacaggtattgatcatctcttaccaagatccaaacttttgatggattgatccaatgaaccattggcttgttgatgtgtttga

SEQ ID NO: 37883 - DNA, 2614 bp, Arabidopsis thaliana landsberg
  unsure (1)..(2614): unsure at all n locations
ctagagcatgcattgcatcaccaccctcttttcatagacccgtatcctctatacgatcacgattgcggtaacttagcgtgttcagtttgtttccggaagtcgagtggtctcatgtacagatgcagagaagaagaatgcgtaggttacgagcagtttcagctagatctcaactgcgttttagttcctgagtatttcacccataaaagtcatgcagaacatcatgtattcatctccccatcctatagcgaagaaaacgaagctctctgccagggttgcaagaagagagtttataattatcatctacactgtagtttgtgcgaattcgttttatgttacgaatgcgccacaattcctaatgagatacactacaaattcgatgagcattctctcactctttcttatggagaaagtggcgtggatgacaagtactggtgcgaagtatgcgagaaaggattagatccaacggaatggttctacataaacaaagaaagttgccccacaatccaccataaaagtttatttggagattttggttatatgaagcctggtcacatattcgattactgcggtaataaggtggaagttgttggcaatggtagtagctctcgtcccatatgtcttacatgtcaataccattgcccacatcacgtatgcttcaaagtgtgtatgattgatgggactgaaatttatttttgcgctttttcttgtataagattatgaactttgtgtgtgtaaaatattggtctgttttctctaatgtggggtcatacgagagatgttgaatttgaagctgggacgtttttttctttctgtcaacgatctgtttgtttttcatttgtgtatacagatcacacatattgaagactatagttcttttgaattcgatattttttcttatttctctaattttggatgggacagttcttatgtcacacgacttgattatatatacatatctcaatcaatagagggttgacaaatgaattcaaatcttagtacaacaacaaatctgctatggctaatgtttcacatcctaaaagccaagactcagatagaagactatagaagaaccaataattttacaaatatcaagagaccaaacgctacctggcggatgttagaaataactggtacagctcttttgatctgaatcttcttttacccaatttgttttgtttctccagaagaagcacgagaaaactcatttgccatcgattggtagagcatttgatggtgtgaagttacttagctgaattttcactgggtctagcgacatgtttcctatacatgagtcttctcaggttttgtagtgttctctgagtgaccaggccctttgcttgtgtcagctgattcctcagtggtttcaacaatctccatactcgctgttctactctttctgttcctccgctcctgcggggaaaaaaaaaattagtttgcatatccatatgtacaacacacaacaattcctgtagaattggaccatcacttgttatagtatgataaagtgttcaatatatccagagaattcgtccaaatttggtgaattaagtatatatttacctcacgaaaagggtgttcatcggattcaagcatccgcacaacctggctcattttaggccgtttctgtgcttcaggatccacacatctcagggcaacaagaagtgcacgtttcagagcacgtgtagcgggtggaggctcaatccttgagtcaacaacttcttcagctcttcttgttccaaccatcatctttagccattcgaccagattcacctgccaacaagaacacatgttttaacaccaagttaacattttcataactcctggatacattgacaaagcagacatattttaggctacctcattagctggacgttcatagtcaactggatctcttccagttatagtctctagcagcaggacaccaaagctatagatgtcactcttctcattcaatagacctgtattagcatattcgggtgcgacatatctgatgcatatacacatgaccgttaataatatgtatacaaaaacccatcatcaccaaagagggtacaaattttagacttacccaaaggttnnnnnnnnnnnnnnnnnnnnnngactctcacccgagtctaagagcttggctaacccaaaatcagaaagctttgcattgaagtcatcgtcaatcaggatattgcttgcttttatgtctctgtggactacttttggttctattgcttcatgcaaataagcaagcctgtaaaattgtagtacagagcatgtcaatatccccttaaagagttgtttttgaaatttcaagtaaaaggtccaacaacagtcacattttaaacaacttacgcctgcgcagaaccaacaaggattttcatgcgagcctcccaagtgagagtgctttgtttccccatggctccatgtagccattgttctaagttaccactattcacatactcataaacaagcatcctgcattacatcaaaacagaaattgatacatgggacaagtttctattccgtagtacaattaggagattactcatgagactaattagtagtacattcagactgataagagacaagtcagactcacctatttacaccctctatgcaatatcct

SEQ ID NO: 37884 - DNA, 6362 bp, Arabidopsis thaliana landsberg
  unsure (1)..(6362): unsure at all n locations
taaaaggaaacgaaggaaatatttaatgagatcgataagtgagaatgtatgaaaataaaaaggataaaatgaaataatccagtatgtggaagaacgcaaaaagcggtgatgcattcaatatttggcgtaggtgggatctccacttctcctttatttccaaatttattattagtacgtagtgactatttcagaatcttgtaatgttatcatatcaataaaatcaatatatatgtccacaacaacaacaaaatttcatgacatccatttcatcacaaacggntttcttgtttttgcttttgtttcatatatattgattttattgttatttctatgtattctacattgattacggtaaatgaattgtgaactacaaattataaatgtataattaatagaatacattatctcacactataaaaaataaaataaaattatcattggtttaaaactttagagaagtgttttaaagtggaagatggtgagtgtaaaatgaaaataaaaacgactaaaaagacatgtatgaaatgtagtttaatatgtaagaattctttttaaaactaatcttcaagaaatatagatcttgtgtaaaatatataaagagatatgcatgggagtttgtgttagccagctaccacggccgtaccttgcacgtcccggcggtcccttatgttattgcttctaaattcatccatcttttttttttcatcaactaaacaaaaactcatcctatatataatggagagcactacatttattgcagaaaggagtacagcaaaatttaaggaatgaagtgagattataattctcatccttgacctcacatgtgattcttaaaagaaactgtaaaaagtaaaaacagtagtatgaaaataaagctaagaatatcgatcggtggtataacattcctacatttctgttttagtttctcatttttctctacatctcatttaaacatcttacattcctttcaatcaaagtataaacatacatatatagattatatatatatttttaaatcttatttgacaacaactctaattttagtcaaagagtataaactttctgttagagaaaaaaaaatggttctcataaggtgtgtaacaaaacatatcgtacgttacatttttgatgaattctttaactctgatgaaaatatgcgttttcaagaagaaagcggctatgtttacggagtgaaaaatgtagatcatgaagatgaagtaccacaaaacatatacatttttcacatgaaaaactcataatgagaaaataaaaataaagaaaatatgaagagtaagcgaaaactacaactacaattgttcccaaaatgacgcacgaccacatctgttggaaaaaacacacatcaatcatggatctatcgccttctctctgtctctctgtggatgatcattgtcgtttgttttatgtcaaatatctgagagaataatctgcatgcatggttaggtctttcccaagtgatggctggagtgccctgcctacccgttttgggttctggccagagaatccaaccaccgccggagtggtcagcagtcgtgttttctcagccagacttccggaggtttgccgacaggttcacgataagcagccgttcggaatgttcaaaggcgaaaatggcatgaactacacattttcaacctttttgatcgaagcaatactcatcattttcttcatcaaaattgtttacgtcctccttcgacctcttcgccaacctcgtatagtctgcgagatcattgttcgtattcgatcttatattttcttttacatagttaataaatttccattgatggagctaattatattatttaagacaaaatgcatggttttgtgttttgaagggtgggatgatgataggaccgtccatgttaggaagaaaccgaaacttcaattactatctgtttccaccgattgcgaattacatatgcgcaaacataggactgatgggattcttttacttcttcttcctcacggctgccaaaacagacgttgcagaaatctttaaagcaccaagaaagcataagtacattgctgcaattagcgttttggtgccgattgcttgcgtggggagcacgggagctgccctaaaacacaaaatggatataagattgcagaaaccttcgtccattggaggggtcacgttcgccttgggtttcacttcttttccggtcatttacactgttttgagagacatgaaccttctcaactctgagataggaaagttcgccatgtcagtgactctccttggagacatggttggggtctacgtgcttgttttgtttgaagccatggcgcaggctgacggaggaggaggagcatactctgtcatatggtttctcatatcggcggctatcatggccgcttgtttgcttttggttgtgaaacgatcctttgaatggattgtcgccaaaacgcctgagggaggactcgtgaaccaaaactacatcgtcaatattctcatgggtgtccttgtctcttgtttcctcactgacatgttcggtatggctatagctgttggacccatttggctggggttggtggtccctcatgccccaccgttagttcgacgttggctattaggagcgagacctctgttaatgaattcttgatgcctttctcttttgctttggtgggacaaaaaaccaatgtcaacttaattagcaaagagacgtggcccaaacagatctctcctcttatctacatgagcatcgttggcttcgtcaccaagtttgtctcttccactggcgctgctctcttctttaaagtccccactagggacagtctcacgcttggcctgatgatgaacttgagaggccagatcgatatcttactctacttgcattggatcgacaaacaaatggtaggcttacccggttattctgtcatggttttgtatgcgatcgtggtcacgggtgtaacagcgccgctaatcagcttcctctacgatcccactcggccttatagaagcagcaagcgccgcacaatccaacacactcctcagaacaccgagacgggactagttcttgcagtaaccgaccatgataccttctcaggcttgatcacgtttctagacttcgcttatcccactaaaactagtcctttctctgtattcgcaattcagctagtggaactggaagggcgtgcccaacccttgtttattgcacacgacaagcaaagggaggaagaatacgaggaagaggaagagcctgcagagcgtatggggagcaggcgagtagaccaagtgcagagcgcatttaaactgtaccaagagaaaagaagtgagtgtgtgacgatgcatgcctacactgcacatgcttcaaagcataacatgtatcaaaatatttgcgagctggctttgaccaagaaaaccgctttcattctcttaccttatcagaaagagcgtcttcaagacgcagctcttaccgagctacgtgactccggcatgctatctgtgaacgcagacgtcttggcacacacaccatgttctgtctgtatctattacgagaagggacgacttaagaacgctatggttaggtcatccatggacccacaacacacaacaaattctagccatatgaggcaagaaatgtaccgtttcgtggttctgtttttaggaggagctgataacagagaagctctgcatctggctgataggatgacggagaatccgttcataaacttgacagtgattaggttcttggcgcacaaccacgaaggagaggacgagagggagaagaagctggacgatggggtggtgacgtggttctgggtcaagaacgaaagcaacgctagggttagctacaaggaggttgttgtgaagaacggtgctgagacgttggctgcgattcaagcaatgaatgtcaatgactatgatttgtggataaccgggaggagagaagggatcaatccaaagattctggaaggactttctacgtggagcgaagaccaccagcttggagtcattggagacaccgtggctgggagcgttttcgcctcggagggttcggtgttggtggtgcagcaacaagtgagaaaccagatgggtggtgatggtttcttgaacggcaagtttgattacaagaaattagtgtctccttggtctcactctcataattgatttaattagtacaatttcttgattgattaggtttcttaattttattatatccgagttgtagaatctgtattattggggattgttttgctttttatttgtatcccaatagatagatgagttaataaaattccagtatagaagcagctaaattagctagcaaatcacgattcatttttttcttttcaaaatgtattgaaacatcaatcaatctctgtccctgtcatgaatgtattcccaaaatgaaatagccaagaaaagcagggatctttctctaaagtgttattcaagatcaaacatgggacatctgttgcttgagcgtttccagtagctttctcttagattcacagatctggagaaactcacggaggactctctgttgcgccatgactgttttacgtgcggtatctgccgtgttccatgatttcagtgcttgaaagatgcgatttccaacctccgattcttcgctggatgcgatgaaactctctagtaccccaagaatctgacctggtcctgctgcatttccatctctcttcagagttgtcagaaatccctccacttgaccatcttctggattgttcagttgattcagtagccagttagaaacatcttgtattgtgctgcatagtgactgtatagaatctttgattgcttgtgatatgggggacgaagataattgatctgaatgttgatttttcttcttctttttcccagatgggagagacgagcgggtgcaggcctgaatgataagactgtgccacgccaacggttcggtgatgatctgaaccaagacctggacatcagagtagcaagaactcatgtctgaagatcccattgatctgactctatccagaataagcctctcaaacagggagttcaacacatgccagtgctcctgggaacttaggctccacgcattccaaaacaccgcaaaatttaaccagtccaccaaatttgaaccgaggctctacagagatgtttcgacaaggttactaacagtaagaccagttaatatgagtgcaggtagaaggagaaaggagtagaaaagctaacctcggaagtccttgcaccctgtgagatctctgtgatcatttctacagcgtcacttagagaacatcccaacatttttgtgtagtcctccagcaaacacttaagttcttcacagacgtcgatgtcacctccagacccattggtttcaacactttcctttaatgccgttggcgtgcactgaatagagagatatatcatccgagcgtagaagggattttctctggatggcatcgtttcatattttcttcacgttcttctttctatagacagccaacaattacatgtattaggttgcatccgtccccaagaaaagatgtatggatatagacaaacgtaccacattctctttgggaggacagtaagaaatttcttcaaacggacctacagacgttttttgatattaagaataacaccacaatcataaacaacaacaaattgtgaaggaaatactgacctagtagatagtttttctcaggacaaggtgtccaccacggacgtgtttgcatatcttcattgaacttaagtgtcctggatccaatttcatttgagagctccacaagttgaactccagatttcagattttcaagaatgcgctagacaacaaaatcccaggcaaccttagatatatgagaggatcaagtagatggagatatgttattatacatgataagaacttggatgaattacctcttcttcctcaaagctgtctgcgttctgcttcaattgcaagacagacgcttcaacccttgcagcttggtactggtttgagtgctgcaatcgttgtttgaataggacaaattcgatcacctgagattaggaaatcaagataagtcatgacagtaaccgattggttgcccacagggatatggtaatgacaactccgggagatatcaaattgtttacttttgagtaatttctatggcggtaagcaagaaatgtgaggtctgcagactctctcaaatgatcatccataaacttgagatagtcttttaggagattacttaagtccacccacattggagattccaacatttgacgtagaatatggtgtgaaactgtttccgtcaagatgttcttcacatcaagagctttatacctaacaatagataaacaggtggttcagtaaaccagctgaatgagggttttctgtttccaggcaaaaacaagtaaaggcgagagctatgaa

SEQ ID NO: 37885 - DNA, 1386 bp, Arabidopsis thaliana landsberg
aacaaaattagaatgcaagtattattcgggacttgataaatttattatcgggttaccaaatgtaagggaaaaaaaaatagaagagtaacataagctttgtctttgtttgtctcccaaaaaattacagttacgtctgtttttttataaggttaccaatgtctcttttagaatcataaattttttaatgcaagaataacacaactaaagcacttttagattatgtatatacgtctccagaatataatttacctggcaaaattgagagaagagagatctgtgacttggcgagttaaaggaagtgatgccaataagacgacgaccactaccaagtctttcttcttgaaccactttatcaaaagcaatttcaaggttcttcttatcctccacgatgcctaggtagtaaccaccgaccattttcatgtctcttccgaccacaacttctatctccaagtaatctcgcaagaatacatcaatcataacttgtggtaaatcactcacagcaactctcttgcctcctcttttcaaaacctggaacatctcgagcccaacatcttctagaaaatacttaggcaaaactgatttccccactcggaagcttgcctttttactccaaagaagctcagcatcaccatcgtcttcaagcccatttcgtagctcatcaagcttataaatggatagagacagtaaaaggaaaagtgaccttatcacccctctgtctttgtatgccacaaccataagtataggcaataaagagtttgatatgagtatagctccttcttcgttgaatatcaaagtgtgattcgataggtcttgatattggtggaggccgtgagaaggtcatttttggtatttttgtttagggctacgatgacaccaacgacggagaatgaaaaaccggtacaagaagaagacaagagcttgaagagtcgagatcttattaccggacatggttttgacctctcgttttctaataactatattatatggtgtcgctggaatctagactctgcatgtcgagagaaacggaaggggctctgacagttatataatgagaccatgacgtaaatacccttcgaacgtgtttgatatttacgaggaatgccattgatgatggttccacttcttcccgtacagcttgcatgattgtaattaatgatctgaatgtttaaatctgaaaagtacacgtacgcgtcgatatttagttcggcttgatctattccaaatattgcgtctctagcaaagataaaatgtgagaagacttaaggaataattcaatttaaagtcggcttcttcttttttggtacgggttaatgtgaattagatatcgaaaccaaatatctaaataagagtttgtaagttaacttaaatctgtttttacaagggata

SEQ ID NO: 37886 - DNA, 7172 bp, Arabidopsis thaliana landsberg
  unsure (1)..(7172): unsure at all n locations
gtcacaactttattcttaacaagtcttcgaatttcctcaaaagcctcattagacatcccactctgggcatacacactcataatcgaattatacgaaacacgatccttatccacaatctgatcaaagatttttctcgccacagcaacaccttcttctccacccttagcataagcatccaaaagagtattaccaacactcactcctctatcaaaacctctcttaatcacaaagctatgaatagattccgttaaacccttagcaggaacacgagaacaagcagagattaccgaaaccaaacccatagaatcaagaaacattgcatcgtcatcatcattttcatcgaccaatagatccttgaaaagagaaacagcatcaagggcattaccgttaagatcataccctcgaatcatcgaagtccaagatacaatatttctcttgggaatttcgtcgaacactttccgtgcatcctccagtttcccacaagttgaatacataacgatcaaagccgaagacacaaagatgtcggattgataaccgaagacaaaagcttgctgatggnnnnnnnnnnnnnnnnnnnnnnnnnnnnnngacgaacatgctttaatggcgcaaggaaagctagagcgagttgggtatagagaaagcttccgcattgaggaaaaagcgagaagagcttcagcagaatcaccgctacgagcgaggtcggcgatgacagagttccatgagaaaacatctgttttgtcgacatatctgttgaacagcgttgttaggttttgtctctctgtgtgtctctccgtgtggagaagacgagagacggaacaaaacagtgcttttttactccgaaccttcattcattcattcttttgtctcaaactaatatttcgactaatttgattataagtacttataatcaaacataggaaaagaaatttgcaaacaaaaaaatctctaatttcacactcaaatagtatcagacaagaacaaatatcaaatcaaaatcaatgaatccattttgtttatcttttttcctcatttcacaaacaaaacattacaaagaggccgtggcatttcattatctgcagaacctttgttcttgagcttctgcagattcatggtgtaaacatatatgaatcctcgtttttccaaataatttatcggtaaataaagttacaacaatctaagatgagcagtatcattcattcgtttgatctgccacccgtttctccatgaatgttgtaacacagtcactgaagagtcttctacacagatcttatgagtcattaccggactgcaaccgaggattccggttaaaagacactttataggcaaagaatgcgtgaaaacccctacacaattcgagattaaggaagacgaatcacttaggtcagtgtgattatgattaacttcttcccttggggagtttccatcgtcaggttcgtgattagtcatcacttgaagcctgcttttaccagatttcttccttgtaagactgggacgatgcttgtgtagtaagtcccagttagtcgaagcaagtgacacaccaccatcacgctcatgagtttcattgtgattcgtagaggaagaataatctgacctaagcttctctgcaactcctgagactgtcccgtttagaaactgaaccattcgaaactctacttgcctcagtgattctccagatggagctgtgaaatcaggttggcacctttcaatcaaactcaaagtttcaggactataaatctctgcttgattacagccttcccaatcccctaaactcatctcaataacagcatccgaagattgtacatgctcctccggaaaactcatttcctttaaaaacaacatgtgtccaattcaataaccactttcaatctcatttctttcactaaatgatacattgatgtatgatcctaagatatatactctttagattgtgcctaagctatagttatagaagactaagaaactccttaatcaaccatgaacaagataagctcacacaaagagcagtaacaacagtacttagtggtttcaatggattcattagatcaatcaactcttacttaattcattcccaagatattaccacagatcaatctcacacaaattaggcaacattgtacacttcgttaaaccttagatctaagagaagaaactttacctgacaaacagaaacagccatggatctagctcgatctagaggtgacgaataaaccgaattaaaccgaacaccttgagatttgaagaaaacagcaagagccctagcttgacgtttaccattagcagtaagagcagctacatgacatctcccaccaatcaaatcaggtttaagattaagatcagactcaccatggctaatcagataaacctctgtcacagctcgatcttcatcaccagacacgattcgagagaagatagacggcggttgcggcggcggagagaggacgttgtaaggatcccagactttaatcgatggtccaagccttggagtaccgagagatgatagttgtggtgagagtggtgaagctgaagcgtgacatggtaacatctcaggctcttgttctagaactttctttactaggagattgtctaattgtcttgtgtttgatctgccattatcttcttcttcttcttcttcattgtcagtttcctcttcttcttcttcttcgtcttccatttgcgtagattgtgaagaacccatcttctttgtgaaaagtgtgctacgagaaatggacgaagaagaagcaaagagctttttgtttcgatcacatcacatggctcgatggctccaccattctacttctacagatctagagacgagagcaaaaactttgacctctgtgtgagctagaaggtttaaatattgggcccggcccgttataggataaaacgtctggccttgtatacgctggaattttattcaccaacgccgctatatccaccaatgtagctaaacaaaaatacaaaaataattgcataaacttattaaattaaattgtaaaataaaaactattaataaaaatatatacatatatatatatatatatattatcaaaattatttagaaaaatagatttggattaaataactttagatatcttccattaattttcatactggatcagattgcacctagaggacggttcatatttcctgaaagcttgtgcaattgtgaaacactagataccttggaagtcaagttttcggttcgtatggttgtcccttcttcaatttgtctgaaatctcttagaactctgcaccttcactctgtgaacctcataaacaatacatcagttaaaaaccttttatctggttgtcctactcttaaaaacttggatgtgcatggaactcatactccaatgtgaatcctttaactattgcagttccttccttacaaagactatcgatttgtaatagaaatgataaagaacatgtgggctttgtgataaatgctccttctttaaaatacttgaagtatatggattggtggtcgtggatcttgtcttattgagaatgcacctatgctgttggaggcaaatattgtcaacaatgataaaagtttcatcttgggatcactgacttcagtcaaacgtctctccttggagatatcagccttgaaggtaaggttttcttgtaattagttagtttccttattattgcattgttactctactaataatattgccttcatgtatagattccatttcctatattttatcagttggtatatttggagctgtgtatatatagagctgattgttggaatctactaatgctcatgctcgatcattctcctaatttacaagtcctcaagctcatcggtgtaagcattgaaaattcatcttttagcaaatttccacctcaacttagggtttgatgatctaatatacatgtaatttactttgtgttaactcgccattggtctcataaccacagccatggcagaaaagtttagatggcgtacccttgtggaaatggattcagccaaagaatattcctaaatgtatgttactccatctggagacatttgtatgggaagactacgaatggcgagaagatgaaaaagaggtgacgaaatatatccttagtaacgcaagtcgtttggataaagcaactttcctcacaaaacgccttacctcgaaagagagagttgagatggtcgaggagttggaaactgtgatcaaagcttcaagttcatgccagcttgtattcaaatgaaagtcatatgttatcaaagttaactcttactatagaaacttttatatttagttggttgctttgaaaatttattaaatgttttaagatccaactttgatataaaatcttgaatacagtacaaagttatttatagacgatacaaaatgattgatcatgaatccgaaggaaaaggaaaaccagctattttgaaagcagtcatgccaccatccacgaccaagttatggccagtaacgtatttaccgtcgttggaagccaaatacaaagcagccttagccacgtcagcttcttcacactcagctccttttaactcacccattcctttcactgtttcgcgtagcttctcctccgataccttcggaaacactttctgaaggtaactgagagtgagcggtgtagccaccgtacccggtgagatacagtttatacgcacgccgtgttcgcagagctcgcttgctgccgacttgactattccgggagttgtgaactttgagattgtgtatgaatgtggagccaaccctccagtcacgcctacattgttttgtccataccaaaagtcaaatttgagtgttgaccacaaattgaaaactattaagcttcatttaagtttttgtttaaccaagctttgattaatacgatatgatattatacattattaactaagtactaagtactaaccaagctttgattaatacgatatgatattatacattcttaactaagtactaagtactaagtactaactactaaataaccatcttttggtttgatatagtaaggtttctatctaatctaagactttgattttatgttaatacctgcaacgcttnnnnnnnnnnnnnnnnnnnnnnnnnnagccggaatcataaacttagcggcgtgtttgatgccggagacaacaccaaaaacattaatcctcattactctctcgaattctgtcatatcaagctcggatatgctcgctggagtcataggtccaacaatcccagcgttattgtacatcacgtctagcttcccataccgctcaaccgtcatttccacggctccagcgatatcagcctccaccgtgacatcacaccgcacaaactctgcctccgagcctagttctttagcggttttaatcccggtttccgcgtctaagtcggcgatcacgactcgggcaccatgcctgagaaactcgctggccgtggccttaccgagcccgctagcaccaccagttatgagcgctactttgccttctagctttttactgtagaatttagtgatttgtattagtgcatacatgtataaggaaattatctagtgatttgtattagtgtcctgaccatgccataactcattcaagtccagagtgaaaaaacacatataatctatctagttaagttgactaacgtgttacgatcaatacataaaaattagatcaagactcatcgagttaaaaaaaaaattagcaataggttctttttcatttaaatgtgatactaagagatcgatcgatttggtccaatcaaaatcagatatgagagacagaagaagaaacttacctcgtacaagtacaaccgccgccaccaccacctgtcgagtaagcggctgaggctgcggtggctggccgtttaaagtttctgaaagaacgagaagaagaaacaaaattaagctgatttattgaaacaaattagtagtaatcgagagatgatctaaattaacctgacgatagatctgatcagtactatggccgccataagactgcttgttgagatcaaaagagtttctagtattgatggatacaaagtcagaagagcttggtgtagtggcacctaactctagtgactagtgtcactattaggtacaatattttaatattctatatttgaccataactaagaaacatatgtgatttaggagaaatacatctatctcaaaagaaagtatttaaaaagttttaaatagaccacaactaacggttctacatacatgttatctgatggacaagctattcttacaacacctgaggccacgatagataactctgcttgcaatatgttttgaaacctctgataagctttacgtaaatcatcagaaacaatgaatcacttagaattacacaatacacataatgattatctaatactaagttgactgatataatcaacgatactagtgaaatgtcgaaactccacagagaggctaaatttataattccaaattcctaccatataatgtcccatagattgattacaaacgatcacatcagcaatgacccaaaagaccaaaacactcgtaataaccacatcagaaaactaaaaaaaaaaggactttaatgaacttgataaattaattaagcagaagggagattaagagacttgaaacaagtaaatccaccatcaacaacaaggttatgccccgtcacaaacttagcatcatccgatgccaaatacaaagccgctttagccacatctatctcctcacacttctctccctttagttctcccgtcgcgttcacaatcgccaaaagttgttcctccggaatgctatgacccgcaaacgcctctcgaaacatcctcaaagttagaggcgtcgggatgcctgcgggcgatatacaattgattcttagtccgtgcttacacagctcgctcgcaaccgtcttgaccacacccgggattgtgaatttagagattgagtatgcgtgtgggcctagaccacccatcaagccgctgatgctagagaggcagaggatggagcccgagccagcggggatcatggctcgagccgcgtgctttatccctaagacagtacctcgcacgttgagacgcatcactttgtcgtaagtgtccatgtctaggtccgctatgcttggtggtgatatggagcctgcattgtatacataagcaatttatttatataaagatatgtatatgtagaattatagaagtaatgttttattttttaaatcttatatatga

SEQ ID NO: 37887 - DNA, 1936 bp, Arabidopsis thaliana landsberg
gagagcgggaaaacgacttctataattgacaatatcaacatcgtgaagcgatatgcttctgagtcatcaaatgcaattccagtttcgtctgacgacgaagcactttcaaaggccgtgaaggaggtaaaaacttctgaatccatttttatgcctctgtatttctcgccagctacataaaagtaaaatgtatgtgctgtgtacgcttctaggtaaagaacaagcggtctcaattcgtttggacacagttctcagaattgtatgcacattcccagagcagagcggatgatccacagaaatttaaccccagattagccgggacgaccccacggcttacatgaaacagaaagggcggcctaaagaaaagcaacgacccacctgaaacacaggaaagcggaaagaaaaagaatgaaagagtccaatccctctaagcagcataacctacaaaagcgaggttcagagcgtggaccggacacggagacacatccattgtacacaggtttgtagcactctatccaaatcgtaagtgtttagacattcaaatctcttctggatttggaatctgattggattttcttactttcttgcaatatgaagagtgcggaaaatgcttaaagatgaggatgaaatcgggtttgaccgtgagaaacttgtcaaggttcttgaagagcttcaagcacaagccgaagtagctctctgttttgtaggtatcaagcaataaacttaaacagaaagccaaattttttcccttgtataccatatgagcaacaagaaactcacaattcagtattgtattttttggtaatattggtttgtagcatctattaatggcgattttcatatagtaaaaagagttgacatttcaagtttgtttacagtaataaaaaggtaaaaaaaacggccaattccagcatgaatttacagaaaataaatccaaaacaaatataaaatttaaattcggaaaaaccttaaccggtcggttatcataaaccaaggaaaaaaaaaaacaataccaccgcacgtgtaaaacactcggagtctctctcctttagcgccaaattccgctcgtatcctctaaaaacctagatcgatcttaatcaaacgatctaaaccgtcgattaaccccttttcatctcaaccgttagaattttgttgatcaaactctcatcaaaattcaattttttgatttttaaaaagatctttagagactacgacgaagcaaaagaagaagaagaagaagagagagctattcaagcttaaagcataaaacaatctctgctccttatatagttcttcactatggaagatttgagtaatcagaatctcctcccgcgtcaatcagatatctccatccctgcggagaagatggattcgtttcaaaagtcgctagaacctccgccgtgttctccggtgaaatcttctcaacaatcagaaacggaagtcacaccgcctcagaaaccaccgcttcaccaatttggtcacaaccaagttcagaagaatcgagtgaggtaaaaattggttaatttctctgttccatcaaatctatttcaatcttaaggaattagcatttttgattgtttgattatgtagcaatcaagatccatcgacctcacgaagacataatgaagttgaatcgaaagagaatactccaaataaacaacaaaaacattgcaattgcaaaaactcaaagtgtttgaaactgtaagtatctatttttgttaatagagtttaaaaacatatttttgtttatacagagtcttgttgatctatataggtattgtgaatgctttgcttctggatcttattgtaatggttgtaactgtgtgaattgtcacaacaaattggagaatgagtcttcgagacaagtagctatctcaaggataatagagcgtaaccctgatgcgtttaagcccaagattgctggtagtcctcggggaat

SEQ ID NO: 37888 - DNA, 4830 bp, Arabidopsis thaliana landsberg
ataaggattaccaatccaaagtgtaggatgaaaaaattgtaatcagtgttgtccctaatagtactatccgtacgtatccatgtgctttcttggtaggtaatatattaaataacattcgatatctttacctgcatttttattaagctgcctggttagtagtaagtacgccattaatagtaatctctttaattggtctctaaatacacttttatactatttccctattaaaataaggcttttatgtttgttcgcctgacgcttgaaaaaatccgtcaaaagaaagaaaattgagtcttatttgttgactgtgtctcataataaggtagtgccactactatagcggttttatcatcttctacgcttcgatttcgtcgtcctcctcccaacaaagtttgttaggaaacgaatactcgaacagccatttcttctctatttctcggtacggagtttcatccgttaagctttccgattgttccgtttctggtcaactattttggtgtaattttggattttcctttgttgtttcgcttctttttattgttgcttgagttctatcactatgctttcatggagaattcttggataatcatgctggtgttttatttcggtgcagtgcgatgacgacgactgtggaggacaatcgcgaggtcctcgaggctgttttgaaagaagcggtcgatctggtacatattttctgtagtaaatttgtgaaactttgtaagggaaaatggtctgagattgtgtttaaatttccaggaaaatgtgccaattgaagaagtatttgagaatctgagatgtagcaaggaaggtctcactacacaagctgctgatgaaagacttgctctctttggccataacaaactcgaagagaaaaaggttactaagtttgattttgctgatattctgaaagtttgggtttttgctactgaatgtgttttatgtattgtgctgaagtagacaaccgctatttttatcttttttgaaggaaagcaaattccttaagtttttaggctttatgtggaaccctctttcctgggtgatggaagctgctgctattatggctattgcgcttgctaatggaggagtaagctattttcttaactcttactttgtacttgtttttatatctttttttagtttttgttcttgataatgtttgtatcagggaaaacctcctgattggcaagactttgttggtattatcactctgcttgtgattaactccaccatcagtttcattgaggagaacaatgcaggaaacgctgcagctgctctcatggcccgtctagccccgaaagcaaaggttctatatgcttattttcaattgtttcttataaccgagtttttttatgtttcttgtttgtttatgtgttttgctttgttggatactctctttaactcatttggttgaccatttgattttccttatgttaaatgtatatgtgaaggttcttcgagatggaaggtggggtgagcaggatgctgcgattctcgttcccggtgatataatcagcatcaagcttggggatatcgtcccagctgatgcacgccttctcgagggtgatccccttaagatcgatcaggtttgacatacgcttaatcttgtggcggacatagcttcaatcatagctacttttggatgtttggatataatactactaagttttctttactttcgagattaatttgtactgaagctgttatgaaccctttgttctgtagtcttctcttaccggtgaatctctcccagtaaccaaaggtccaggggatggtgtgtattctggctccacttgcaaacagggagagcttgaagcagttgtgattgcaacgggagtccataccttctttggaaaggccgcacatcttgtcgatacgaccaaccacgttggccattttcaacaggcatgatacacgttatcaaaattctcattgttgggatcttgtatggtgcattgtttttcccttttcaagtttgttcaaactatattaatacttatatctgttttgtatatgttcaggtgttaactgccattgggaacttttgcatctgctcaatcgcagtggggatgattattgagattgtcgttatgtatcccattcaacaccgtgcatatcgtcctggaattgataaccttcttgtgcttctcattggcggtatcccatttgccatgcctacagttctctctgtgaccatggccattggctcgcataggttatctcagcaggttagccagaaccacataagatgtatttttatagagtttctgttttatattttatcattttatgtttgtcttttaagttcttaaggattttttttaattattcattaaggtttgatgttaaacttgcttgatgttgaatgattagctgggacttgataactttgtcttgaaatatctctatgctttaatggctatatgattatattctgatatatatcgcagggagcaataaccaagaggatgacagcgattgaggaaatggctggcatggatgtgctttgcagcgacaagaccggaactttaacattgaataaacttactgttgacaaaaatcttatcgaggtaatgtgggcttgttcaaataaacacatcttcccaggatcccggtagctgatttttgaatgagagcaagttttttgtatataggttttcacgaaaggagtggatgcggatacagtagttctaatggcagctcaagcctctagactggaaaaccaagatgccattgatgctgctatagttgggatgcttgctgaccctaaagaggtatttggtttcactgaactgcattctaagatttattaagcttcctttgttttctgtttatttctttggcgcttatggtcaaccgttttctgtaggcacgagctggtatccaggaggttcacttccttcctttcaatcctactgataagagaacggctctgacatatattgacaatgagggtaacacacatagagtgagcaaaggtgctcctgagcaagtaagctctttatcgccagttgtgcctatattttactaattttcaatttttagttagagcatagtctgaacagttaccttctgtgaaaatgtttcagatcttaaatcttgcacacaataaatcagagattgagcggagagttcatgctgttattgataagttcgctgaaaggggtctgcgatctcttgctgtggcgtaccaggtcaattggtgatctactttccaagattcttaagatattgagtcacagcaatttgatataaagttcaaggttgaaaaggttttgtacttttgcaggatgttcctgaagggaggaaggatagtgctggaggtccttggcaatttgtgggtctcatgcctctttttgatccgcctaggcatgacagtgctgagacgataagaagggctttaaatcttggtgtgagtgttaaaatgatcacaggtgaaaaacatttcgtagcatttagtgaatttccatttcatattgatatttcagtctgatccttatagcatttatccttgtcaagttgtcattttgacatttcttgtcaagataaaatttatccttgctaaaggcttgaggcttctgtataggggatcaactggctataggaaaagagactgggcgccgtttggggatgggaaccaacatgtacccctcatccgctttacttggacagaacaaggatgagtcgatagttgctttacctgtcgatgagctcatagagaaagctgatggctttgcgggtgtcttccctggtaaattcatgtacttctgaaactagttccagcatctataaacagaatttctcacttatgcccaagggttttctgcagagcataaatatgagatagtgaagcgattacaagccaggaaacatatatgtggaatgacgggtgatggtgtaaatgatgctcctgctcttaaaaaggctgacataggcattgcagttgctgatgccactgatgcagctcgtagcgcatcggatattgttcttactgaacctggtcttagcgttatcatcagtgctgttttgaccagtcgtgctatcttccagagaatgaaaaattatactgtgagtgccatatttctttgaaatctcaaatcattgaggcctcatgacaatttccttttaacttttgttggttttcatgttttactggacagatctacgcagtctccatcacaatccgtattgttgtatgttacgattcagttttttgggttttcctactcatttctcttttactgttaccactaatattctgactgctttgtacacttttaccgattcagctgggctttatgcttctggctctcatatggcagtttgacttcccacctttcatggtccttatcattgccattcttaatgatggttcatttcttatttcctctttttctcgatcataattagactttcagagttttctattagttcctctagactctgatataccaatgaactcttgtggaattgacgtttaggtacaatcatgacaatatcaaaggacagggtgaaaccttcccctcttccagatagctggaagctttctgagatttttgctaccggtgttgtctttggcagttacatggccatgatgaccgttatatttttctgggtttcatacaaaaccgatttcttcccggtacattttctctcctctccgtcacttgtgtttatctcgttggttttatttgctttgttaattctttcactaacagctaatctcagcttttcttacttgaaacttcagagaacttttggagttgcgacacttgagaaaactgctcatgatgatttccgaaagcttgcctcagccatatacctgcaagcgtt

SEQ ID NO: 37889 - DNA, 4452 bp, Arabidopsis thaliana landsberg
taaggtctctcgacaactattgtacaggtaaaagattacataacttttaacaaatcatcttcaagccaatgagactaaactgtcaaaatgtgaaacaggctctgctgagtacaaaagtctgagaactcatgtagaagacggattcgtggatgatagatatcttgagagctcattagcggtaaatactgagagaaagagtaggcatttgttatgtctctactgtctacgctgatttggtgttaatatatgctttataatcgttgcaggagacgaatttgagcctagaaagacaagattgcaacattcatgacccgaaacaggagcaggaacaaccgagtcctgtctctgttcttgaaaggattcatttggaagacgaaacagttatccccggaaatgtgaaaatttctaaccttggtaaaagcccctgaatcaatgctttcattatcgttatcctttggatcacacttatccgtttgatttacctgaaaaagtttgttactttcttgcagaagagaagattcggttatcatttgatgatcctaacattgatcttgtagaaaaagaatctgttcatgagtttgtgaagaaagttcttgaagcttcaagattaaattggactaatcttatggaaaggtgcaacgaagaaacatcactactcgatgaattctcacacggtaatcacaacgaccagcttcttcttgttcttgactacaccgacgagattctccgcgagatttaccgtcaagacatcaagttttggcctttctcgccatcgaagagctcgagagtcctcaatctagaatcatcccttagagaagatgatctgattcacgagacgatgagacattttgactggagtttactctgctctgactctcctacaagatcattggatcagatcattgaaactgatctaagaaagccatgtctttggttggattttggtggtgaatctgaaggtgttgtgtctgatattgtggaaaagattcagcaacaattggtgcttgagatctctcatgagctaagaacaatgcagagaagcatattatgtcgattaatctgaatctcttcggagatattcaacttttttttttgtctgtataaaaaagtttataatttgagaatctactcttcatttttagttatctaaattaagaaagattcgatcttttgattctttcagccccgaacataggctggttcaagtaaaaagcttctaattcattgaaaaggttttgacttttgaccaattgagattttgtattggaattagggatttagggttttagcagcggccggaaattgtgggcaaaaagattcgaactttttttcattatcccaaatattaatgacaaaagatctcggctttctcgatttttgtgattcagacaatattcacaaaaccctagttgctgctcctgctctgtttttataagcctccacttcccgccaagcccctcttagccataaacagtgaaaaacccttttgttccttcaccaagctctaagaccctatccatggagacgccgacgatgaagcctgatacggttttgattcttgattacggctcccaatacacacatctcatcactcgccgtattcgttctctcaacgtcttctctctcgttatcagtggaacttcatcgctcaaatcaatcactagctataacccacgagttgttatcctctccggtggtcctcactctgttcacgcgctcgacgcgccgagtttccccgaggggtttatcgaatgggcagagtcgaacggtgttcctgttttggggatttgctatggtttgcaattgattgtgcagaagcttggtggtgttgttgtggaaggagagagcaaagagtatgggaaaatggagattgaagtgaaaggtaaatctgagatttttgggtcagagagtggtggtgagaagcaaatggtttggatgagtcatggtgatgaagcggttaagcttcctgaaggatttgaagttgtggctcagagtgctcaaggagctgttgctgctttggagaatcggaagaagaagatttatggattgcagtatcatcctgaggtattgaaacttgtagtctttgtagaatctgaaacaagttgatgtagtgtttttggatgataaagtctggatctttagcgtgttagctgtttatatcttaatgaatctgatgagacttgggagaacttagttcatattctgtgactctctaagaagtgaaaaatgtgatacatttcttaattcggactactatttgattgacatagctattttattggttggttagtgtgattctagaggctgaagaatctgatatgattgttgtttggattggggttttagtggattttgggtttatggatgataaagtctggatctttggcatactggactttggagaatttagttcatgttctgtggctctctcctaagtgaaatttttttctgaatcgtaactaaggacttcaattttattgacatagctatctaatggtaggctagtttgcttctatagactggagaatttgatgtagtatcatagtttggattggatatttagtgaatatagtacttctatttgatgttttgttagtccattgattgagaattactcgtgaacgtctgtaaatgatgtgctggttaagtgttgatttctagcttatgacgaaatggcattttgttggattttgcaggtgacacattcaccaaaaggaatggagacacttcggcatttcctctttgatgtgtgtggagtatctgcggattggaaaatggaagatctgatggaagaagagatcaaagtgattaacaaaaccgttgcatctgacgaacatgtcatttgcgccttgtcaggaggtgtagactctactgttgccgcaactcttgttcacaaggcaattggagataggcttcattgcatctttgttgataacgggctattaaggttagagaataagcaaattttcaattttatacgcacttttaatgtgttctttcttatattgagaatggcccgtgttgtaggtataaggagcaagaacgtgtgatggatacctttgagagagacttgcatctacctgttacttgtgttgacgcatccgtgcggtttttgagtgaacttaaaggcgttgtggatcccgagacaaagagaaagataatcgggaaggaattcatcaacatttttgatcaatttgcccaagagttagagaagaagtatgggaagaaacccgcttttctagttcaagggactctgtaccctgatgtgattgagtcgtgccctcccccgggtactgataggactcattctcacaccatcaaaagtcatcataacgtcggaggactccctaaagacatgaaattgaagctcatcgaaccactcaagcttctcttcaaagatgaggtgtgttactgttggcttttactatcttttttgtctgcaactgtcgagagattcatttgatctttcctctgtgtttttttgtgtgtaataaaggttcgtgagcttggaagaatcttgaacgttcctgtagggttcttgaagcgtcacccattccccggtccaggacttgcagttagagtcttgggggatgtcacccaaggaaacgccctcgaggttcttcgtcaggtgagctcttgaaaacatcaaaccggctgtatatattctttggttttgcatttcccaattcaccaaactcatctttttcggggttttttccatttcatcaggttgatgagatattcatccaatcaatcagagatgcgggtctctatgattcgatctggcaagctttcgcagtgttcttgcctgtaagatcagttggagtccaaggtgacaagagaacacattctcatgttgttgctcttcgtgcagttacaagccaagatggaatgactgcagactggtaagcttcttacatgtcttaatagttaatacaaatgcgtatagaaccctttcgatcgtaaacttattaccgtgttaatgtaaatactttgaggttttgatctactatctagtacttaggtctgagtgtttgaagtcatgcatttaggtatctaggttgtctcaaactggttatatagatcggctagtaaaacctaaacaatatttacttgttttgttgcaatatttaagactcgttattgtgctaaatcttacttttaatggtgcaatttttgttgactagaattcttgtggtgcaaatgaaaacgcaagtttatattgtgactgtgggtactgagattggtgatgtttaaaaatactgcaggttcaattttgagcacaagtttctggacgatgtttcccggaaaatctgtaacagcgttcaaggagtaaaccgtgtggttctagacattacatcaaagcctccttcaaccatcgaataggaataaagataacatatactgagtcttttatttatgggtgtctgcaattcttctaccatgaaatag

SEQ ID NO: 37890 - DNA, 3973 bp, Arabidopsis thaliana landsberg
  unsure (1)..(3973): unsure at all n locations
aacatttacaccttcaaacggctcagctgtaatatcatcaataaaaccatttccaccaccagatcgcccatgaatctggaagtgatccagcccatcaagagcttccctctaccgcacctctattacacgattctcgtggaaatcatcatcatcttcatcaaccatgtcatcattatattcatctccaaggccagtatcttcagggtcttccacatcagtccagcaatagacataacacccgctccatcttccactaaatctgcatcttcatcatctccttcatcatcctctccttcatcgtccatgtcatcatctacatcatcgtcagccctatcttcaacatgaaaactcatttcgatttgatcaccttcaatctcttctcgaaagaaatccatctgaataggttcaggcagtattgtctcatcgccctctatcctcatctcctgaagcatagcctgggttagactagaacccctttcaccttcactctgagaggaaacttgaggctgctcctgtccattatctactgcatctgttacttgctgtagactgctattattttgattcagctcatcaacttcagttgaagttgaagttccatgactatcatgtctctcatcagaatctgtatttttttgctcatttggtacttctgattttagctgctcagcggcatttgcagccctcgtcagtgtctcgagagacttgagaataagagtgacaagctttggggcatcagggtggtcaagatcaatcacgttaaggatgctggtcagacactggatagttcccccgtctatcatgctctttgcaacgtcaggtgaacagccacaaccagggaaattgcttgaagatgaattctttgtcaagatcgaataaaccaggttagcaaaagcgggaactcttttatcaggtaatagaacactttgactcgaactccttcccaaggaagcaaatacggatagaaccctcgtaagctcattgattattcttttacgcccttcattggaacgactgcacaaaacaaccagaaaccaggacgccttttcagacagtttctccttccattcttcaggtccaacaaacttttcgagagatataggaagcaatcgatgaatgacatggtaaattaaccctccatttccaggtgaatcatcaggtagattggaccctcgaagttgagatatttctgtatcccgtctcagtatgacactggtaccatgtaggtacatgagaacaatatcactcaacaacttcaaaataaaagttaccctggccaattcttcagatttttcagacccaagttctgctttctccggctcaccaacttttgatttacccttcactttagtagttggctcatcaacatccatcgaaattaaattggctgcttcaccttcctgcctcttcaacccaggaaaactcaagacaatgtcaataagctgatcaataacttggatgaagttagcggggactcttctgtggctttttgaacattttcctgacccatcatgaagcttattttcagatattccaaggggttcatttaaagaaaacccgtgttcactgccagaaactttcggcttttctttttcctttgtcagtatcacaaagtccgtacctcctgatgactccaactgacaagttgaagccacagctttcataaaaacaaccggatctcttgaaattacaggtgccattgtcgtcaggaatgtccgaggtaatactctacctatatgtctcttcccactcaaggtctgacgtatttctgtttccatagcaatttggagagtctgaggatcttcaacaagatgccgtacaataacagatgcaacagtatcatacccagggaaaaaacattttttcggaagattaaaaagtgaagataagcctccattttccagaaactggatagctaaagcatgtgatttcgttagacgggcacatagctgaagcacagcctgcatgatcatagctggaacacgctgctttatgaggccacaggcgattagtaaaactttagaactctctnnnnnnnnnnnnnnnnntgtagattttccaaacatcaattccaaagcctggtttgactcccctttagcaacatctgaagataatgcatcctttaaagctgctgttgagtcttgcggagaatcactcggcactaaagatccaccttgatttccttccacatattcagacgagagtcttgtctgtgcctgcagcatcatgctcaatacaagaagcaaagcactaatgcattttggagccagaatgtcagtttcagattcactcttaaggttgaaatccgtcaagataccaattgctacggccacaataccatcctgtgcagcaatttctcgtgtgttatcatcttctgagagtactaatgctaaaatgtgtggtatcatagtcaaagcaccagtatccttggagaaatcaagttgtacaagcttcagttgctgaataagatacaacacgatttttggccgatcttcccctttgtttcggttacatagtgtcacaaacaaatccactaacgggaaagcaatagaatcatcactctgaaataacttcactgatgcagcaatgacttcatcaacaggaggttcttttggctctgcttcttcctgcggaacatctactggcttttctgtatcctcaagttttggagtttcagatgaatttccaagagatagtgcaagtgcttgagccaattcgtcatcttcctgcaccggctgctcaggattggtaaacaaccagtccatagccatttcaacactgtttgttcccactcttcgtaacgcgatttcagcccttgaccttgaaaaacccatttcaacaatcataccaacaatggattcgtcaagctgtagaggcaaggctctttggtttataccccgggtaacaccacttcgattttcccttgcatccacaacaccagagtatatatgtgtaacaagggaggtaactgaagcaacaaaattaggattgcaatctggaaacatagggtggttccatataggaagtatgacatccagaacctgagactgcagatttcgcacaaatgtctcaggttcccttggtacaggaaaaagtccaatcgacaaaccaactgaggctggctgcacaagaagctgcgtttgagaggttggagataaaagatatgttgagttaacaaaatagtccagcgctcggcaatagttttgcagagtatctaccagccacttactgtgagaccatatatttctctcacctggcttctcattctcagtactagatgcaggaatagaaaacggcactttccaaagcaactgacttgtagcttcaaaggtggtgagaagttccttaaatgttccatggacataaaaactattcaccatagctgtaaaacagaccctccttcgagtatcaaatgtcaggaaagttatgtcatctaccacttttccaaggtaccggcacttcagtgacagagatgtatcaggcccagcagcagcaccgtacccctggaagttaagagcttcaagaaatactttagctagggcagtaccaagagtcttagatgctgaactcaatgatggcccatcaatcctgcgacgattagcagaggtaaatcctttcacaagggatgtgaaaaaaaaacgtagtgtacaattcaacttgtttaaaatttcggcaatgagaacttcagtgcttttctttttcagctcatgggaagatgacgttactggtagatcagctggaatttcagaatcaaaattaaaagactccaggtgccgacgagttctcccacccctcattcgggctattgcatgtcgcgtacggccatgaataccttcgccagaacgcacaatagacagaaattcgcgatccccaccccaaatagactgagaacaactgcttctaatggaaacagggtttgtgtatctaactgctaaagcattgcttgaatcctcatcactctctctgtcagcag

SEQ ID NO: 37891 - DNA, 4884 bp, Arabidopsis thaliana landsberg
actatactcctaatctcttttgggaccccatttctgttctttctggtggtgctatagacacatataccgcacatccaataatgcgaagatgggatacatttagtacttgaccatatgtcatctgtaaaggagaatattcattatctggacttagtctaatctgatccaaagaaccaaagccgcatcatgcaatatagcatgaccccatgtagaaattgggatttttgttctcaatattaacggtatagaaatgatctgcaaccttttaattaaagattcagccatgcaattttgtgtatgaacatgagagactagatgttctatatcgattcccatcgatacacaatagtcattaaaagcttgcgaagtaatttcccttgcattatcaagtctgactttctttatagcacaatcaagaaattgtgcctttaacttgattatttaggcaatgaatcttgcgaaagtcgtgttacgtgtagtcaaaagacatacatgtgaccatctagtagaggcgtaaattaatatcataaaatatcaaaacaacatgcacggtgggtggaattggtccacatatgtcacaatgaattcaagacaagaattcaggtctttcattcccaattttagttggtgatggccttgttatgagttttccttgagaacatgcgttacatgaaaactcatcagatttgaatattttttggcttttcaatggatggttattagaactttgcaaaaacttttgcgtcatgactgaactaggatgtccaaatctttcatgtcatgtcttaaatgtactagtaaactcgagagtttactataacatttgttgtgattatatttatttttgtgcaatataatccgaaagataacattggcaattcttccaataggtattgcctcttagattttatgcaaagatattcaatgccatctgtaatactctcaaaccgttatagaactaagaacgaatccggaagcgttacgtgtgatgcccgtagacgatctgaccgagttcccagaacacatccggtaccaaggtcagttcatccgtgaacatcgttcctcacgaagaagacggcctaaggcttttcaacccgtaccatgtccgtaagttgtgttagtcgagacaagactaatatcaggagtacacaaggcttttaaagaaaatatttttttttcaataaacattgaaatacttacaatggattgggctctcgagcctaatacttaaatcgagtacaactacatatctaactttacaaagacaacaaactctacactggttccccaacgtccgtgctcttcgttaggtcttcctaactaaggttacctgtaagacaaaaagtagaatactgagtaatctaagattactcaataagtccgggatctctaaaaatgataataacccaacccaaccccaatcaacaagcagcaagcaaccaagcaatgcaacaaaaaaatgtatatactccattgagtatacataaacaatgcgcaatgaaattaaatatgcatgcaaccaactactctaccattaaacctagggccccgcgtattgataacacaacttttaacccgttttagctattggtttcttatgttcagagagcatttggtgccattctagagccaataagaggagaaacacgtattataggtgccaagaaggttttaagagttttgaagctaaaagtatcaaaagacgatcattccagtgcttcggaagtttagcatccggccaaggtctttccggactctgcatgaagatatttcagtatggatggaaagttagaagagtcaagattcacgtcgaagtcgaatcaaagcaatccatgaagccgtttggaagatatggcccgaagagtgaagacatgtcaagaaccggttgtttcgaactaaaaagtccaaaacacatccggccgatgagacttgaacccgggcagctccgagtagctcaccaccgaccattaggtcacgcccaagtctttccctttttgtgcagccgccattaggctcctgtcctgaagcccactactcggcccgatcacttacttatccggcggaatgacgttcttacccctaaacctaatttttgggcctcaagtataaatacttgtccttagccctaaccctaagtgtgccttcattaccagtgaaccctagctgtcgccaagagctgcccgcttgctgtcgcacctcttgaagcttgaagaacaccatctctctctctctttctcgttttcgtgtaagactctttaagatggatctttgcctcttgtattctccattcaaagaaataatctctaaaccctttttaagtgttattcatcttttagttatggtttactcaacccaacttttgattagctcctttgccatgagcgagtagatctctagttgggtttgagggggtttcaaaggggaattcatggggattaatagttcaaaagtctaggttggcggtttctatggttttgtttgatcgtttacactattctttctagttgagttgaatcttaatgcttgtatgtccggaacatcacctagtacatgaccttaggtatttcattctttggcaaaatctcgtttgaatgcttgacctaactcaactgaataaagaactataatccgttgcacgcccgcctagtgataggaacttatggactagaaatcgaatttgaacttaatgctttgatcttgtattttgaaaccatgttagaacctaatagccgataaggcaactgagtacgcaagataatagtgataataaccggctttcacctactggccgttagggttagctggtcttgatagagtttcgtatgtccgagaatttggaagtaaacaaacctagccatgttatcacctagattgagatctataccttattattgaaccttgacatccggagaaacttccgatgatctaatgctcctctcttatagtttaccgtttagtttagttatttgtcttttattttggttactcataggttacaacaacccctctcttttattttggtcctagcttcactctcttcttaaggatttctctgaactacttctctccttgtggattcgatcctaaaatactactctgatatattgtgcacttgtagtagtcgtgtgatctttcaggtaaaagcctgaggcaaaataacacacgcattgtaatgaccctccataacgggtaagcggccgagcaggacaacatcgaggatcgaccgaggaagaccagataagaaagaaatagtaaagggacgaaatccaaagagatgggcgaggtaaaaatgaacttggccaattctagttcaaaattgggtcatccgggcgaagccaaaacgagaggaagttgcccctaatacatggctgattgcccatatgtgcccaaaaggtgataaaccataaaagcaaaaatgaaataactatttgggcaaagaagggcaaagatgggcaagaatgagcaagtttgggcaacacaggcgtgccgcggacgaagtttgcaccgccgggcgttgaccgccatttgaccacgccaaggacgcgtggctcggctaacttggggaatttgagttgcgtggagccgaagtttgggtagccacgtgtcgctcatccgctaaagtggcgagcgtgtcatcacgggcggatgacacttggattgctgactcgcccatgcggttgagatatggacatgctgactcgcccttgccttgcctatacaagcccaactcgaccccaaatgatttgtgaagagaaattgaacaaaagtgagaggctgccgagttgaagatcgtccgtccgattcatgttaaggtcttgtagccgaaaattctgtccgaatcgttgcactcattttgttggttactgagtaagttctagaaaattgtttaagtttcataatcatattctcatgcattcttgattgatttcgtgagttatatgaattgtgtgaatggttatattggatttgcatatgtgatctttagattcttatgctattgtttatggttgggaggttgtgttgggatattgatgattctatgtgtttgatttagccatatttttcataatatcttaaactttggggtcttggtacgatgtgcttgtggtaggaggcaaagaccataagcgtgcgaagatcgtgatatgtctgaccttcgtagtgaaccatgctatcgtggggttttgtaacgatgttactttatcaccatgaagtgcaaagaactcgaagacacggggaaagctaccctggccgagtgtatacacgacggtgtaacgtttggtagtgatgctccggttgcatacctttgtggttgtaacgcgggagatcacgggagtgtgtgagtttggtgttgggtttgaaggaagcatatcgggccctttaaaacttactaaaactggagtcttaatgcatttgcatgtttttatagtttgcttcggcaagctaccttacgttgccatgctttgttgcgtgttccatgttgggtatttgggttggggtaaactaatgtctgttgcagggaatcccgagttcactgagtaatcttagattactcatgattctacttattttgcaggaaacccatagtggggattagagcgcgtggtggacaataggaaactcggagtagttttgtgccttttgtaaaacaagtatgtttctattatgtatcgtgcttttggcactaggccttggccataaaacttataaatgtttggtaacatattgtaaaatatctatacttatgaaataaatcaggtttcttgtacacatttgcgagtaatgaatgataatgacttagtccgagtcggcacaacacttaaatatcgtaagggttggcaagcctaacaatgttttaagtttgagagtggtcgtcaatacgcc

SEQ ID NO: 37892 - DNA, 4100 bp, Arabidopsis thaliana landsberg
gtttaacttagttagaattctacccactagcttaccaaatgtaaggagcttgtcacagtaagataggaaatccctgctatagtttgggtccttagcatagctaggttaattaagttgctttgttgtaggtggagatcaagaaagctgaaccaaagaaatctctaaaccgttcacctccttcttacggtagtcaccctagaggtcgttcttctaacgatagttatgcaagttatggtggaccttacggaggttttgatggagggtatggtcatcctccaggtcccattaggtcacatggaggtcctgctagtagatatgctgggggatatgggtatggtcgtggcagtgtaggccctgaatttggaggaggttataataattatgggggtggtagtttaggaggttaccggaatgaaccaccccttggctattctagtcgttttggaccctatgggagtgggtttggtggtgagggatatggccgtggaggagaaggagcctatttgggatatcctcgtggaggaggggaaggctatgggggatatggtgggcctggttacggcggtgcatatgaatctggtggcccaggtggcagttatgaaggagcaggtggtccatatgggaggggttatagtagcagtagtcgataccatccgtatgcaaggtagggtcgaggtaatagcaatcagttggagctatagaagcttctctcacaggttcctctagattgttccaattgctctaggtgcattctagagttatcatgtagcgccaacatcaggaagggttgctaaggacaggaagagcatcaaaaagcttttattagcatcttttagttgtgtgtttacctaatttaagtgttgtcttatctctataacttagattgtgttatgtagactttagcatatttgggcttggagtttgtttctcactggcacaagaatgatttatcatttggtagtcttgttagatgatcaattactcgcttagcttagttttcacaatcatacgaattagcttaagaagctctgcaaaatgtgcactcatctattctttagagctcaagttgaatgctttatgtggtctcttgtatctctgtacattttgttgtgctgaacaaaggtttgacggcagttagttagtgcatgtgtaagtaggcatatttttgtcagctgcatacgtaggttctagctacaaattggaattgtatgtgtttgaaaacgtaaaatcaattataaatgtttttgaaaatcatctatacaagcatggttatttggttcttgtttccttattttttcgggtaagggccacggataattggttagacattggttctaataatgtgggttttgttatctgtaatttctcgtcaaaatgatgtactgtatcattaaatgaatatcacttattgtacatgcttttataagttaattgaaatccaaactcttttacgttttaagtgcaaggattgaatgatacaaacagcaaagagacaattctaagacaaagttttcaaaaatttatgacgacgaatgtgtcacacgtacgacacattaaaaagagttgacaaaaatacataatacataaaaggtctacccaatcatagttgataatcttaattagtgattaaaacgaaggtgtaaagtgtaaacatgattttaatctcaatgctttaaggccgatcttagcagtagagtaaagtgtaaacgaacgtattgtttttacacctagaattttaagttctgaaatccattctatctatttttgaaatgcaaaaacgattttccaaaatctccatatattttgtttggtcgataccaaatctctctatttaattgacgattttactgcaaagaaaacgacaatctcggatattcaggctcgcaaagaaaggacacaaaggaaaatcactatttttagatacataatgtttacattaacttctcttttataactctacaaatctttttttctttcaccagtttcacaattccgactattttttagagttttctctattcgtaaaaaggtagagaaagaaacacagaagaaggagaaggaaaaagaaaaaacacaaatggaagggaaagaggaagaagcaaagaggaggatgatgatgaagatcaaacttaaggagacagaagcagacgtaagccaagacgacattaaaagacaagaagcttacaacatgtctccacgcgtacgtcgtggtggtggtggtggcggtggctcggtaggtatgagcaagtcatcgagcgtgaggcaaaactgtttatgcgcaccaactacacaccctggctccttcaggtgccgttaccaccgtcgtaacgctggactcgggatgtctcgtggcacatccgttccctctaacctttccatgttggctggtggagactctaattctcccaagtgatgattaatatatattatgtgtttcttctcatcaatttaaaattctcgtatgtgtctgtgtatatacaaaaatgcataagtcgagaaatctcagaacctccatcaaaacctccgtaaggtccaccataacttgcataactatcgttagaagaacgacctctagggtgactaccgtaagaaggaggtgaacggtttagagatttctttggttcagctttcttgatctccacctacaacaaagcaacttaattaacctagctatgctaaggacccaaactatagcagggatttcctatcttactgtgacaagctccttacatttggtaagctagtgggtagaattctaactaagttaaacgtgtataatgaaaggaacaaggagaaaatatcaaattgaaaccaagataaatatgtcatcatgaaccaaaattctaatccccatttgtacaagcttacctgagtgtctgccatatcgatcatgtttcctttggacaataattcatctacgacttcttcgctatcaaaaattacaaaaccaaaacctctggacctgtttgtttcatggtctcgaataacctggtgctccaccacgttcccatacttggggaagaagtccttaagttcatctgatcaacacaaaaagaaaccaacttcaataaggacaggaaaccagcattctcatggaaagcaaaaaaatatcatgccaagagggaggtctaccttctgtaaccgttgagggtataccaccaacgaaaatcttctttgttttgatgtcctttgactgattgccaccagcacctttcggaatagtccttttgatctcaacctgttccatcaaaacaaggaaaaaagtattgatcaagacccaacaccctactaaaaatgaacactataagctagtgaaggaagaaaagagaagtggccgacctgtttgccattgatgacatgagtatcttcgataactttgtcaacaacagaatggtcagcgaaggtgatgaaaccgaaacccctaggttgtccagtatgtcgatctcgcataatgacagaatctgtaatctccccgtacttgccaaagtgcttattgaacacagctgcaatcaaaaccaaagtgagcaagtagaatcaacattccaacaggtctaacatcagaaacacacacaagaatccataacataacaaaacttaaaaacgcaatttctagaacaaaacaagaggaagaaacttactattagtcgtgtctttgtgcaatcctccaatgaatattttcctgcaacacaaaaattccaagcaaaacataaattaaaccttaaccaacaatataaaaagagttacaaagccaacagattatgagatatttcccttaatcctgtggaatcaaacatgcaagaggtaggagaagtaaacgtacccaggactagcgccatcgccggactggaaattatcattacgagatctggaacccatcgcagctcctaaattcagttttcgattgagctaaaggatcgagagagacaccgaaagctagggttttgataagatctgatgtctcttcttctaatagaagaaatagctaaatcgggtaatatatatattttcttaaattggacatcgactccgtgaaacaaaacaaagttaatattttttacacagctgtttatttttctattcttgtaaaagaccaaaaaaaa

SEQ ID NO: 37893 - DNA, 1486 bp, Arabidopsis thaliana landsberg
aagagtttcccctgatatgactttcttctgcatgtcacttacctcgatttgaggctcctttcgttgttgccaccagagtctccgccagaaccgccagacccaccagacctaccagatcctcttcctcatatcaatattttttccgacgtatctcatgctcaaccgcatctttccacctttctgatctcgttttcctccggggaagctctttctccttcccagcatccaccctgttttgttcaatggctctcatcctcccctaccgactaagagaaccaggcgctcttctcaagctgttctcagggcggaggtatatggctagcaaggggtcaattgacccctatggatttataaaaactgtttatttacttatatttttcgaagcaaaacttacaaaaatagtttaaaatatgtttattgacccccataaaaatttgtttgaaatagattttaatctttagataaaaattgacctctataaaagtaatggctacctccgccacgactgttcttcaccatggttgctcccgctgttgctacccaggcagtagagtgtaacagggcttgtttggttgtcatcacctcaagctctcttcctctttcatgtggccaggttatgctttagtcatgctccttggactatattcagatgtctttggttggcaggtctctcgcgcgtgtgcgatctcttacggcttattgaagtttcttcccttgttccatttcgggtattgattatatgaagatggtctttcttcctttgtgacagattggaatgacttctttaatgtctattcctccgttgaatctggttgatttctcctttatggaatatgtctttccagtggcggatctagaaaatgaatatgggtagggcacaaattattttttatatataattttattttgaatatgtaatatttatatattattaaaaatatatatattggatttttattagttaatacaataatgaagagaaaaaaataaaatttaaatttaaaaagaaagaggtcaaacaaatgaccaaatgaaaaaataatatatttagaaaattaatagaaaaaaggaaaaaaaggcaaaatagataaaacttgaacctaagaattggtgtgctactttacaagactcattcaaacatgctaagtgacttaattatgtacatactacaaagaaaaacctataaatcagtgtggggcacgtgccccacttctcttaacctccattcgcccctgtgtctttctcccaaaaattccacttcgtttgagtggtactgttgcaaagaacttgttgacgattgtttcaaacactaatgctttaagttggtcatatgtctttgaatttggcatggatcttgaatggcatttgaatctcttggatcacttcaatggtgactcatgtttaccttgtattgaggtttgtgttagacttatacatgctaaccttttatgttgctaagggctttgtcctgatttttagcattggc

SEQ ID NO: 37894 - DNA, 4956 bp, Arabidopsis thaliana landsberg
cattcccacaagagatatagaagttgagaacatcccaaaccaaataataaaaatgtttaaagacgtcaggtagctcaaagtaaaaatacattcagttccttaaaaagatttaccgtagacgcttcatccagcaactgcctgaaaccttcaatagctgccttatgagcagcacgcttttccctacgttcttcctcagctcgtgtctttacgtactgctcaaataatgatcttctaacagaatgacttggtattgcctgcaagaaaaatgaactctccggataaaaatacataatcgaaaaagtccaaagatcaagctgtggcactgtaacaggaatgctggaaaattaacacagtaatagttcctctaacattctaattagcaaataagaatgaagtttctggcgacacaacatattatgggtggagtgaataaactatatcacataatggctctaacatcctcaaaactttacttagctaacattggaaggaaccaaaggcatactctttctctacagaaaatcatttagctagcatacaaggcatcagaacaattaatcagtgaggatactagttatggactctaatataagtaaagtgaaagacttgtttccaaatgtaatatagatgtaaacttctttctacaccgagctaggaaatctataggaaactttaatttgtgctctatttgagcacccaaaacgaatggatgttacaatgctgacatagacgcaaataacattaactggaaatgtgcaagttgcaaacgcatgcaaggaaagaaacaatggacgtggaatttcaaaatagaataagatatcaaaatattgtcacgatctttaggcttgacagaccttaaagcgagggtcaaagataatttttggcaattccttctcccatttagaaaacggtgctattcctctctctttcagcatttcctgcaaggatcaagtgaaaaaacaggatattagaaaattatcttcaatctgaataatttcaaggtttccaaacttaaaaatgtccactagaagttggcatgtatcaaggaatcatggcattccgatatatgaacaagacccctctacagaggaaaatttcaatgcatgatctaaacttttctctagaatgctttaaataagatgtgtctaaatggctaatttaacttgcaagaagaaaaacatgagaaaagaaatctaaactaaaccctatgtcaaaaaagacaaaaaccacaagaaatattcaaaacaccttaaactgtttagaacactcttccttcgatggtccactatcttcatcttccgaatctgaagaagaatcggaaagggccccagctccaggagcatctttcaccttacccgtactatttccactttctccactgggtgtgacctcagttgttttaccactatttgcttcagatgttatcgtagatgagacaggcattccagaatcatgtagtttctttttaaccaaatccagcgcggacgaaccaaaatttgtagtttttagagatgcagcatcccggccaccattgctaatagcaggtgcgctcaaacttgttagatcagaacccttttcagttaaatcagcactaggcactgatgctacactctccatagccctctcctctagtttcttcccgaaatcttttacttctgcaggaatctgccagctgctgacctttgttttattgttatagtaatactttttgccgtcgtttgtggacacaagagcccaatccgtcccaggtaaactctccctacatttggtaacatttagatgagatatctctaacatgtacaaagtattttagcaggctcaaagtaattcaacaaaatataaatatgttgatttcatgggaatgaaattgttggcgacctagtacaaaaaataatacacgagaaatttaacaatataatgtcaccatgctaatatcattgaaaatatgacaactaatcttgtcagagcaagtatggatctaagaactcacattgaaacaggaattggctgcactggcactttatcaggctgcaaaagttaagaaaaaagtatagattataaattgcttaaaaagtctaaaggactagggcaacatgaagaaactgtgcatccattatcaaggtatactagaacaaatatcattcataagtttttgcacagcatcaaatggcaatctatatttactagtctgtgaataaacataaggtgatttgtgtaataattcacatgctcttacacaagttcactgcaataatatagtaactcgacaatcttaagcaacttcatacctattgataccaacaaaggatcacaatcccaatataaggcctggaaaaaagagaacttcatcagctaatgaatatatgacatctaggactttacaaaaatctggatcaaattctgacattgtaaacctcaattcggatattctagaaatttgtatacgtattatagacacgaactcataaatgacatgtcgtgaagcaaaataggtagacgtgataccaaatgcgtatggaatagacgtagtctcaactaatgaacaagccatgtaatcagcaatactcacctcccctccaaaaccaggaggcttttcgtaggtcgattgccctgtaacggaattatagtagtaaagaactcctgcttctgatttatgtgcagtccaggcatctaaccgatttcctactagttgagaaccagctctgtcatctgcaaaatacaagatgatcctgataaaaaaatatgtaaactcaatagaataaccattaaggtcaaacagctcttacatggatcagtaatctatcatgaaacctcgagcgtaccgattcctgagagttcttctgtctttcgcccgggagatatatcaggctgacgacctggtaatgcatgaacattgccatcacttcccataggactggcaccgagcggatgagacccagaatatggtaggttaggggagattccacgaactggaaatggatatgatccaggaaaggtagtaggatgtgaaagaaaaggtgccctgggaataccacccatggaaaggggccgccaccacattcattgaggcgtcccaagcaaagaatgatatggaggcatacatgtgccgatgaataccaagaatcaggttgagccggaccatgcacacatcccaatgtcgtcgaggtataataaaaagggttggaaccagaaaaagcaggcggagatgtcattagtccaggaggggcgagtgttcctggtcgaccaaaaggtgcatttgctagcatgggtgaagcttgaggtatgggattaacatttgaggaggctgctgcattagtaccccattgtgcagtaacagaagatggaactgactgagagacaaaacctgtactagcaatctgcacaacagcaaccaaaataaccacggaaccagtttagagactaaaaggaaacaacctgatgatagatgaatcagcatgtgttcaatgcatacaccaaaaaaggttgaatcctgacaaattctattagtgagctaaatcagaacgacacgaaaattcgatagattcaattagagacatgaattcatctaattataaggatttctgctaaatcaatatacgacaagttcttgtaaaaggttctacacaaatccacatcaaaagataagaactagagacaagatcgagcttctttacgagttaaacagcgctcaagataaacaaactatgcaacaatcagaaatgagcatgagcaacatacagacatagagtgtagctccttcagctccgactgagagaaattcgaagtagtagccaagactggagcaattggaggaggacggacgaagatactctgtcccgaagatgccgccgttgtgtacggcggatccgttgtattctccccttccattacctttaaagactaaacaggtggtggtatcgagtaatagtttccgacgagaaattgccggcagcttcgtcgacgcgaacgaagaagttagggtttaggaaaaaactagtgaggaagaatcagaagatgtcgatgtcgcgcgattcaggagaacgaagttcagccgacggtttagatagatcgtaggatgataaaaaggatggacggctgagattacgttccgggggaaaaggaagaaaggagatattttaaattattaccgagaagaccttatattttaaagttaatttatgaaataacccagtattttctttatcgtgatttggtcacctcctaagtcaatttctttcgtgaaaaccccctaatcgatcgaaaagaagacattatgttatacgcacgtggatagtgtttttagattcaaaaagtatataagaagctaactcaaacatatgaaaattgaaagttgactgaaaataatcaatttagtgacattagttattgacatccgacaaaaagaaaataacacacaataaacatggttgcacaaaactaaaattagtaaccaatgtactatctaatttaacagcaacctgttgaccataattcatccaccactattatttttaacttgatggacataaaagggtggccgacccataagtggaagagtccaaaaagcaaaggattacgaacgaactactaacaagttgggtcgccgacctcccaagagtagcaagacgatacagaagcttttcttttcttgtattcggatctttcatttaaataacgatagtataacaacgttagaaattaaactgatctgatagttcaaatgaaataatgaccaaccatatatagtaacgcgcctaacgcgttccacaaaaaaaacataaatggcttaagtttgaggggtccttatagtcagtcgcatattctttggtcgcataggtacaacaaaaggtcacgaccattgactctccaccgatcacttaacttgccgaattcacatttcttccaatctttttgcggcattcccttttttggctacttacttttcggaaacctttc

SEQ ID NO: 37895 - DNA, 5680 bp, Arabidopsis thaliana landsberg
  unsure (1)..(5680): unsure at all n locations
tgtttaaaattacagtcgggaccccttaataagagggactgtgcagtattacttcaatgatgtctgtaaatggtgcttgaaggacatggttagcaccgcaaggagaactagagagcagcctccatggattggtgaaactctgtgggctgttatgtgcgcttactgggacaccgaaccagcacaaaaacggagtcggacctattccaaagctcgtctctctgaccgtaacggtctcggtcctnaaatccacttctctgggccaaagtcttttcaagaaatccaagacgaatttgtaagtttttctgttacctctttcagttacctcacatgtatgtttttgagtatttgagctgtgttggtttcattgcaggaggagaaattgggaagaacggtcactattggtgaggtgtttgtagagacacatactaagtcggatggtacgtatgttgatcggaaggcggagatgattgctcaaacttatgagcagaatgtgagagatagattgttacagctagaggcggaagcttctgctgtgtctgatggcacttcacgaccttgggagctgacagtagatgagtacacagccatctttctcgaggtaagatgttgtagtctaattcacagtcttgtccattgttttaaattcagtcactaattgtcttcctctctttttcttgcagtccactgatagggatgcaagaggcaatccatatggacttggatgtctgaaagatactctaggcagtgccatccgccaactccccggagactcaacatcctttcaagatttagaagaacggctgcaagaagctcaacggaaaattgaagagcagactgcgtataaaaagaagcgggatgctgagattacagcccgagaagctgagtcagcccgagtcacagctgagcaaaaggacaagcccgaacccttgtccttagtcgagaagtatctctgccaaaccgatccgcaattcttggacttcatggccactcactctgccacatccactgagcccacttactccacctactgctccatagatttacgtaccaaacactagaccggaacttatgcatagttgattacagtagtttgtgctagaacaggatacatgtatatgtatgtgaacttaatcatcaatctatgtataactgttcataatttaatagcatatcgagtcacacactacaacaaacaatcacactaaacaacaaacaagcaacccaacaatcgatgaccaaattcttattcggacaaaaccagaagtcgccaaatagtcgtaaaagcgtcgccaattaaacgtaaagtagtcgtaaaagagtcaccaatattaccgactatttacgacaacaaaagtagtcataacctactcgtcaaacagacgtctatagtcgtataaatttatacgactattatatgactaagtataacatatcattagtatcttacatttactcgtataatagtcggcaagtagtcgtaaaaaatgttacgactattttgagattactttaaagacacctagggttcattaaatttaatcgtaacatagtcgtatcattgtcggaagaatttaacgactattggacgacaatatgtttcacacgctctgtacagtgttattaatcgtgacattgttgccaaatagtcgccacataagtacgactactcaacgactaatatctattgtatggtatgttgtcgtaaattagtcgtaaatcaacgactaaatgacgccagctctacttagcgactatggtatgttgtcgtaaattagtcgtaaatcaacgactaaatgacgccagctctacttagcgactatggtacaacgactactgtaattagtcggggattagtcatagattcagagttaacgactaatctgcgactacgccgtaagtcgtttattgcctgttttcttgtagtgcaccattgacgagagctaacctaacatgcattacgaatcaacaagttaaagccaaaacgctccctgcaaccaataccttggtacagggccacgaatctctggaattattggttcagacatttcatcgaacactttttgggcgcagaaatatctgggctcaaattccagttgatcagaaagcaataggcattaagaacaactaatccagaagggatctatcaatcaaactcaaccacctagcatactgagaattctactctactctaacccatcctcagaaacctattcactactgaaacatcattgcagaaaacataaacgttgaacagaatgaaaacaggataacaaaagtataatagcaagatgataacaagatgaacaacagtaaacaaaaatcaagaacaaatactgaatactgaatacttaatagataaagagaaatccggattacaaaaggtctagaacacagtgtctgcggaataaaactagagaaaaacttgttctcgaaaatgtaaagtacatgctacttatagcaaaatattctgaaaccctaatactcaaaacgacgcagtattgggacggattaagaactgtactcgacccaggtggtcgagtgagaggtcgagtgataagctggaatcttcttttcatccttgtgctcgagtatctggttgagtgcggaatggagaagattctgaagctcgacatcgcgtatgtagtcgagtggtggtgatggtgatactcgacttccaggtagagtggtgtgatcgagtgatggtaaggtggttgaggtgaagacactcgacatgggggtcgagtgaagtgatcgagtgactctcgtgggggtacttggcaagggggtcgagtgatgaggtgaagtggtgaaggcagctactcgaccaaggggtcgagtggtgttgtgaagtggggaagtcgtctactcgaccttgtagtcgagtggtttggcatgatcaggtccgcttcttccaattagctcgtcaacaactccgaattaccttaaaacaacacaaatatgcaacatgcatgcaaaactatcctaaacatgcaaagtgatgacaaatgatgagaaatgatataaaacagtgatgatatgatgctaaagtgatgacaaatgaatgctcaaaacatgcaaaatacacacttatcaactcccccaaacttagtctttgcttaccctcaagcaaacaattaagaacaagctggaggtgagtgtggatgtcggattcacactcaagtatttatttgtttagtgagaaggattattcttgaggtcaaatatactagaaagtaagtagatgattatagagaaaactatgagtattgtaaaagaaaatgtatagctaatttgcaccaaaaatatgcgtgtgtctttacatgacctttgactcacaatatatatccaaagaacacatttaattcttatttaatcgcaatcattatatcttaaacacgtccgtttctagtcttcgaattaattatccgaacgtttgaatttgaatccacttcgggccttcttgactccacctttcggcccatttggcctcttcaatccgagtagtcttgatttcgacgcgacattcatttcgcgggtcaacacctcatccatactctcacctcgtgaatgcttatgggccttctctcttatgggcctcttttatccacgtagcaatctttggccggatccgagcccgtggtgcgggattcgacagcaacaattagccccccaggcctttcgaagtgttactccagttcggaaggctttaatgctataagggcaaagattgcgccaaatgattcttctgatttcccgcccaaattacgcgattgcattgatctcggaattttccataattactgatgtgacacctgtcgcaattatgaccgtatattgtttaattactattaaagcgggaaaattcttccacttcccccacgactcccaaggcggttccgtcatcatcactggctcgcgtgtaggtaaattcactttactctttccttgtcattttattttttacgcttctctctcaaagcaaagttcttttctttctctgaaccttcaatcttcctactctctacacaatgaattctgaaatacaaagacctgaatccccctctttcgacgacgacggctccagtaatgacctctgcacctgaccgaatgacatcacgggtccccactatcaatccacatgcactctccaatctcttaatcgattgggcgagctctatcggattctaatcgaagtaatgagggatttccagatgccggagccgaccgaatcaccggaggagcactgacccgggttcttttgcgtgtacgagatttacttcaaagggtgtggcttgacttttcctctccccgaagccctcgtgcgttaattatcggccctcgaaattgccttaccccaactaagccccaacctccttcgtaccattctaggaattatcaccattgcggcggaggctggatacgtcatcggggttcccgaactgaacgaacttctcagtgtgaggagttcttcgaagaaagtcgggnanttctcgacttatccgaacgcctatagaaatctcatctcgcatcttccgaataaagacgagaactggcatcacccgtggttcctagttaaaaagagccctgcctcgagcgggaacgtgccagacttgctctccacgaagtggatcaccaagcccggtagttattagctcatgcatatgagcttcattttacttcctgccttatcggaccaattctatttttccacttcgcagtttttattgcacctacccttcctactactgagttcggcgaattcttcaagattgccatcgaaggggaaaccctttggaactccttcactcttgaccggttcatagaagccaatcacaagcttaggatgagtccacccgggaacctacttccaacttccaccacctccacctctacctcacggaacttctgccagggctatcgcttctcgtcgaaaaacgttgtccaagccgatgacagaggcttgtgaggcgaacaaatcatttctctagtcggttgtcgacaagaaagaatacagtagaacactgctggtcgatgatggtagcgccgaaggggctagatctgctggtgccttcagacccacacctcatcgtgaaggtcatagcagccgatcatcccacaagagaccaatcaactcgtcgtgactcacctcggcccacttcccgatgtggactcagcagcgagccaattgctgacctgattcggaagaagagagacagaccatcccgcagcagctcctcccccaaaagagacaagtcgagggcccgaactgaccgctctcctcgaccgtcgtcgccaccccgatctatgggtcctcctcctccagtcaccatatctccctcgtccggataaggaggggaaaaagcagagcggagtgctatccctcggcgggatgaaactgaggtctgagatgccggaactaaagctgttttggttccttagacctagtcgctcacgggttagaaatttcttcccatttttttttgttatcacattttttgccatttctgcttattgactcagcgtccttcgaccggtccgacctctttttttttaaacagcgatgaaaacggaggggaacgtctttcgatgtttcaaaacccgaaaagacaccatccttctaaccttcgatagatggcataccgcaatccgcgagccattcctactccatgcccatcactca

SEQ ID NO: 37896 - DNA, 3877 bp, Arabidopsis thaliana landsberg
ttaatccaggttcagcataagtgcacttaacacaagacttgaacaatctgtaaacacaaaaagaagcttcatttaacttctcattatcaactaagcaaaaatttcaatttctctaatctctcgacttcatggattcactgattacgcaattctgcaaaagatcctgactttcaaaacaccaatgcagagattttgatactttatcaattatatacattaatctatgaaattcaatgaagaaacatagtttatagagagagataatgaccggggagagaaagagcgaggacgaaatgaagcgccggaaaaagtaggtggatgagctgaaatggcggagaaactaagaaacgaagtcatttttcccggtttctgatttcaatatcttccgacagaaaatatgattgcaacaaccggagagaaaattagtgtctgaaaatcgccggagaagacggcaaagcgagaaaaatgtggttactacttactcggcggaattgaagcaagaatttttgtggttactgtgtatttattttaaatggtttataagtacaatagaaaaacgacgccgttaatatattcaactaaagcccaaataaatctttagataggcccgcttgataaacgacgtcatctagagtataagtttgttaacagtgataaacgacttgaagactcgtgaagacgaagaagaagagcaatcgaagaaaagagggatttgtgtttgtttgttgttcttcgattgaaaatggtgaaatcgacgagtaaggatgctcaggatctatttcgatctcttcggtctgcttattctgctactccgactaatcttaaggtccgccattgttgttttctcttaaaccttcgtttttttttgaaggatcatcggtgatttacgaaatctgttgaaattgaatttcattgtaacttatgattgcagatcatcgacttgtatgtcgttttcgctgtcttcaccgctctgattcaggtacactctaatctgtttgtattatggcttctctagatctgcaattctcgagtcattgtttagtaaactttagatctgttgtattgtttcacgcgtccatggttaatgaaattttgtagattaggtgatcgatttagatctgcaaatctaccctacgaaccttttaacttcaaattgcaatgtagtattcatagcattggtttgcaaatgggtttgttctgttacgtgtggaagtgtcaagcttttgtctcgctttaaattgaatgaaatggtagatgtttcagtgtgtttctaaggattcaagacaaaaatttccagtctattcatctgaggaaatgagacatctcttgttctctgtttcttgacttatttctcagtagtaaaaaaatcatgatggataagtaaattgacttccctgtgctcatgagtagcatttcactgaaatggtgagtgagttttaatctctatttttcactgaataggtggtttatatggctttggtgggatcatttccatttaactcgttcctatctggagttctctcttgtatcgggacagcagttcttgctggtaagtttatctggattttattcagacatgcttataccttgagaatgtatgtttaaaactaacagtcttctctattttgtgtttatagtttgcctccggattcaagtgaacaaagaaaacaaggaattcaaggtaacgaactcctacagtttcttcaactcctcagtaatcattatgcttccacaatgttgtctaaatatcctcagaagacagctattcatatttgcaattccttttgaatattgcaggatttagcaccggagcgagcttttgctgattttgtcctctgcaacttagtcctccacctagtgatcataaacttcttgggataaactaaacacctctcaagccggacataaatctcatgagatttttgagaacaatcactgcacttgctttccatacatcataaactttatttctgatatttgagattttatcatcttagtagcccttatgtgaagagcttgtttttcttttgttaatgctactttctcatagtgattgagccaactccacagccagttttaggttctacgcaaaagtgacaaagaacatacatcatcaggatacagaaatggtaggcctactaaattcatttcacttaaattcaatcgcatccataaagtgaagaaaaaataaataggaaaatctaataaaaagggtaacaattttgatacagataagcacattgcctcaaattcgcttctgcaagtagagcaaaggcaaagtaaaacattaaacgagggaattttttcttccaatatctaatttcgtaacttacgcacacatacactggaccatcaaccctcaatatactattcggaaccaatcgatctctgatgcctagaatcctacaagccatctgttagcaaataaccgcccagtgttgttgttgctgctgctgctacttttttaaacctgtgttagcaattggttttgctctatgtcttctcacgttgagtctttgtatgaatcaacctttctctctgcggcacctgtttgattggtgtctggttcttggtggtcattgtccatgcttatgccttcaagtggagggaataatgaaagttggtcctgcaagaacaaagttggtaactgtttcgttggctggctctaaaactaattttgaaagattactttttttttaccttgagagaggtgttctcggtggtaagatcttcgcattggcttttgagcttgctgatttctgctctgagatttgtgttttcttcgttcaacacctcagcgcgttgggccagctcatcacattcggcctaaatcacaaacaccgggtcaataatttgctcacatgggcgtgctagaggtgatctaaatggatgtttagtacctgtttacgcaaccttgatcttcgagcagactccctattggactgcttccgtctctgtcgcttaagttctctatcgtcctaattgcaagacaaacaaatctgagtttgaggataaaaggcgatttaaatctgcctaagaaaggtgggcacacctgtaaccagggttgtgaatggccaccatctcgcgagcctggagcaacaactccaggaactggtgtagatactttcccatgcattccagggataccagctgaagttggagcaccccagtaatccatcccaatatttaaatttgttggtgggccaggaacacctgcagctgtcattggcatgattggtacggtctggctcaccggtagaataggtgtaccagcacttccattttgcggaccattggcagaaccaccattctctgatgctgcttcagctgaatggaaaaacaataaagaactctctgataagtagctttcacggtgttagccgcatgatagtaacgaaaggaaaaagaaaagatcgtaaaccaaccatcctttccatctagtccagatcccgaatcctacatgaattgcaagcaaatcagaatcagtcataattactgtaagaactcctcactcccatagaaagacggaaataacattaagacttttcgagcccaaagatccaacaaaaacgtttgatgaggcgacatatggaacgcaaaggttatgtgttccagtgtgcagattccaagtgttagcaacactcataaaatttaaattgagaaatcccaagggactgacagatctgaataggtcaatccaaattcagattcatgctagattcttagcaaccaaactaggtgttccccatgaaacagcgcctcatcacaacatggttgccagaatgaatgcataccaacaaagatataattcaaatgaaaaggctgatgatagaaaaccgaaacttacattttgagagttcccatcacttccttcact

SEQ ID NO: 37897 - DNA, 5071 bp, Arabidopsis thaliana landsberg
  unsure (1)..(5071): unsure at all n locations
aacgtggcctataccgactttttgaagcggtgtcaatggctttttggctagcttctggtacatgggatagacaggggaattgttcattaagataacaatacatgcagtgatgattactatgacttggagggacccggccgggattttgaagtgaggcccgagaccgcggtctgtgactagagcttgtagtataatcaagcttgtttgcgtcaccatgggagtactaacgaagatgatggctagtaacagagggagaactcggaaaacggctttaaaatcttctacttcttgaacagaacnnnnnnnnnnnnnnnnnnnnnnnnnnnnnnnnnnnnttttcaatgctgcacggttaaagaacctgcacatgtaaaagctcttttaagttctgttttaagtttgatgaatgaagcaagttttttttgttttttcacctaaagctcttggagggcattgcagaagatgtcttgccttctcttccaagcccatggtgatagtcttcttctctagatgaaatcacagctttcctttttcttgtagcagcgactacaacgcggatcagatttgtgaagggacttcccattggtttgtcatgcttgtagtatctcttgccagagacgaaaactatgaaactgatcaaattagcgacggcgcaaagaccgaacccaagtttccagctagcattttcctgtgtatatacaattgctgttgcaccagtaatagctccagtgtagagtgtgaggaagtaccagttgaaaaagcttccttgttctttaggtttctcatattggtttgcacccgcggatgctaaggtaaaccgcgtcccagctgatccaatgatcactagagctaaggctacatacaagatcccaagctgtagttttgatggcgactggcatagaattgaccccgtttcacacggtctaggcatcaagtagttcaaagatgtgattaaggtcaagagagaggttccctgaaaaaatggttttaaagctggtaagctttgtatatcagaacatagaatagaattagtgagtgttaaacttacagccagagaaatgaaagtggaggtggagatgacgggaatgttcccaaaaaaggaatcagctaggatggctgcaacaacaggtaacatgttgacaactccattgacaacatttgaaatctgagcagcagcgatgttcttgatgtggaattcctcgatcaagaagacgatcaagttcattccccatccgaaagaagttatggacatacctaataatgtaactgcacaacataaaacctcaccagtatcaacatctatatatgttttggtttcaaaaaaaaacaaaaaacaaacctagcatgaacggtaaagtgatccagccaccacgcttttcgcttggatcgctagagcgatgcgctacttccgtgtcaccagattttgaatcagccatggtagagaacaagatgaaccaggagggcaaatggagttataatgcaaagttgacttgtgtttgtgtgttataatggagttagataaaagacttgaaactatatatataagcaaatccataacaattattatgtaggtgcagtgatttggtactaatcttgtttggtcccaaaaagacctaatcagattctgacagtccatctaccgttggtgacagttatagaaaacaataaaattatttgaccaaatcttcaatagtacgtagtattcataatcatcagaaaaatattctaaaaagaaactttgaataatgttaataaagaaataaaaaacgcacgatcgaatattgtgtcaaaatcgtttgtatcagcagatgcataaatatttttcttattgcccaaaaaatgtatttaaaaaaatctaagcaccaatctcacgtttgaaactctgttttcgttcccaaaagtcaaattttctgaagccaaatattcaggtcaaacaacaaatcacgagaccatgctaccaacgctgtcatatattaagattttcttctctcgggtttcacgggcttcatttcatagtaccctatatttggtccgcaagataaacgccttgcttcccaagatatctctaataatattgttttcatattctcaagccaaatcttacatctttctaataagacatacaagattcaaagtaatttgtggtgttaagttttctccaaatcatagtttgtattaattgattttgcttgaatctttcaagattgcaaatgaaactttttagaaaaacaaaaaagagcaaaacaatttggacgatttcttgatttgtgagtgtgatccttgcagatcttatctgtatcgttccaattttgtcggatgtccccgaaggaacaaaccttttggcgtatgttgatgtatatatgtggttagattgtgttcacacaaaccgatgtggaatgtctatataagatgattaagattaagtaaaatactaattttctcttggcccttttagttatgttctactcggtccattggagctaggatattataatcatgcactacatactaatttgagttatgagtttgatacaaataacatttattggtaaaggtaaacacaaattaagacggcaaacagtgagtttgcatggagcacataaggtagttgcatgaagacacaactacaatatagagaaaacgaggacagaacacgttagtgtcctagtttgtaacatctttaggatcttgttcatgatcatcattcttgaggtttctgtaattgtaaaaccaagagcagacgaggaagtagccgaaattagagactcctataatgactaaaaccaagtaaacattgtcaacccttccgtggtttatgtcatttggtaaccacttagtggtcctctggatcacatcgataagagctgtgctcagatagaaagagattcccatcaccaccgaggtcaatgaactcgcggtgttccttagagactcagggaattctccatagaatattgcaatattcgctggaaaatgaaaggcctcacctattccattaatcacgagagcaggaaccagccacagcactgacatgagatggctattttcaactgttttcagcctctttgcttccacaacggctgatatcgccatgcttaggatggtcaaaacgtggccgaccccgactttttgaagcggtgtcagcggcttgcggattagcttctgatacatgggataggtagtccagttgttgagtatgatgaagacgcatccagagacgagtgctatgacttgcatagacccagcagagactttgaagtgtgggccaagtttacggtccatgaccatagcttggaggacagtcatgctcatttgcaccgctaggggagcgctgaggaacatgacagatgtccagagagggacaagtcggagaacggctttgaaatcttctacttcctgaacagagcatagcctccacatgttattatttgagtctccttctgtcttcaatgctgcacggttcaagaacctgcataataaaaatccctctttattagctctctttttaagttccatgaatcaggaaagctttttgttttcacctgaagctcttggagggcattgcaacataagtcttggtctctttttcgagctcgcggtgatgatagtcttcgtctttgtatgaaatcacagcctttcgtttcattgtagcagcgactaaaacgcgaactagacttgtataaggacttcccaaaggttggtcatgctcgtagagtctcttcccagcgaccaaaacgatgaaactgatcaagttagcagcgacgcagagaccgaatccaagcttccagctagcattgtcctgtgcatatacaattgctgtcgtgccagtaatcgctccaccatatagtgtgaaaaagtaccagttgaagaaccttccttgttctttaggtttcttatattggtttgcacctgcggatgccaagatgaaccgcgtcccagctgttccagtgatcactagagctaaggctgcatacaagatcccaagttgtagttttgatggtgattggcataaaattgatcccgtttcacacggtctaggtctcaaatagtccaaagatgcaataagagtcaagagcgatattccctgaaaaatgtttcaaaacaggtaagcttttatatcagaagttgtttaagaaagcattaggcatgcggtgacctagtgtctagcacctaaaacgcttagtcggataaccttaggcagtttagccagtttagacatttattacataaaacattagaaatatgagcttatacttaaaacattatataaaatacatattagaaaaataaaaatagaatatcgtaaacaaagtatagacaaaacatttctttaatgtacatcaaaacaatatatgaacgattgtaactatgtatatagagataaaacctacttgaaaattagaaaatgcactaaaactaggcgtatatacattttagacggtcgaaacagttgtttaggcattgtctgagcgccttaaactaggtctgtgtaattttaggcggtcaaaacggttgcctagtaactgccgataccgtttttaaaacactcataacacataaaagaattggtgagtgttaaaacttacagttagagaaatgaaagcggaggctgagatgacaggaatgttcccaaaaaaggaatcggctaggatggctgcgacaacaggcaacatgttgacaactccattgacaatatttgaaatctgaacagctgcgatgctcttgatgttgaattcctcgatcaagaagacgatcaagttcattacccatccaaaataagttatcgacatgcctaacaatgtaactgcaccacataaaaactttacaatcatcaacatctgtttatgttttgagttcacataaacaaaagagtcaaaaacacaaaccgagcatgaacggtaaagtgatccagccaccatgcttgctagagcgatgcgcttctttgtcaccagagtctgaattagccatggcagagaacaagtggaagcaggaggtactttgacttgtggttgagtgttataatgcagtttagataacaaccgtaacctatatatataaagcaatccatatc

SEQ ID NO: 37898 - DNA, 3296 bp, Arabidopsis thaliana landsberg
  unsure (1)..(3296): unsure at all n locations
taacatgtactaaacacagctcaaacagagctaatcaatgaatatccaagatctaagtatgatgtaaacctgttaaaaaatcccattaaagtgcgatcggaccaaaaacaatatataaagaacatattgatcagtttattttggttttgagttagaacttcataaaacttaacaaatctggcaattttcaactagatttcaggaaattaaagcagtgatatctcaaatgtgaaagggaagatgaagtgaatcaaccacgataagctagagaaatttgcgggttaagactttaagctgtacacgtgatagttcttctttatgcttacttagagcatccacattggttggtttctaatatgagtttcttcgaattgtttattagttaattttgatagttttgtagtttagagttttttataatttttatggttcaatggtggaatttttaagagggtttcttaaaaaaaaataaaaaatggttaagtacataagttaatagatgaaactcatgaaataaaactcattactcgattgtaaccaaaattgttaagttcggacaaaacactcacattcatctattaatcgatatggttgagttcagaccaaacacacacattcatctattaatcaatatggttaagttcagaccaaacacatacattcattcattaatggatatggttaagttcagaccaaactcattaatcgataaaactcacaacagtacatacatttaaagaatctggtatcttccacaattgatgttggcacaatttctattcttcccagtcctgcaaaatgaagcatatcatgacattaacagatgaaacaaaaccgtaaactacaaacattcagaccaaacacatatactcatctcattaatccataaactgaaaacattgagaccaaacattcaccaaacacaaatactcaccaaacacaaatactcatctcattaatccataaacagaaaacattcagactaaacattcagaccaaacacaaacattcagaccaaacattcagtctcaaagttattacacatatactaaaagccgaaatactagaagctaaaacttaaagccgaaatactagaaggtgaagtacattctgaccaaacatgcaacattcagatagaaactaaaacttaagacaacatatcatttattagcttgttcttaagcgccatctctatgtcagataaaggctctgctttgccacaactcatgttttttgagcaaaaatttcagaaaactccaagtgcattaaaagagatatacttgagacagagctggattctacctcttggtaagagctcatgagatagccacatgatagaagctcctggtgttacaaagaattgaacaatataaccacaagatccggtttgaagttgatttggtgaacaatctcatcgtcgatcatcattccggcggttgtatattgagtatatgtggttgctctcccgatttcatgatcaaaacgctggatcaaacaaatcaagctgaatcgcctttggtatcgtcgacgaagaaaccaaacaaaagagagctgagaaaattttccttttgtttaaaacaaacaatctatcacaaatagccacgtatgcgtttctaatgagtttccaaaaacctaattttaggaacgttcctaaaattattgttgaatttttatttaatttaggcccattattctcttagaaaccaactaaaaactatcgatggactcggtcttaatcatccatatacggatggaaagatccgcagtgctcgcgagactaatctagttatattattataaaaaagaatcttctgtcatcacgtacatataaaacatattataagatttttgtgagaccatcttcgagattaacaaggacttctaggcggggctttttttagataaacaaggacttttgaccagacagtgaaggagtcttgaataagaacgatgggattaaagcaccaacatttcttcttttttctttccaatctcaagttatacgaccatggattccgaaggagtgttaatgccgttgatccacaagcatcgtatgatgccttggaatgatctgagaagaggtgattgctgtggccgttttgaatctattggtgatggttattactgcaaaatctgtgatattttcgtccacaagaaatgtggcgagtcctccgaatatatcgagcatccatctcaccccaatcacactcttcagcttctaagtactagaggaaatagccatgactgcgatttatgtgaaaggtacatcgcgtatctattattctatcgttgtgagatctgagacttcaacgtggatctatactgtgccaagtatccaccaccagaggttattaacatttccaagacgcatcaccacaagctcaaccttctcaaggagctgatccagtttgattgtgatgctaagtgtggcactaatgattatgggtttccatacaaatgttatgaatgcgatttattcttccacaaannnnnnnnnnnnnnnnnnnnnnnnnnnnntcacactttagaggtaaaccactcttaccacccgtggcaccctcttaagcttcacactggtcaactaccgaattattctgaccgaaaatgtcgtctatgcgcaaaagaaattgaagttggattgttttatcattgttctttgagtaatttcaccttggatatgtcttgtgttttaaatccaccacaacgatatctttggaatttgaaagctcatgaccaccaactcaccctgctcccaagtctccgttctttttcatgtaacgcttcgggttgagtggtgatcgaagcccttacatatgtattcaatgtgactttatgatccatcaagattgtcttgaccttccacgcctcataaacgttaatcgtcatgatcaccgagtttcacgaacttctgttcttggtgttgtaaattctgtatgtgcagtttgtcatcagaaggtggattggacttgtggaggtttttcttgtcagaggtgttctagctatgttgttcattcgaaatgtgcgaccagaagagatgtatggaacgggaaagaactggaaggagtacctgaagaaatagaagatatagagccatatgtggtaatagatgacaatacaatacaacatttcagccacaaagagcattacctaagactccacgttaatgatgttctatgtaacgacaacaagcggtgcaaggcatgcacccatcccatctttcttcaatccttctacagttgtatggattgtgacttccttctccaccaaaattgcgctggatttcctagaatgaaaag

SEQ ID NO: 37899 - DNA, 3487 bp, Arabidopsis thaliana landsberg
aattcttggaacatttctactcaaacaaaaaagaagagactttatccactaaccttgccagatcgcttgagatgagaagcataagccttgacgaagtcatgaggcgagacgtctttcacagttttaccagttgccatggctcaagttatcaaaagactaatcactgatcttcgtctgggattttgcccaacgcagctgaatctctctccgcaaagactagggtttttattctccaataacaaaacttatatatacggccacgatatttcgattagggttttctccccatatccgggtcaaaaaatccaacccgttctcagcccacactaatgggcctaattcttcatacggccttactatctaaccagtatgaataatgttctttgatacgataatgggcctactacggccttattatatcagttgactagtattatgtcctaaacgacaccgttcttaattagtaacattaaatgacgtcgttttataatcgcttaaccactggctattagttcgcatctcaagtcgtctctgccatttttggctttttaatcaaaccctagagagattgagagagcgaagagaagccatcatcagccatggcgatgaagaatctactgtccctagctcgccgatctcagaggcgtttattcctcactcaagccacacgatcttcctcttcgttttcagctatcgattcggtgccggcttccgcatctccgacggctctatctccaccgccgccgcatcttatgccatacgaccacgcggctgagattataaaaaataagatcaagaagctcgagaatcctgataagaggttccttaaatacgcatctccacatccgatcctcgcttcccacaatcacatcttgtcagctccggagactcgtgtcactaccttgcccaatggtctacgagtcgctactgagtcaaatctctcggctaagaccgccaccgttggagtctggatcgacgctggatctcggtttgagtccgatgagaccaacggaacggctcattttttggagcatatgatattcaaaggcacggataggcgtacagtgagagcgttggaggaagagatcgaagatattggtggtcacctgaacgcgtatacatcgagggaacagaccacttattatgctaaggttttggattccaatgtgaaccatgctttggatgtctcgtctgatatcctacagaattctaagttcgaggaacagagaattaaccgcgaacgagatgtcatcctcagggaaatgcaagaggtatgtatttgttatctctgtacttaaaaaactaaactttttgttctgtcctcgatttatctttcgtttttttttagtgaggtggtactatggaccgtagtttgtgtttttttagatcaatacccttagtttcagtttcccgtgtgcctgcctaaaaatgaaaactttagtatgttcttaagttatcttccctttttttaaggttgtattggcataagcacatgttctatagagagatgttattgtgtttatataaaccattgctctaaaaatgaaaactttgttctgtttttggattatctctcgcatgttttggttttattggcttagtcatatgttggtcgtattgttgttgggaaatgtgcatgaagggagatactagagcgcttggtactctgctctacgtgttggttagagttatttgtttctttaatcagttaaagatagaatacacattaagctttagttttttgataattggtttggtcgtaggtggagggacaaaccgatgaagtggttcttgaccatttacatgccactgcattccaatacacaccccttggaagaactattttgggacctgctcagaacgtcaaatcgatcaccagagaggatctacagaactatattaagactcactacactgcttccaggatggtatagattttggttacttcttatcatttcctacaatcacttattgaattttttaggattcttatcttggttcatccaaaacattttcaggtgattgctgctgcaggagctgttaagcatgaggaagttgttgagcaagtgaagaagctatttaccaagttgtcgtctgatccaacaactacttctcaactggttgccaatgaacctgctagttttactggttctgaggtaaggacacaaccatatgattttgttatatgcaatgttccatctttctaaattctttagtccgtgaaattcttctcaggtccgaatgattgatgacgacctaccccttgcacaatttgctgttgcctttgagggagcattttggactgatccagattccgtggctcttatggttatgcaaactatgttgggttcgtggaacaaaaatgttggtggtggaaaacacgtggggtgagtttactctctggctaatatttctaatgatggatttaatgaaaagctatttcgcaatgtgttgatgaacattatggttctatgtgcagttctgacctgacccagagggttgccattaatgaaatagcagaaagcataatggcattcaacactaactacaaggatactggactgttcggcgtttatgcagttgccaaggtcaacccagaactccatagctatcttagtttcatctctttcttgtatttgtcaatattagcagtttcatctcatgaatgcctcgtattatatctcttttaacatcttgtaaggtacttttttcaggccgattgcttggatgatttatcatatgccattatgtatgaggtaaccaagctggcctaccgagtttcagacgctgatgtgacacgtgcacgaaatcaggtaaacgcccaactgttctttctctctttcccaagattcagctttaagctagttacaaatgtgatctgtttaaagttttttttttcttttcctcctgtttcttcgaactccttacttatttgtagatagattttaaatgccaactgattttaaatttctctgcagctgaaatcatcattgttacttcacatggatggaaccagcccaattgctgaagatattggtcgtcaggtatgcgatgaatcatctaagcatcttaatttagaacttataagtttataaatgcattggtcaaagataacaaaccttgactttccttatagttggtgtttaacttcaaaatcattctaataaaacgcctggatttttgttctaaatgcagctgctgacctatgggcgtagaatcccaaccgctgaactctttgctaggatcgatgctgttgatgccagcacggtaaaacgtgttgccaacaaatatatctatgacaaagtaagttctatttctctctccctcttgctctctctatcctccaaggattagactgctaaacaagagtacaaacgtcaagagtgattaaggtgatttttgggattatgtgcaggacattgcaatctcagctattggtcaatccaagatttcccagctacaacaaattcagacgcagacctactgg

SEQ ID NO: 37900 - DNA, 1491 bp, Arabidopsis thaliana landsberg
atccgcgacgtcgttatatatcgaaccagaccaccaacccatttgctcagtttctactggtgaagcgattctcactaaaaccctcgaacacatcgcctttatctctttctctagatctactcgctatggctactatcaccgttgttaaggctagacagatcttcgacagtcggggtaatcccaccgttgaggttagattctccgatcacttttgtatttcccatcactttccggctttgtacagtattcgggacggatctgtttgttagatgactatccgatgctaaaaccactattcaatcggttttctgtaaacctgaattgatctagtagtcgtacgggaatgagattagcttcttgtgaacgatgatcggtgatttgatctcgcgatctaggatcgtgagttgtcgatgatggagttgattttgtttatatgatttttgcgacggatctatttatttccatctggtttttacgatttcgattgtttgctaatgacgaatttgaaaagaaagctaatgatttctctgatgatgttggtttaggttgatatccacacgtcaaatggtattaaggttacagcagctgttccaagtggagcttccactggtatctatgaggctcttgagctgagggatggaggatctgactaccttggaaagggtgtatctaaggtgagagactgcgatctgttctgtgtgtttttttagtgttagtagagttatttcaattgatcatgttgactgattcgttatttgttaatatcactaggctgttggcaatgtgaacaacatcatcgggccagcacttattggaaaggtgagtgactcactttaagctactctcagaacatcaaatttgtgtctaattctatgcgctaggctcactcattttatttttgttgcttttattatttcttgcaggacccaactcagcagactgctattgacaacttcatggtccatgaacttgacggaacccaaaacgagtgggggtggtgcaagcaaaaggtacttaaaagggaaaattcattttttgtgtattcacttaagaatagaaggcaagtctgaccatcttgcgccttctatctgtgtttagcttggagccaatgcgattcttgctgtgtctcttgctgtctgcaaagctggggctgttgtcagcggcattcctctatacaaggtagaacgatctggcactattaagttgggtccctctgcccatggaagataagattgttactgttctgtgttacttggttctttcggagataaatgttctaagctttttcctttgtgtggtattagggtgcagcacattgccaaccttgctgttaaccccaagattgagctaccagatcctgccttcaacgtcatcaatgggggagcccatgccggaaacaagcttgttatgcgggacctaatgattctccctgttggagctgcttctatcaaggaagccatgaggatgggtgtggaagtttaccaccacttg

SEQ ID NO: 37901 - DNA, 2445 bp, Arabidopsis thaliana landsberg
ctcctcaaaccttttaaaaaaaataatctgtttctttataattacaaacacatacagtaagggaaagataaggtgacagcttttcatctttccacatatatccttagaattatagaacaatagcatcctatagaatttagtttttctaatgtatgcaacaaccatactaagtgcaacgatcaccaaaaattaaaatgtgagtttgtgttggatatttaaagtattttggttgaacagaaaataaagaaggatatagttaaagtattttctttttataaatgataatttgcaaatgtgtttttttatataaaaaaagtgagtgggaaagaaaaatgtgcaaaaaacaacgttttaatctctctggcttttcgactaacctctcttctgtgttgcactgcacctttgtctccacgtcaaaatgtcactcacttcactttggtgacccacttcggacacatctctcattcagtttttacataaaacatacaacagtctctggatatacagctctaggtgcatagtgtttttcaggtttcgtatgaactatattaacataaaagcagtagataaggtaatttctctacaatttggttaaattcattgtgtaaaaagtgaatagcaacaagaattagttttttttctaatgagtttttttttccgggtaaagctccatatattctaataagttttgtatgtctatatatatatatatatgaatcttccaccattccgcataagttccgtaaccggtcaaagtggatttgaaaaagagttttttactttaagataaggataagaaaaagaaaggtgtatgagtgagtaaaaaccctactttattgacaaggttagatgaagattagacaatttaatcacgacattcctcgatttctctttcatacgttgcgttttaggcattgctaagtcagctttgtgtcgaatttttttaattaattataattgattgggttttggaattgttaaatgtgaaatgagcaggttaatagataaggttggttggtgaagtcgactggtttagtttaatttgtgtggagctttctaattttgttatcgattggttctaattaggaataacacacacgcatgcggaaaaatataatatcttatggttgattagtgtaatattgaactacataattagtcgaattggtgtggggctagtttctaagcttcaaggtcgtaatcatagatcatttttgaatttacattcaccgactgtatcttcaatttgcatatgtggaagagcacttttttagtatacgccataagcaagtggacgacttttaaagagagatacattataaaggtcacattttctacggccaacattatcatctagcgacgacgatcggaccaatctaaaactcgctcagatccgcaaatattgaacaaaaatatttgaaattacccccacttgtaggcctaaaaaatgccttgactgatccgaatttacctaaaataaaattttgttcagacaagaaaaaacaacccaaattttgtttttctaatggtcacaactcaaaattgtatctcgtgttctgatacctattatcaccgcaaaataactttcacggtcgatacggaattcgaacattttgatttaaaaaaaaaaaatgaatatcaccaaggcgtaattaacaggtaacaaagaatgtaacaatttcaggaactgataaagaaaataagaattgtagtgttttttcctcttctatcaatttattttcatcgtttctggtgtaaaacgtaaacccagtttcagaacagtcctttgtgctccatcagctcataactccgtcttcttctcctaattccctttttttggggggttcctgattattattattattattccgataacagataaaataaaaacatgggctcgatcaatagacacgagctttgggagggaaagtgtcgatctcatcgtcgagagtgtccatgtgaacaggcctataatccaatctcactttctcatcttcccaatatcccaatgtatgcttcatccattctccatcctctcttttctgcatacacacgcattcatttatactacgttatggtttcatcattatgggataatcaatcattgtggaaaagctgagcaaggaatcaaaccgtgaaatcctcacgagcatgtgctcctcgactctccttcctagcctcagcagaatgcattgttatgcatgcattaaccaaaagattctctagctccatagtttctatcaaatccgagttcctaaaatgcaaagtttccaattacataaactttagtaattagcctaaagactagcttttcaacgttttaaagtaaagtctcaccatatcatactccgatcagtcactttgacatcaccaaaactgtcccacgtcttatcaatcaaatcacaacctataatcataaccttttaccaataaattcactttaaa

SEQ ID NO: 37902 - DNA, 3127 bp, Arabidopsis thaliana landsberg
cattggcctggtctgacacctctttatgagaaagaatcaagttcaggttaatggtccaataaaggatagagttgtcatgggctcctacaaaaattttctaggggttaagcttccggtggatggtccaggggtaccattcaagggtgccagactcttgcgaccctgtagttacccgcataaggacattggccacgggcaagagtccgaattttagaaagttgctcgaatgcatggccaattgacattaagtgcccaaaacacaatgaacaatcaaagggcaaagatgggcaagtttgggcacgaatggacaagtttgggcaagatcgggtgtaccgtgggcgaagtttgccccaccggacctttgaacgcgccatggacgggtggctcggctaacttggggcccaagcaaagttgcttggagccgaatttgagttgcgtggagccgaagtttgggtggccacgtgtcgctcaaccgctagagcgacgagcgtgtcatcacgggccgatcgatgaactttccttgacatgcccatgcgcctgagacatggacatgctgactcgccattgccttgcctatataagaccaactcaaccccaattgttttgtgaagagaaagtgagcaaaagtgagaggctgccgagtgaaaaccgtccatcctattcaagttaaggtcctgtagccgaaaactctgcccgaatcgttgcccgcattctgttggttattcagtgagttctgggtaatggtttaagtttaataatcatattctcatgcattcttgattgatttcgtgagttatatgaatcatgtgaatggttatattggattgcctatgtgatctttagattcttatcctattatttatggttgggaggttgtgttgggatattgatgattctatgtgtttgatttaaccatatgatttataatatcttaaactttggggtcttggtacgtggtgcttgtggtaggaggcaacgaccataagcgtgccaagatcgtgatatgtctaaccttcgtagtgaaccgtgctatcgtggggtcttgtaacgttgttacttgatcgtcatgtagtgcgaagaactcggagtgacagggctagctaccctggccgagtgtctacacgacggtatagcgtttggtactgatgctccagttgcatacctttgtggttgtaacacaggagatcacgggagtgtgtgtgtttggtgttgggtttgaagacagcatatcgggctgtttaaaacttaataaaactggagtcttaatgcatttgcgtgattttgtagtttgtttcgacaagctacctttcattgtcattctctgttgcgtggttcatgttgggtattcgggttggggtaaactaatgtctattgcagggaatccatagctcactgagtaatctaagattactcatgattttacgtattttgcaggaaacccatagtgggggatagagggcatgggggacaataggaaacccggagtgggtttgtgccttttgtaaaacaagtatgtttctattatgtaccgtgcttttggcactaagccttggccataaaacttataaatgtttggtaacatgttgtaaaatttatacttatgaaataaatcgggtttcttgtacaaatttacgagtaatgacttataatgacttagtccgacttggcacaacacttaacatcgtaaaggttagcaagcctaaacgatattctaagtgggagagtggtcgtcaatacgccgaccaagggttgggattggttcccgaacctcggttggatgttgatgatcaatctcaatgtggcgttttcggggcgcccgtgacttgtctggtcatagagcgactcaaggacgttacaacaaccccctctcttttattttggtcctagcttcactctcttcttaagaatttctctgaactacttttctccttgtggattcgatcctaaaatactactttgatatactatgcacttgtagtagtcgtgtggtctttcaggtaaaagcctgaggcgaaataaaacacacatcaagctttttggcaccgttgccggggagagattgttagtttcaccaagtccgagaactagagtgaactctagtacacttgctttttaattttttgtttttgtttttctttgtttcaggaagcttaaaggatgaattcaagaaattatccgaatagctactacccgaatgtgaatcatgggtcaaaccgtggatcacatttctcaactgaccacaacacgcctgatgcatcccaaatgcatggcgagtcttggcaatcttggctgtctaatggaggagcttttgggccgatcactactctaacgatcaatccgccgccttcattcagaaccgcccacaagctaacccctcggttagcccattcccggaggtcaacgcgtcggaggacttcactcttctcatccttatggagttgcccgacatgaatatctcggatatgaccaaggatacctgcaagaggtgatgagtgtagatgttcatctgaacaactatgcttaccaaactaatgagccctaccggaccgccgaggcgaaagatagactcattggtctcatccgagactttggtgtagctgttcatccgaacaactatgcttaccaaactaatgagccctaccaaactgctgaaccagaagatagactcattggtcttctccaagactttgttgatagccatcaagaagatgtgaagagaatcaacttaaagctaatggagatggaagccaaatttgaggagaagttcgatgacctcactaatcgactcgaacatatggtggggacacttgttgatatcgataacactctcctcaatcatcaagacgatctccacgaccaaaacacgagaatcgtcaatgttggatttgttgttgatacagttgagagtcatctgaattggaagatggaggagctagagaagaagctcaccaaatcaaacgaattgtcggaatggaaaagcaaccaatcttgccaagaagaagatgagtttcctaaggcccaagcccgatatgaggaggaaaacaaaaaaagacctcggattcctagtgcaaaaaggataagataaaaattcctattccgaaaatggaaatcttgacccaatgaaaac

SEQ ID NO: 37903 - DNA, 4577 bp, Arabidopsis thaliana landsberg
aaactaaatcgcatcttttgaagtttctcatctcccaaaaatgttattcctttgatctttagatacaaaacccattcaatgggtctcgagcgtctaagcccaagaaatccagttaaggtataaaattctcaatattcaattccataatcctttctttcttttagttgcttaaattggtaatggtttttgcagaaagaatcttggtggacggttctgacattagcttaccaaagcttaggtgtagtctacggagatttagcaacttcaccattgtatgtctacaagagcacttttgctgaagacataacacattctgagacaaacgaagagatctttggtgttctgtctcttatcttctggacattaactttaatcccacttgttaaatacgtttttattgttcttcgtgctgatgataatggtgaaggtgggacttttgctctctactctttattatgtcgccatgctagaatcagctctttgcccaatttccagctcgctgatgaggacctttctgagtataagaaaaattccggggagaatccgatgagattaaaagttccggggtggagtttgaaaaacactctggagaagcataagtttctgcagaatatgttacttgttcttgctctgattgggacttgtatggttattggtgatggtgttctcacacctgcaatctctggtaaaagattgtttcctttttgttagatttgtgtggatttctcaagatctttagtagttgatggttttgtattatttttgggtgtgaatttgcagttttctcagcagtctctggattagaattatccatgtctaagcagcaacatcaatgtaagctctttacttcttttgatcaggatgtaaaattggaatttttagtatcactagatccccaaaatgtcaaattatgctatttttagtgttttcctctgaagtttagtccatactgtttaagatagtttaggagcaggatttgctgcatcaggtagttttagattagctattttggtctttcttttgtccacatagtcaattggctaattgcatgttaggttgaatccatgtaggatcaacaagaagcttcttaattatgtataaaataagttaattaacttttttttttggtgtggaaggtgagtctgatgcagatgcattcttataatcataagataatgaatgtggtttaggagttaataatttattaaagatataaaatctaaaggaatataaaagtcataaagcttataccttttgaaaactcaagtggtcaaagaaaaaggtagttggtttggataagaagactatcaagtcataaagttcttatgaatttgaagtaaccttctttatttgaatcattaacctgcacaattcttgcagatgtagaggtgcctgtggtctgtgccatactgatactcttgttctcgctacaacactatggaacacatcgtttaggttttgtttttgctcccattgtgcttgcatggcttctctgtataagcaccattggtgtatacaacatcttccattggaatcctcatgtttacaaagcattgtctccttattacatctacaagttcctcaagaaaactcgtaaacgcggatggatgtccctcggtggcatccttttatgcattacaggtaacaaaagagagaaagaactgttttgtttttgagtttcaaagcttttttcccataaatttgtttctgtcctgttttcgcaggctcggaagctatgtttgctgatctaggacacttcactcagttgtcaatacaggtaaagttttgtaatctttgaatattttgtgttctgttgttagctgtccctgaaacctgcatgttttttttgactccctggctgcagattgcattcacattcgctgtttacccgtcgttaatcctcgcatacatgggtcaagccgcgtatctatctaagcaccatgtcctccagagtgactaccggattggatgctatgtttctgtaccaggtatatatctactcatcatcttgttaaccagctaaaatgcaattctttgtttggcatagtttttcactagtttgtttgttgtgtacagagcaaataagatggccagttttagcaattgctatattggcagctgttgttggaagtcaggcaataatcacaggaacattctcgatcatcaagcaagtgtacttctctaggttgcttcccaaaagtcaaaatcgtacacacttcgtcgagaatgcatggtcagatatatatccctgagatcaactggactctcatgctcttgtgcttagccgtcaccgttggattccgcgacaccaaacacataagcaatgcatcaggcccagtccctgtaaccatagccataaccactaaactaaaaaatgtatgataatcaagaaactctccggttctgatttttttcttctctgtaatctgtatgcaggtttggcggttattgccgttatgctagtaacgacttgcttgatgtctttggtaatagtcttatgctggcgcaaaagctccctctacgcactagctttcattttcttcttcggaacaattgaagttctgtatttctcagcttcactcatcaaattcctcgaaggggcttgggttccagtcgcactctccttcatcttcctcctcatcatgtacgtttggcactacggaacccttaagcgttacgaatttgacgttcaaaacaaagtctcaatcaactggctcctcacacttttcggctcttcaaacctcggaattgtccgagtccatggaatcggcgtgatcaacaccgaacttgtctcgggcataccagctatcttctctcatttcatcactaacctcccggcgtttcaccaagtcgttgtcttcctctgcgtgaaatctgtccccgtcccgcatgtgaaaccggaggaacggtttctagtgggaagggttggaccgaaggagtaccggctctaccggtgtatagcccggtatggataccgcgatgtacacaaagacgatgtcgagtttgagaatgacctcatttgcagtatcgcggagtttatccgttcagataaaccattgaattactccccggacccagaaaatgaatctggaataaatgagaggctaactgtcgtcgcggcttcctcttccaatcttgaaggcgtacaaatctatgaagacgatggttctgacaaacaagaaccatcttcttcttcggaggtaatcatggtggctccttctccgagattcaagaaaagggtacggtttgtgttaccagaaagtgcgaggatcgatagatcggcggaggaggagctaacagagctcactgaggctcgtgaggcaggaatggcgtttataatgggacattcatatgtgagagcaaaatcgggatcgagtgtgatgaagaagatcgctattaactttggctacgattttcttagaagaaactcaaggggtccttgttatggtctctctactcctcacgcttctactttagaagttggtatggtttatatcgtttgactatacttttttcttttttgttaaatctgaataaacttcagttttgtaaattatggtaagataaatttgtcagagttctttttcgttgttgttgtaatttttgtgtagagatgttagagttgcgtgtggcataagtgacatgctttttgtttttgtaatgacttgtccctactgattaggattcaaagagaaaaggattgaagaataagcagacaagactgagcatatgattcttgtctctttatgtttctttaactccaaatcttctcttttgtcggtttatctcatcatatatgtaagtgcatagaaacacatatacatgtacaattgcatatttatctactctctgaacttgtgagcaactcttgctctgttttccttaaaaaaatgaggaaaaatgcaaatttgttgattttgtttatgattttcatgtttttcttttgtgggttatcctcagtttcagctaaacctcctcctgttagtgagttgtttattaccctaaactgattttctttatataaatacaagttttcacttttgttgtaatgaatgtctgaaaatgttcttgtttttctctgttttgggaacagagattgtaagtgggcttgtgacaaatgtagcatcgatactctggaaatggttatggtctcttcaaacatccacaaccacaacaaccaccacaaaatctggtaagaagacccacaaacaaagaagtgtataatgatcttgatttcaaagtttcaattgcaaaaataaagagaaacttgaggaaatgtaacaggtgtttctagccgttcgatggtgaaatacgaaagtggatataacatggagacagtttttgatggaagtaagcttgggattgagccctatgcgattgaagtttcccctaatggaggagagcttattgtcttggattctgagaacagtaacatccacaaaatctccatgcctctttctagatgtaagttcacttcatatctatcttgcatttgattgattataaagaaactcttaagatcgatttttccggacacgtatacaatttattttatgggatattcaatcaattcccat

SEQ ID NO: 37904 - DNA, 1042 bp, Arabidopsis thaliana landsberg
tacactttttttcttggttttgtttctcaggatgccaaatatagagaaacttgctttaccaatctggtcctatcaaaacgacaagtcattgcggtttgcattcagtcaatggaagaatcttaaaacattgatcatcgctcatgaacactctttcaccccgagtttcgactttaaagctgtgggggagagctgtagtagcctaaccaacttaaaatatttgggtcgtttggaagaatacacgtgcagggatatagtgtgttacctccgtagcctcaagaggttgagtttacgatgctctttggtcagttctacagcagtttacaggttaatcaacggccttccaaacctcacgattcttaatgtttcacattgcaaaaacccgtatgattattttcttcctatagcgaaatctatagacaattatgttataacagccgccactcagaagcttgagaaatttatcacatgtcctcacgattgtatgatttgcaaagatcgttgtcgctactcattgtcttatctcgctgaggtttggcggaatgatgagataaaggaacttgaattctgatatttctgaaaagatttgttggctgttttttcagaaaacgttaccgattctatttcacaagcaatatttttcttatatatgtgcctcttacatataaaaacactgctatatataagatgtgtatgttactatatgtttcatttgataaaattatgttcatgttttgaaaacgtcaacaaagaacaaattctccgggttcatgctgatcaggagggatatccaaaccctctagacagtacagcagaaccggcttaagaacccaaatacatcaacccacaatacgaggttaacaatgttatgtgaccggaagcctcctaacaaaaaagagtcataatgggataaagcttacactacagtcaacgaaattcgagattctatatcctggaacgggctcgatgtggtagcatcgtgctttagcacgatcaaggatgctcagcccatctgccacacagggtcatgtaccaggagaagatt

SEQ ID NO: 37905 - DNA, 2268 bp, Arabidopsis thaliana landsberg
atatatatatatatatatatatatatatatatccgttggtatagttctctgggattctagttctacgcatgcggtcttaataatttgttcaacctcttctcatggtatgtgtgatttgaatgttatttttcccattttcttgcatgcagatgattttattgcaaatagaaacgtattttgtagttttccctttgttattgcttgtccgatatttttcgatgcgaaaacattcagtgtagttttcgatggagttaagaagacaactttatcattggtccatccatgtcttaatctattagctgtgaaatttcatgttttgacggagacatagatttaattaatgtatccttgtactttattccttgctaattccttcttagagatagattgctccaaattacttgtcatatagataaaacgattctgattattctcaaatttgtttaatacgaaaatgtataaagaaatgcaacaaatgtatttacattacaattataattactagataatttttcgtttttttctgattgctaaaagttattctatttatgcgactaagaaatatgtatatgttacttgtatgatagagatccgtttgagcctactcaagacttaaaatcgaactagcatatttcttcctcgtagattatggatgagtctgaagattagtagagcccctcacgaattttccatgaagagataaataacaacaaatcaagcttcctctcttgccatcttatcattctagatcgctgaatatttttacgccacacaattttgtgcgaataagacttttgcaagttggcttatataatagagatccgtttgactgtttgagtacaagaaagacttaatagagatccctcatttttctgctaagaggacattttatatagactcacgtggtggagccacagagaattagccgcccctcacgaatattcttcccatgtttgtgttgctagtcttcttattctaagtcaatggagttagtgtactaatctaatatatatacaacaaacccttttatctgttttgaataccattgcttcatatagctctctaaaaaagctctttgttcgtctctatatcatacgaataatggattcttattttttccttggcactgttgttgttgttgctcttgcaatctacacgcttttgggaacaatatcttttatggtttatagaaaattcaggttacaccaagagaagaacaacatatcatcttgtttttctttttcatcttgcttttctttttcatcttcttcatcgacttcgtcgcccggtcgtaaacaccaagtctttccaagtttccacggggcagatgtacgcaaatcctttctcagccacatcatgaaggagttcaaaagcaagggaatcgacatattcattgataaagatatcaagaggggtaagtccatcggtcctgagctcacagaagctatcagaggatcgagggttgcgattgtcttcctctcgaggaaatatgcttcttcgtcgtggtgcctgaatgagttggcactgatcatgaagtgcaaaaaagagttgggtctaacagtgatgacccttttctatgacttggacccaaactgacgtaaaaaaacagacatgcgattttgggagggctttcacaaaatcttgtaaaggtaaaacaaaggatggtattaggagatggaaaaaagctttggaggaagtcgccaaaatcgccggttaccattcaagcatatggtaaaattcattaccttttgaatgtgtatatatatgtgcaagcaatttttcatgagtgtgtatgttgataccaaaaaaaaaacattatgaatatttttaatttgacatacatgtgttatagacttatagtattaatattttgtatttttttgccacttgtcttttagggataatgaagcggacatgatcggaatagtcaccactgatatttcaaatacgttgaacatctcaacgccgtcaagtgatttcagcgacttagttgggatggaggatcatatgaaaaaattggaacgaatgttacaacttgatctggaagaagtgagaatgatagggatttggggtcctgctggtattggcaagacgaccatctccagagttctatataacaaactctttcatcagttccaactgggcgcaatcattgacaacatcaaagtacgttatccaagaccttgtcacgatgagtacagtgcaaagctgcagttacagaaagaattgttgtctcagatgataaccagaaagatatggtggttcctc

SEQ ID NO: 37906 - DNA, 2616 bp, Arabidopsis thaliana landsberg
actttttttgtctcaatgtgcctgaagataaattgactggaaaattatcttgtccaggtgcactacaagtttgaactgatggaggaaactctttatctcacaatcaatgtcatcgacagattccttgcggttcatcaaatcgtgaggaaaaagcttcagcttgttggtgttactgctttgttgcttgcatgtaaatatgaagaagtttcagttccagtggtagatgatctcatcttgatctctgacaaagcttactctagaagagaagtgctagatatggtgaatacacaactttctcttgatcattaactaccatatgatgatgcttcatagttgaatttacctgtttttggtttctattgcaggagaagctaatggccaacaccttgcaattcaatttctctctaccaactccatatgttttcatgaaacgatttctcaaagctgcccaatctgacaagaaggtatatatctccctaactaaataagcttgaatcattatgtccggaaaccatcaggcctaatatctaaatcggtgtggtatatgcaattgtggtttcagcttgagattttatcattctttatgatcgagctttgccttgtggagtatgagatgctagagtatcttccatctaagctggcggcctcagcaatctacactgctcagtgtacacttaagggatttgaagaatggagcaaaacctgtgagtttcacacaggctacaacgaagaacagctactgtaagaacatacattgatttttttgaaaaccccatgacatgagattttggtatcctgacagtgggtttttgtgtttgattctagggcatgtgcgagaaagatggttgctttccatcacaaggcaggaacagggaagctcacaggagttcacaggaagtacaacacatctaagttctgtcatgctgcaagaactgaaccagctgggtttctgatttaatattaataagaatctaatatgacttaactcgagtttttctttagaacaaaaagagtgtgagagaaagagagatagtagagcaagttgcccaaatgggagaagaatggatctttagatatcatggcaagtagcccaaaaagagtgtattcttctctttttaaggtctttagatctttcttcacttgagagagaataaaaagaatcttctgatatcatgctttcctatattcaacttgtgaatcaattcttgtatagactcaggaaaatctatgatccagtttggttaatattactcgggagctgaacctctagactgaatcaaatattcttctacatgtcgttttggtgtctgctgtactctggaactaaacttttatagactaaatattgtacaagtcattttggaaattttttggataatttgggaaaatagcagtagacaaggttttacatgttgaaaatacaagtacaatattattttctagcttatattattaatgttataaatgaccaactttgttttctgatcttagtcttattaagacctttatgaaaacaatgtactttgttttactcatctactgtcagaaatggagaatacgcaaagaagaaaatagatcacaacgaaaacttgtcaatgattcaaacatcttggtaacccaaaatacagaactagtagtgcatctggatatctctctctcttgtttggttttacagtgttctctaaagcattaatgacagaaccaagaaaggcggctttcacctggatatcacagaaagactatcccagaatcaaagcttacatgttgagcgtaaaatcaatcatctcctcacaggtggtaccgctccccttcctccagttccacgcccgggcccggcagccggctttaagataatatcacaaagattcaagaatctaaccattagtagtgacaaagaagaaacaaaccattaagggataacaaggatttgaacatcttaacaagttccataaaacttcctaacattgcattcatgagcactaaatcataagagagagagagagtgaacttactttccctcgcattgcacctctacctctgccaacacccagtgatgaactctttccctacattgattaagcaagtaaggtaagatgtttgttggagatatgtatagagattctaatatcattctgcatccagggttcaaaaagcatatataccttgattctagcatctaaccgcttgaacattggagcatgtttgagaatgtctggtatgaccataaacctgtcaagatatatccgcaggtcaattactaaacagctagggttaacaagaatgatcccatgaattacataaacaaggaaacaagtacagcacctgactttactgcctcgaatgaagacatgctcaagctgtgataccttaccatcctgtaacacagcattggaaaacccaaaacaaaagttcagtgacaattaacaaacaaacccattaagttgacagattatttatgtatactatgaagaataacacttaaagagttaagactttctgaattgagaactacatgtagttcttttcccaataattacaggttgactcaaaacccatacggcacaataatccgcaaataagaggaaactttaagacctgcatacttcagataattca

SEQ ID NO: 37907 - DNA, 5146 bp, Arabidopsis thaliana landsberg
tctacgtcagaaataaacatgggccattcttctttccagtccataacgggccggtccgctaacgaccgcgggcgacaaaacgaagcccatacccgccccgcattgcccattggtctaacgggccggcccgcgggctatgacatatgcagagctaatcattcttctagttacagccacaaagcgattcttgcctttgtctttggattcttgtatcatattgtatcacagcaattagaacaatgattcagacaataaaactaagcttatcaaagaagcacaaaaagataaattgatattaccgtgagttgatatctcattgtagaaatcctccatgttctcagctgtaagttttacttcattgtaaacttcaagatatgagcaagtcacttcaaactcatctgagctcttgtcactcttgatcatatcaaatatggtattcaagcagagaaccatcaatccatgatgactccgagttccaaccaaaatctgaacagaaataaaacctgtttcctgattaaagtgccacaaagaagctgttctacttaaaaagttattgtaattggcaaaacttgaatagaaacaaaaagtcaaactgaaactgaaaataaaactaaaactgaaagtctgaaacataaacaaaatccaaactaaaactgaaacataaactccaacttttaagttggaacatttaactcaagtacttaaactgaaacattaaactaaagtcataaactgaatttcaaagctgaaaacatgaatctccaactcaagttgtctcttcatcaatattaagcttcatcgtcaacaattgacacaaaagaaggaactttctcatcttcaagttcaccatatactttagtctcctctacatatgtcccataaaaataacaaaatcaatgcatgatttataattttgtaagcgcaaaaattatgaaaattatttgcttagcattttcatatgcttcaaaaccttttaacccattgcggctgcatattagtgattgaacatgtttcggtagaggacggcttctatacttgttcaaaactctagctccaatactaaaagaggatttagaggctactgttgtgattgaaatactaaggaggtcacaagccatgaacgccaatgtaccatagcgttgagtgttatctttccaatagttcaaaatatcccaactctcaaaattgtttgtgtacaatggaggttcatctagatacatctccaaagaagactttgcactactaacaacagtttctttgcggaaggcaaaaaaatcctgcgagattacacatcaatttcagccacaaaaacactaaagaaacaattactaaaaccacactaaaaattggaataaatgattgattacgtacttcataattgccaaaacacttcttttgttctgcattcttcttactttgctgattggtttcacgtgtctctgtagacgatgacgtgaaaatggacttgttctcatatgattcaaacaaagtcttcagcttagtacgtaaatcatcaatctttatcttagcatcactcttacccagctttgcaaaacaaaagtctacaagtgttagcttgaaccgtggatcaaacaccgtagccattgcaaagacatcaccaatttcttcccaatacttatcaaatctttctctcattgggataatcatttttctgatgatttcatcttgattactcgtatttgataccaaccagtcattgatcttccaaacttgcatgaaatacaagtttgaagttggatatgaagaaccagaaatcagattagtgatcacatcaaaaggctctaaaaattcacacacttgcttcaataagtgccattcttcttctatagggagagaattgtagtttctcgcatcaatgactttgagattagtaaagccagctcgatacttgagtgctttatcaagcatcttgtatgtcgaattccacctagttgtcacatccaaaatcaaacccaccttaaccttaatttataccaacaacttccacacattttgtaaacaatatctcacgtttttcagaatcttgcacaaatttgatactctctctgatcttatgcaacgtatgccctatgtctttcaaccctatctgaacaatgatattgagaatatgtgcagcacatctcacatgaacatattctcctttacataacaaatcattctgtaacataagctgaaatttcaaaatctcatgtgttttgtcattgttagtagcattgtctaacgtgatggagaacacttcttctcaattccccaatcctgccacttctgtagaatcaccatggctatgtgcatccatgtatctggaggcttgaaagcaaaaaacgcaataatcttgttgtttaatttccagtttctatcaatgtagtgagctgtcaaacacatgtagccttcttgagtagttgcagtctacaaatcagaagtgaaactaatcctgccaggaagctgagctaattctctctttaaattctctgtctcattctcatacaacttcaaaacgtcagttacagttgtgttccgagtaataaacttcacatctgggttcaaatatttccacactgatctaactctctcatattcaacatacgcaaacgggagatcatgctgaatgatacacttggctaccatctcacgaaaaaccagatgatctattttcctagcttataattttgcctctgcattgaccatcattttaccaatatcagcattcctaagccgaatcttacacttttccaagtgacgattgtaagatttagtaccgtttttgtgtggatcatatgcataatcattcttgcagtggttgcattgcgctctttctacttctttcccagtcctatctttcttccatatcacagtaaaatgttcccaacaatttgcatactgctttctcttcttcggttctggaccttcctgtgctgatgtctttcctttgacgttgtcgtcttcgtcatcattatcattgacatcatcatcctcaatatcaattgttggtcttttacgagatttagatgtttcagctccatcaaatctactttgctcgttttcctcaaatctactacgatggatttcagcttcgatggatctttgagactctaagtcaattgatccaaactcagaaaaaccttctgaatcctataataattaataaagtacaaaacaatgaataattgtcgacaattttccaatcaaactacaaaattgattcataatcaataaaccagcttaccattacgaatctatatctcacagactttgagattttggtttgaaattcttcagacttggagagtttgagaagttgagactttgtgtcgttgtcgtgatcagtttcttgtcaaagaaattatgctaaagtcgtctagggttttttttccttaaatactaacttcaaagcttctaaatggtacaaaaggtttgttttctttcatttagttaacgacgttaactaaacaagttcatttaagttaagtgattaagtcaaaactcaaaagcacttaacttgaactgaaactagtttctaaggtaaaaaacattacaaaacgttttttgacattaagtcaattctaagacaatttaattgtggatgatacagagagtttgatgacataaagagagcttagaggtttaatagggtaattcttaacacatggttgtgagatttaagtaataccaacctttgaccaagagtagataacagaataagacacgaaatccaatccaagaaatcgtttaaagttgcagaaagtcccataaaagataatcaatgcaaagaataaagtcgattcaaaaacaatgcggctaatgaacacatatgaagcttaagcacgacactcagcaacatatatatgaaagtgaagcttcattaacaagacacaaaggtaccctactacacagggcatatctccaaaactagatgttgtatacaactacaattctcgtcttctataaggaaacacacagagaaatgcatgaaagagtgtggaatcagtaccttctctttgacagcttctccctatctgaaatttgttgctgtttctgagacgagctagtggctgaatctattcataccagcatatattgggttcttgctccatctttttgccttctgcaactgcaaacaaaaacaagaaacaactgcatatatgaatcaaatatcaaagacctgttagtcaatttctgattttgcataataaagcagaactgtaacttgctaagctcattagttctcgatcacaagctaatcatgtgtttcctagtagtccagacatcaacaaacataactgagaagaagaaaatcgaagcaagaccatgagttggtcaactcgatgaaaagaaaattttgctgcttgtggcgacaaagcatcattagagacaacaataaactcaaatcaaagcttaaacccgattcgatgatccttaaattccacggaaccaaagagagtatcaacttgttttctcgttaaaaatcatgatcagttttgagttaaaaaaaaatcagaacagtcacaatcaaactacatgataatcatagagcagtcaaacaaataaggaatacaaaatttcatatgattaataaccaaaaatcaaaccgattagcagaaatttcatcgaagaagaaggtaagtagtacctgcgatgattgaagccatccatgaacagaaataaagcttgagtagtcggatcaactaacaaaaaagtaatagaatcggagaagcaaagtagaagataagagaatataaagaggagaagagccaatgtttcgtagaagaagtaggaatttattgcttacactcttcctcctcctctcttccgttgccgggaaattactcatcgagcaaacgcttacccaaaaaaaaaaaaactgagaaagagagagagaaaaaatgcatatttaattattttatttatgtagtgatgacaatcaaaataagtaatcctacttaattagagtctataatttttgaaattcgtttattttttcggcccaaccgttgacacgaacctaaaccagcttttgatggacactgataatttgttttaaactctacaaggaaaaatataatgacataaaatatgttaatatttacaggaagtttatctatatgtcctatggtcatatgtaatgtat

SEQ ID NO: 37908 - DNA, 3091 bp, Arabidopsis thaliana landsberg
  unsure (1)..(3091): unsure at all n locations
attacaaaatatgatgctttacttctctgggtggacttcaacaaaattcgacagaagaaacctctcacgctctcttcaagacgaaatcaaatcaacgagaatgtcccacaaaactcagaaacgaaacgagaacgcccgtgttggattgaatcgaatacatcgcagggacaatgctcagatatctccaaacaattgaatcactggcttcaattcagaagctgaaactctccaagcttcgaatcgaggaaatagaatcgaaaccaccgcggtatccctgatgattcacggtgaaattgcagacgatctcgagagagaattagagaatctttggcgtttgatggatatatgaaggagaaaccgatggatatcgcagaaacacgaactctagggtttgaagaggaatagagaactatcgtaaccgaatccaaaagactcttcacctaattctcttgcgttttggctccttttacataaatttataatgggccatacagttcaattagagatgttttatgttgtagcgaaggcccaatacataaagctaacggaaaaaggcccaataagggctttctttgtctgatggaaaccctaattcccatggagccatctatttaaagcacaaacctaattcgaagaaagaagtgactgcgacgccggaaaatcgcaatgggtatgtttctcactattatctctctctcagatgttgtttctgtattgttcattagattctagaagttcatgaaggatgaaatatgatttttgattacaggtgcgtacaaatacgtgtcggagctatggaggaagaagcagtcggatgtgatgaggtttcttcagagggttaggtgttgggagtatcgccagcagccttccattgttcgtcttgttcgtcccactcgtcccgacaaggctcgtcgtctcggctacaaggccaagcaggtctttttcttcttctcttcattttggttatcaatttaataggtttaggtaatgttgttgaatcaagccttatcgattgattgctggttaagcggtgtcttgatgcgtagtcatttatgtctgcgctttatgatagaatacttcctgaacccagctacatagattcattcttctgactgaacagctctttatcttttgtggactctgttcctgtctaagattgatacattttttttaagccctggatcaaaaaaattgtacttttgtttgatgagttattcactctctgtgttgctgacttctctttattctctgtattaggggtttgttgtgtaccgtgtccgtgtgagacgtggtggacgcaagaggccagtgcctaagggtattgtgtatggtaagccaacaaaccagggagtgacacaactcaagttccaacgtancaagcggtctgttgctgaagagcgtgctggcaggaaattgggtggtctcagagttgtcaactcttactggctcaatgaggtacatttactaccttctttcagtactctttcgtttaggtgattattctggttagatattttaacttgtcaatttttctttaataggattcgacctacaagtactacgagatcatcttggttgacccagcacacaatgctgtgcgtaatgacccgagaatcaactggatctgcaacccagttcacaagcaccgtgagctcagaggacttacctcagagggaaagaagaacagaggtctccgcggaaagggtcacaacaaccacaagaaccgtccatctcgcagggctacatggaagaaaaacaactctctcagccttcgtcgttaccgttgattgccttttgcttttattattactgttatcatcttctaggttccatgttgttgcacttttatctctctcaggatgacttgtttttgcaaattttggagactatacaattgtgctttgaacctaaattttatatttgctttgcttttttgttgatctcagtctggttttggaatatatcgaggcccgtttgcaatccaaatcccagtaacaataaaaaatagcatttatttctaacttaaatacaaaacataaatgtccagttctaagaaattattagtagttattttctgcaaatatctaagtgtttacatttggttgttaataaaattaagatgatctgattattaaatattctttggtattatgtttgaaatgatacagactgagcaaaattgattatcctctgtcaaacgttagaaaaaagctttgctattatgatggatatctttgacacaatgtctactggcaaaaagcaccagttactgcatattctgttgtaattggaaactaaacactttgttttcatgtatgtgttgtgtttaatcatcaagggaatccgaggaaccctgtcgataatgcgaggcaactggagttccatcccctggagtatattgaaccagagactccaactccattttcgtcaaggtttgatgaagggtgtcaggacgagtgtagtacaagtgctttctctcttcaagtgcttcagctaattcacatctgatgatatccatcagatcttcgttcactaccacaatcaatggtttccctagtttcagtgtctcaaatatacttccagaacctgcaccattgagagttgacaacattatatcctagcatttcgaaaaatgtgtctctggttttgattctattaaatgtaaaagtgctcaactattccaataactaaccagcgtgactaataacaagagatgcagactgaatataatctgcgatacttgaggaaaatgtgaagtaatccacaactaatgatccatccgctccatcacactgagatcagtaatgaaaccaaaaaacacaaatgaaaagcttcataggaatcaggttcaatacaaaattcaacaagagaagagtacaacaacaacaatagaccaacaaaagatgaaaagatacataagaagaaaccagtgaaatttgcaaaaaacaagtcatcttctagatttagtaatgccttaaacccagttttcataatcacattcacatcccaatcaaaagcaatcaagtagatgagtaacaatgtgagtggagaaggtgattaagaagaaccttagttgggaaaaagattcctc

SEQ ID NO: 37909 - DNA, 2088 bp, Arabidopsis thaliana landsberg
gaagctctgtaaaacctaacttgaatagcttgagtcaaaacaatctaatttttaaatagttcccaaaattttatcttaaattactcgtaattacactagcaatccaaagtttatttgttttaataaaatctatttgggtcgtcaaaatggcccataaagcctaattaagaagacccaatcaatttaaaagcccaaatcagtgtgacgtataatatacacgtcacacgtcaattctcagcgtcgttaaagtatgttaacaactccgacaagattcgttgctctaagaatcccattccgatcttccaataagattccgatctccattgctccctctcccaaagtttttcctcggaaaccagttatcagagttccagcaagtctccgatttgtagcgacgatgtcgacccctgccgccgccgtcgacgccaccgtcacagtcaccgatgccggcagaggatcaatcactcacgtcatattcgacatggacggtcttcttctcggtaatctccttgcatctgatcttcaatctccagctttattagatcgtactactgtcactatcgttgtttagatttgatggtttttttagtagtgactgtttagtttccaggattgatttcatacaattgatgttaagatgctaaagcaattagcttgaatctgatcggaattcgagcgattgagtttttgttctgtgtattcaaaatctcacaacttcattggcttatctgctcttgctgcatacattcatgctgatttggtttctgttgcagatactgagaagttttacactgaggaccaagagattatacttgctaggttcaatacaaaagtttgattggtctctcaaggctaaaatgatgggtagaaaagcaatagaagctgccttgatctttgttgaagaaagcgggattagcgactctctttcagctgaggactttcttgtcgagagagagtcaatgttgcaagaccttttccctactagtgagctcatgccaggtagattctgctttttgtaacacatgacatttggttcacaggaagattacatgtatggatatttatgtttttgatgtggtcatgaaccaattctcttccacattttcaggggctagtagactcattaagcatctccatgtaaagaatattccaatatgtattgctaccgggtaatctcttcacctcatctcataatataccatttagtttgcattctcattgtcctttacaatccagaaactgacttgttatgtttgattgtacgcttgcagtactcacacacggcattatgatctgaaaacccaaagacacagagagcttttctcattgatgcatcacgtagttcgtggtgatgatccagaggtgaagcaaggaaagcctgctcctgacgggtttctcgctgctgctaggagatttaaggtaactaacaggcaacagtctccaagattctccattactaactagttcatatttaaaatgagttgtagactaatgtttcctcttcgtctggattccttaggacgatcctgtggattcacaaaaggttctggtgtttgaagatgcgccttctggagttcttgctgctaaaaacgccggaatgtaagtggattgcgtgtaacattttccaagttctcttagctgatgagctattagtggttcagttctgactggtgtgtgtgcaggaatgtaataatggtaccggatccaaggttagataagtcctactgcaatgttgcagaccaagttctggcctctctgctagatttcaaaccagaggaatggggcttaccttccttccaggattcacacaactaaaacaacaaagctttcagggcaacgttatcctcaagctaacgatacttgactcgttaactttgattctttaagcctcttacgctatacgagaaagattattgcaaattatagattcttattggggtaatttaaaacaatatatttatgttcgtgatttgttttcttgattcatgaatttgtgattgttatccagaccgttaagtgtgactttagtgagaatgatattagaatgattgttgtgagtgtgggttacattcgaggtcataagcttag

SEQ ID NO: 37910 - DNA, 1529 bp, Arabidopsis thaliana landsberg
  unsure (1)..(1529): unsure at all n locations
aacgttcttattaatataatcgcacacatgtataagcaccagaaattcaaatcaaaatacacgatgtatcaacaatgcatctacttagtctggatccaatttggtgttgcaaatacaagcaatgggaatagctgctagctcacatcattctccactccaaaagaagaattaactatcatttggtagataaaagatgaaggaaataaaattcaaaaataagattaataactcttaccttctctgattgcattttctgcagatcccccatagctttttgcctcgactgccaaatcactttaaaaagtaaatatatatgatggaaaatcacaaaaagcataagaaatcaaatataaattgtccataccacttgattgcttgcccagcgttcatagtaatgagtgtatctctctagcgaattttttgccatctctcgcctcctttcagcctcatcatactaaaacaggagaaatttaattgatatcaatcaaacaataccattagctcaagtgattgcagaaaatttcaccacaaatgatcaaataagtacaagaggtcttaccaacccttcttgcttagccgcctcataccggatgcaggcataaaatccaccagttctttccccgtgttctgtccatgcgttaaggcaaagcctaaagattcaaacgaagatgcgttcatgagcacatcttgcatttctatcacaagattaaatcctagaatatcagacaggtaatagctactcagcattgcaggaaaagagtaacaaccaaggttagatacttccagagatgtggagaaggcattaacaacaaaactataatttacaaggtggtgtgcatgtaatgtgcatacaaccatgattcttttcaattgtacgcttactctttggacaaggctttgaattggcaagtatcctgagcataagagaaggcagagtttgattaccaagaaatatatatgaactcaagatgctcagaggtggtaagatatctgtatctatttaaaagccaaagttcagggatcaagtacacgagtaaaagaaaaagatatagatagagtggataccaattcatattttcagattcagcgctgttctttaatatccattttgaaactgggctacaatccacaggtcggtgagcctcctcagtgcactacaattcagatttaccacagcgctattgatcaaccaataacattgaataactaggataaatcagatcagtgggctttgacacaagaacttacattccagcaaaagctaaacgagcacaagcaggaaacatcataatttccagaccctgcaacaaaatcaatcgcaaaatcacatcccggggcaggacaccacttcatctgaaccaaatagcataatgattagaaacatcgcatcataagaataaatatagagagagactaatatcgtttgctactttgctcaatgcanaggtatcgaaggtaacttgagaataggaaaaatatttattgtatcatgaaaagaacagaatcttctaacaacactangtacatgc

SEQ ID NO: 37911 - DNA, 1834 bp, Arabidopsis thaliana landsberg
  unsure (1)..(1834): unsure at all n locations
agcttctcggtgagctaggagaaaaacggaattgcacggttcagatttttctccctcaatgatcttgagaatggatcgtcattttggtcagagatgttggttttgttcagaccaaactgatgaatgtctctacccaatggagaaccgggcaatgtctccaatcccatgagctttgctacaacactgggaggccgtttcttgctactgcttgaacagctttcactgaaactttctgaaagcttacttgatttgnnnnnnnnnnnnnnnnnnnnnnnnnnnnnnnnnnnnnnnnnnnnnnnnnnnnnnnnnnnctctttcagcttctgtctggatttcaacgtatcatgagaatcaactgagtaacgaggcgcatctttcatgccaagctcgttataatgttgagatgtttctctaagtcttgctagaactctgaaggactctttgagatccatgggagttgattgcttcaaaccataaggccttggagaatcctctcgtatgctctgtctaactacttcctctctagtcattggagtcttactcaaaagccctctggcttctctgttcattgagtctctcacaacatctctgaggtgaagtcccaaatgtgaaaatccattcccttcagtcatctcaggatcacttgtaggagattcttgaaaattagctcggtcatacgcagaagcgtcaggttgaactcctctattgaactcagaagacgatggggaggaagagcacgaagatgagaaagaaactctagatgattctgttgaaacccttcgcttctctttcacattcccaccaatgttggagtcctgaaactgaaatgcaagaaccttagatcttatagaaaacctctgtatatgaatgaaatcgtagatggttggcaaaagaaccaacttacagtttctttttgttgataaattgtatcaacagagtctctttcataattgatgttaatggcatttccattacctgcaacaagcacataaaacaagcatgagcatcatatcaaaactctcaaacaaggaacacccgattacgcattgagagagacgtttaataaaaccttcaagaacctgctagtcaaacttgaattcatcacatctggttggaaactccatgagcctaaaggttaataaaagtcaaaatctagcaagaaaaaaccggccataagggaaaaattaaatctaaccaaaagattcggcagatcaacacatctgagaaagaaaaagtaacaaccataactttagatctctgagactataacaagacctggttaatgaaagaatcactccattggcagataaagagccaaaacaaaaacagagaagaataaacatacaaaaacacatggatgtaagaataacatatgtgaccatatacaagtcaacgactactggacacgaaccatagagatcagaagagagtgtttaaattatcaaacaatataaatatatagtaattattaatttacctaaagtaagactttttcgtcggccagtaagaacatggtgacgatcaaagatttgaaaaatcccattcatacatccaatttgcttctgcagatctgcactatcatctgccaatgaatgcagaagcttcgcagccattttctacagatcacaaaaacaattctccggcgccggaaactttctacttaaagattcaaaaagacttctccttttttctttttggctttgaaagctttcttctatgatgtgttcccctttactgatttcccaaaaacccaaactttatgcctcaatgatgtgtttgcaataatttggaagagataacttttaaagctttctttttttctttctccatcata

SEQ ID NO: 37912 - DNA, 2028 bp, Arabidopsis thaliana landsberg
ggaaaaaggttaagcaaggtgggtccaattaacgtcaagttgcatgcgcaataaatcacccgaagtgttcatatgctatatagtctatcgctttgctttgtctttctctcttcactcatatgtttcgtcccaattctctttttataccttaaaatttatcaacaacgaaaagccaaagacacacaatgctaaattcttcatatctatccttcgcacttatctttttctgctgcatttcattcacagctctcgcttcgtctttgcccgtttccgaccctgagcttgttgtcgaggaagtacacaggtatatattctaacaaaaatgttaaaacattttacatacactactcaaatgtttggtattaaatattgtttccaagttctttctattcaaggctaattttgatcttgatcacaaactcacttgttactattgctgcattaatagctatgacttatgagtacgcctaattacgtacgtcaagaataataaatgctaatatattgtctgttggttaatgctttaggaaaataaacgagtctatatcaagaaggaagctaggtttcttctcgtgcgggagtggtaatccaatcgatgattgttggcgatgcgacaaggattgggagaaaaaccgaaaacggttagcagactgtggtatcggttttggcaagaacgctattggcggtcgtgatggtgaaatctatgtggtcacggatccaggaaacgatgatccagtaaaccctagaccgggaacactaagatacgcagtcattcaagatgaaccgctatggatcatttttaagcgagacatgacgatccaactaaaagaagaactcatcatgaattctttcaaaaccctagacggacgaggagcctccgtacacatctccggtgggccatgtataaccatacaatatgtaaccaacatcatcatccatggtttacacatacatgactgcaagcaaggtgggaatacttacgtacgtgactcaccagagcattacggatatagaacggtatccgacggtgacggtgtgtcaatattcggtggaagccacgtgtgggttgatcattgctcgctatcgaattgcaacgacgggttaattgatgcaattcgtggatcaacggctataacgatctcgaacaattatttgacgcatcataataaggtcatgttattgggacacagtgatacttacagtcgtgacaagaatatgcaagttaccattgcttttaaccattttggtgagggccttgtccaaagaatgcccaggtaaataaaaaatcactttgtgttagtagttaatgtgattgtgaccatggatatagattaattttgggaccattgtattgttgttgtgtaggtgtagacatggatacttccatgtggtgaacaatgactacacacattgggagatgtatgcgattggtggaagtgctaatcctacaatcaatagtcaaggcaatagatttcttgccccgggcaaccctttcgccaaaaaaggtataccttaatttctctctttcggagtaaggagatattgagaaaggatgaatctcaatattgtaatggttttggcaggtgacaaagagggtaggttcatggcaaggggaatggaagcaatggaactggagatctcaaggagacctaatgctcaacggtgcctagcttcactaaatctggagctgctgctcctgcaagctatgccagagcctctagcttgggaggtaaaccagcttctgtagtaagtatgcttacatacagctccggtgcccttaaatgcaggatcggtatacggtgttagttaattgtataatcctcaaacccaagaccgaagaggattctgtctagctgagggagacaaaggaagaaaactaacttgttttgttcgtccccgtcatttacatattaatcgtctccattcttttctctttgaccattttagactaaaaaaaaattccactcgtcaacatagaccagctttgatgagccgcagtgttgggaggctcaactccaaaaaagtagg

SEQ ID NO: 37913 - DNA, 2187 bp, Arabidopsis thaliana landsberg
  unsure (1)..(2187): unsure at all n locations
tccacaaccgcagataaatctaactaaaaccctctcagctaccaaacaatctcttagcggatgagaaatatcaaagtactcttggcactcaaggaacccacccccatcagcaatacaatttccttatgtaagctttgaatggctttggcgaaaactcttagctgatgttccgtttacttcttctcccttacgcagtcggtgctcaacagaagctgttacaaactccaagagagacgaaagttgctgatgcatggtacagcaaattatgtgtgtttaaataatgtccaaagactgtagtagctttgtgtatgaaaacatgaacaattttgttggttcttggagtttgtggttttgatctattgagtgtgaaataatagacaaaactaatcttgctggtcttatgatgttgttcataaaaacatgattttgttctaggaatattaaatgccaaaatctgtaagcagttaaattttcagagaatgatatcaaaattttggaaaattaaaaattgtgtgctttagaaagaaaaaaaaaggctttctacagcaaataataaaaaaaggctttctacggcaattgtacttgatagtcatccgcaaccacaggtttaaccctaacccaattttttgttgtaacttaagagagaaagtatttggataaatgacttgggctgggcctaaaagaaattaaaaataggcctctagctgtcattatcattaggcgtaagttagcatgagatgctaaggataccaccaatccatagagttgctaacttaaaaaacaaggctcgaggcggttctcttatctgcaaaactaaagactgttgtctaaagcgaaccaacaaaaagtcttcatctttaatcattcaatggcttcttcgtcttctatgcagatggttcacacttcccgctccattgcccaggttctaaacttaatcctacatgtgcggttttttcaattttcgtcgaagatttatgctttgaattctatccttttttcttcttcaccctaagtagtgtgtctctgtgagttaaaacgaaaaaacaataggatactattcctgttcttgtgggttttttttggtcttaactctcttatgtttggttttctgtgtagattgggttcggtgttaagtcgcaattagtttctgcaaatcgaacaactcaatcagtttgctttggagctcgttcctctggaattgcattatcttcgagattgcactatgcatcacccattaagcaattttctggggtttatgcgaccaccaagcatcagagaaccgcttgtgttaaatccatggctgctgtaagttacttttttcataaatcattcatgttctgttgccttatggattcgtgttgatttttgaacttggtttgtaggaggaagaagaagtaatcgaacctcaagctaaagtgacaaacaaggtttactttgatgtggaaattggaggtgaagttgctggcagaattgtgatgggtctctttggagaagttgtgcctaaaaccgttgaaaacttccgtgccttgtgtactggtaagctccttatcaaaatgatgtttaaagtttggaactttatagacacaatcaaaaccattgtctaaaggaaattgatttcttcaggtgagaagaaatacgggtacaagggttcctctttccatcgtattattaaggatttcatgatccaaggaggtgatttcaccgagggaaatgtaagttctttccaacaagttacatttcagactgtttgtttgttattctgatatttctttctaaatcgtctttaaaagatatgaaactcacagggatactggaggtattagtatttacggtgccaagnnnnnnnnnnnnnnnnnnnnnnnnnnnnnnnnnnnnacaaagaaaaactctggttttctgcaaatatggcattacttctttgaggtattaatggttttgttttccgcatttgcagtgaagcatactggacctggaatcttgagcatggcaaacgctggtcctaatactaatggaagccagtttttcatttgtaccgtcaaggtaaagattctcaattcttcacatcatctatagagttatcgatctttcatatgtttgccttcccattttgattaatatttatttcacaaatttgtttttttgtgcagacttcatggttagataacaagcatgtcgtgtttggacaag

SEQ ID NO: 37914 - DNA, 5083 bp, Arabidopsis thaliana landsberg
atttttaagctagtagagagagagaagcgttttgtgtttgatttatggtgtttggatccatggtgtggaaacaccagctgattgggttctcagggattttttctaatgtttctcccgttggaaatctttattcgggatcatttctaggaaaatcagaccagatttggccgtgataatggtacgagtctctcttctcttatctgcattgcgatttctccgtgttcttcatttttaccttttttttttttatcttctgtaaccataattgctatttgagctgatttttatgttgccccttacattttagatttcattataagatgtgtctaaaagagaacaaaagaaccagctaatgaagcttgacaatattttttttatttgtttctaatatattctactttaatcaggcttcagtgaaggtaactgtggggtcacaggtctgggtggaagatccagatgaagcctggctagatggagaagttgtggaagctaacggtcaagagatcaaagttaattgccaaaccaagacggttagtcccttttctccaaagcaacgagacaatgtgttagttcttaaggtaccttaagaatacattgctcatatttgtgatgcatttgtttgtaggttgtggcaaaggttaatgctgtccaccccaaggatcctgagtttcctgagcttggtgtggacgacatgacaaagcttgcgtatttgcatgaaccaggggttcttctcaatctaaaagccagatacaatgcaaatgaaatatatgtacgcttcagcatgtaactcttgtcagttttccttctttcattacacccacttatgaattctatgattatctctaccattgttttgctgaaaattactgcacagttatagcaatatcattaatatttctctgaagtgtttgtagcaagctaatttcttcttgatggttacagacatacacagggaatatactgatagctgtgaatccctttaaaagattaccccacctatatggaaatgagataatggagcaatataagggcacagattttggcgagttaagcccacatccttttgctgttgctgattctgcatacaggtaatcttttgttgcatagatgaaactttaactaatgttgcactatcatttttttttgggcctcaccatcatcaagaatataaatttagaaaaatgatcaacgagggagtaagccaggcgatcttggtgagtggagaaagcggtgctgggaagacagagagcacaaaaatgctcatgcaatatcttgcatacatgggtggaaaagctgagagtgaaggacgatctgtcgaacagcaagttttggaggtagatagtctgtttacaatgcatctacattcttactagagacagactcactgagtttctctctgtagatatcttcttattcttctcgtattatgatcctgttatgcagtcaaatccagttttagaagcttttggtaatgcaaaaaccgtcagaaacaataattcaaggtggaatgtcattcacatttcttgatttttcaagtttatgtatgttcttgaagtcaaccttgacatatgtaggcaaatctcatattgcagtcgttttggtaaatttgtggagattcagtttgatgacgtgggccgaatatcaggggcagccatcagaacttaccttttggagaggtcacgtgtttgccaagtttcagatcctgaacgtaactatcactgcttttatctcctgtgtgctgctcctcctgaggtaggtcttcttagttgttctcatcttttattaaatgaatattgaagtgatagatgatataaaaatttgcaggatgttgagaggtttaagttgggggatcctaagtcatttcgctatcttaaccaatctagctgctacaaacttgatggtgtaaatgatgcagaggagtatcttgctactagaagggctatggatgtagttggaataagtgaaaaagaacaggtttgcaatttcttctttgcaatttgcctgtcacctgttgattgctaataggaacagacttatctgcttttttcttctgtctcttcaggatgcaattttcagagttgtggcttccattctccatcttggaaatattgaattttcgaagggagaagatgctgattcatcatcagtaaaagatgaacagtcaatgtttcatctccaaatgacatcagaactgctcatgtaatatatggctcttctacttttccaactaaatgctgattcttgtaatcacaatttgttattttaggtgtgatccccattccttagaagatgctttgtgtaagcgtatgatggtcaccccagaagaagttatcaagagaagtcttgatcctcttggtgctgccgttagcagggatggtttggcaaagacaatatactctagactctttgattggtaaattttctattttaatgttcaaatatcttttgtacatataacactgtgggtgacatctgctaagtcagtactcattactatgttccaggttggtgaacaaaataaatatctctattgggcaagattctcactctaggcgcttgattggagtccttgacatctatggttttgagagctttaaaaccaacaggtgatggccgtgagcatgcatggttcactttacaagcatatgcttggggtgatatcttaagtgtcaaaacacaccaagtgtcctatcgtctaatatacaaattttcagtagtcttttcccttgactttagtatgaggagttaattgaatagaaacctttactctgagctaatatgatagacatattattagctaaaattgtgatcttaggaaatgatgtcttttgtaagtttccatgactaaagagatatctataatatcacctaatcaacctctactccagttgttcactgacttcttaatgctatccctgcagttttgagcaattctgtattaattacacgaatgaaaagctgcaacagcatttcaatcaggtatgaggtcagtcataggttatggctgctgatttggctcaagagtctgttaattaatctgaacttattaatactgtacagcatgtatttcaaaatggaacaaggtgaatatcagaaagaagaaatagattggagctatgtggagtttgttgataataaagatgtcggggatctgattgaaaaggtttgttttatccagtatctgtttccttccctgtataaacacggattcatggcttaatatttgcgaccaatttggctaattcaaacactggacagtagaaattctctttagagagcatactgccatcatctaaaatacattattctacagctcaacctatgtgattacagaaaatgctagcacttgtagcttaagtccatgttggatatttttcctgaaaattgtaagaacattttgaaaggttcatgaaagcatgtaagagttctatatgttttcaatatgctctagtgtcctagcttactatgcattgttctgacttgaaaacacatccagtatcgttttttttttgtttttttttttgccatcacatgcagtgtcgttatttccattgcttcatgctacgtttttttccctgaaaatatggtttcaatcttttgcagaaaccgggtggtattattgctctgctggatgaagcatggtataataaatttttctccacttgcagctgtactttagtgttttcttacacagtaactattttctccaagtaccattattatgtgttataaacgtttcttctctctgcagcatgctaccaaaatcaactcctgaaacattttctgagaagctgtatcacacattcaaggatcataagcgcttcatgaaaccaaaattgactcgatcagattttacattagttcattatgcaggggatgtaagttgcatttcacactctgttgcttcagaattaaaagtatagagttatgatttttaaggtctctttcccatgccgttcttttcaggtccaataccagtccgatcaatttttagacaaaaacaaagactatgttgtcgccgagcatcaggatttgttaaatgcttccaaatgttcttttgtgtcaggcctctttcctcctcttcctaaagaaagtagcaaatccaagttttcttcaattggcgctcgtttcaaggtgacttgcctgcaaatccattaagacttttaactaatagataagactgcattattggaccacacataagatattgttgaaattttgatgccacattcatcatctgtacggactgacatgtttaagtaattggtgcagctacaattgcaacagctgatggagacattgaactctacggaaccccactacatcagatgtgttaagccaaacaatttgttgcaaccaacagtgtttgacaatgccaatgtcttgcatcagttacgctctggggtctgttttcttctgaataattcataccaacatctttgatgtcttgaggtgttatatgatatttgtcttatgcagggtgttcttgaggccatcagagtgaaatgcgctggatatccaacaaatagaactttcattgaatttttaaatcgatttctcattcttgcaccggaaattctgaaaggagagtatgtatcagttctccccgttaagcttggacctttcttccactcttgtatgataaattgctccttgagtctgtttatcacagttttcttaccttacactaatcaggtacgaagcagaagttgcatgcaaatggattttggagaaaaaagggcttacaggttaccaggtaaagttcctaggaagttcactaaatgtaaaaggaatcccaattttgcatgagttgaatacgtgtagaatcttcagtattctatgaaatttgagtttctcagatagcataactcccctaggtgcgtgttgatcatataaaatctaatttgcagattggaaaaagtaaggttttcctgagagctggtcagatggctgagttagatgcacacagaacaagggtgctcggcgaatcagcgaggatgattcaggggcaagttagaactcgtctgacgagagaacgatttgttctcatgcgccaaaattcagacaatatgcaagctaattg

SEQ ID NO: 37915 - DNA, 2027 bp, Arabidopsis thaliana landsberg
atgctctttccatgtaactctaaagaaagtgtgtcatatggagtctaagctttaaatgtgtttttataaatgttgtgatagaccggtgagctgaccactgctcttctcagtaaattcaattccattgacagagacccaatattattgtggtttttagattttttgtttacatacctttttagtatggagagacagaaaaaaaaaacacttttgaccaatgaaaatatcatttataaacattttaaaaactagttaatctagctagtaatcaaaacacgagttcttactaatgatgttttcagacaaattcaatttcacatcaagctttcaatttttggtgaaaaacacaagtttaggttgttttttcatttttatacggcaacacggatccaccttttgtatgaatacattaagatttcatttgaagaggtacgaatgattcagtctctaccaaagagaatcctacatactttatgtttttttctgaatacttgtttatattcctctcctcacaaaaatccaaagcaataaacaaagcttgatgtgacttattttgttatctacgtaaaacgaaaaatgagaaagtgataaatcaagaatatgctcgtagacttcaagacctgcttaaatgaatctcatgcctcataatctcattgcttaaactaagcaataaacattgaagctcgagatgagtcataaattctcaaacctaacggtactaatacttacatagaagtaggagaaggaaccatgagctcattaattactcttctctgccattaccaaccaacttgttagtaattgtgcacacagaacatctatgaaaaccacctcttacttcacctttattacttccgccaaagtaacaacaacactctctgtatctcttcttctccatagagatagagagaagaatcatctcctatactctagctccaacaatggctaacaaaaacccacttcaaaaaccctttcttttcataatcttatcaatcaatctcatctttcttcaagcagaaacaactactcaaatctctaccaagaagacttatgttatccacatggataaatctgccatgcctttaccttacactaatcacctacaatggtactcttcaaagataaactctgtaacgcaacataaatctcaagaagaagaaggtaataacaacaggatactctacacttaccagactgctttccacggtttagcagctcagcttactcaagaagaagcagagaggcttgaggaagaagatggtgttgtagctgtgatacctgagacaagatacgagcttcacactacaagaagtccaacgtttcttgggttagaaagacaagaaagtgagagagtttgggctgagagagtcaccgaccatgatgtggtagttggtgttttagacactggtatctggcctgagagtgagagcttcaacgatacaggtatgtcccctgttcctgctacttggagaggagcttgtgaaactggaaaaagatttttgaaacgtaactgcaatagaaagatcgttggtgctagagttttctatagaggctatgaagctgcaacgggaaagatcgatgaagagcttgaatataagtcaccgagagacagagatggtcacgggacacacactgcagctactgtagctggctcacctgttaaaggagctaatctttttggatttgcttatgggacagctcgagggatggctcaaaaggctagagttgctgcttataaagtctgttgggtcggagggtgtttcagttcagacattttgtcggctgttgatcaagctgttgctgatggagttcaagtactctctatatcattaggtggtggggtctctacttattctagagacagtttgtctatagcaacatttggagcaatggagatgggagcattcgtgtcgagttctgccggtaatcgaggcctcgaccgattagtctcactaatgtatcccaaggatcacacagttggatgcagactatggatagagattttgagcatcagtgaagataggact

SEQ ID NO: 37916 - DNA, 7281 bp, Arabidopsis thaliana landsberg
cttgggtttgacgaccttggtcgatggccttcggattggacccattccgcctaaggttatgacacgcctagtttcctgccgcaatgacgccgctgaccttgtctctgacaaactctcgtcgtcgtcgtagctatggtggctcttgttctgagaatcgtctaagtcactcatctcttgatttcgaagaaggaagacaaaagggatgaaggaaagaacagagaaagcagatcggaaaagggaagaggcagtagaaagaaaacgatggagataacaaacgaaagatgaaatttaactatcgctaaaatgaaagttaaacgcagtaaatagttgagaaggagggaaattaccttggtagtcgtgtgacttgatgagaaaccgaatggagatgtgggaggttatttaaagaaaccatcatagccacgattttcgagattgtagagatctcttccgcgcgcctgatctgagccgtcatatgcggtgcgctgaagagacgtttcatctcggccgtccacgttgatagcgatttaccttgcgtatctactcaatatctttcggttcgggaatctgaaattaaatcatttctattgagtttatcctcaaaatcgattgatcttatcatatctaccatttcatctataatattttcgcaatcttacctgacttagatgtccggtcatcgagttcgcctactcactcaatgggctggggggcaaatgttgaagctggatttccctccaagaatccacctgcgaaaataccaggccagcccactaagcccaccaagcccaccaagtagagaacctgcacaactgatgagcccacgtacgcaaatgggtacttgggcctgataagcccggtcacctgataaagggagataagcgaataacaacttaagagctgatgaggagatattcgcggagcagacctactgaatatccaggaggatctccgaatatcccggacggagataccacgtgcgtagacctatgtaagggagcaaggatgactaggaagacacattcaattcagcttacattcacacgcatacttttacacttgtagtctcatttcacattgtaaaagctttgtcataatcaatacaaaaattccattcgttcttagcaatataactctcaaggtttcagtgaagttatagacctcctttctcataatctcaattacaaatctctagtgtggatttcagaacccatatttgacaccgtctgtggggacggaaatagatcattccaacaccgaaactaacacatcaattgtgaccaacgatcatggatcccaattcatcaaattcaacgggatctggcttaccagttcagatcccgaacgatgacgctacggacgggcacctcccaacggatctccctctcggaatccaggttggtgctgtctataacgctgatgcggagaacctgtaccaaaacttgaattcttctagaactgaccaaatcactgccccttcgtaaacaaggggcggggaacaaaatgtcacaatacatgcctccgaacggagataacccgcccaacccgtcttataaggtccctccgcgacctgccagcgaattggccgagcttcgcgcaatgatcatgaacctgatcaacataagcaaaaacaaagaaattgcgcatcgtaacctcgccgcaatggtgggtcagcagagacgcggctacactcgcatggcacatgaggtagagcgcgataccgcgggtaaggaaatttcgcccccccctcccctgcaaaactgggattcctgcccagatccccacagatctgacaggtaccgtctccccgacatatcctactccaaggactcgtctagacttcatctcgatagacgtctcacctcctaacaaccggtaggtcacctttttgcaggcacctaccaacactctcgtcgaaaacccggcaacaggaagcgagatgagcacaacacttgccttcccaaggctaccggtcccaccttcactgccgctaggctactcgcctcctgaggtacacgtggacgagaaaccaaacaaccgcgtccagctcctgcgttcccgggaactcaacgcaacaacgaacctccattgctaatctaccatccgttccctggataccaggaagtgacctctttaacggtccaaccgatcctcgagcaccaatcgattcgcgtaacgtcttggatatggaaacattccgcaattacgcagctcaaacaaatgcgaacatggctcaaatgcattcacgagtgcatctagcagtgagcgatcctcccgacatagatcgagtgatcgaagaaaccaggcgtaccccattcacggataggattacccattatcgcctccgagacgtcgagagactccgtttcccaggatacgacggaatgagcgactcaaaggctcatctgagatccttccgttttgctataacacgagcgtacctaacagacgaagaaaacgaagcaggtcattgccgtttcttcgcagaaaacctcgtaggtcacgccctcgaatggtttgctagcctcgaagggaactccattgataccttcgaccagctcgccgccgctttcttaaaacaatattcggtacttatcgaacacaggacgtctgaagccgacctctggagtctctatcaacttcagaacgaatccctgcgatcttacgtcgaaaaattcaaagcaatcaaatcgaaaattgcaaatctaaaattgcaaacctaaacgaagaggtagccatagcaggccttcgtaacggcctttagttctcctctaggttccgtgaggaactcactgttaggcaaccagtctctttagacgatgcccttcacaaagctttccacttcgccaaagccgaagaggagctcgccgtgctggccttacgattcaaagaatctaaaatgcaaaacgctccccttgcatttaagaaacccttcaaaaaggaaaacgaaacgcaggggcaacataccttattcgcaatagacgaggcagctgaggacgagagtccagaacttgacctcggaaaatattgtaagtaccacaagaaaagaagacattccaccgaggagtgtcgtgccgttaaaaagttaatcgcagctgcgggaatgactgaaaaaggtgcaaaccccaaagttgaaacccctcctcccgacaaacaggaggaggagcaaactcccaagcaaaagaaacgggaacgaacaccggagggaagtgactctcccccacctgctaggagagaacgcatagacgtagtctttgcagaactcgatctaggtggtcagtcaccacacctccccccgccccgcataagaaaaacatgaggtttccattacgcctcttgaaattctgcagaagcgcaaccgagcacctctccccgaaatgcatcgatttcatcatgggagggtctcagctctgcaacgactcaatcaattcattcaaaactcatcagaggaaggcaaattcttacacaaaaggcaagagcccgatgatgggacctgaccaccagatcacattctgggaaagcgaaaccaccgacctcaataaacctcacgatgacgctctcgttattcgaatcgatgtaggcaactacgaactctcccatataatgatcgacacgggaagctcagttgacgtactcttttactacgccttcaaaagaatggggcacctcgattccgagttgcaaggcaggaaaacgccacttaccgggtttgccggagatacgaccttttctctaggatccatccagctcccaaccatcgcacgaggagtgaggcgactcacgagtttcctcgtagtcgacaagaaagctcctttcaacgcaattctgggaagagcatggccacacgccatgaaagccgtcccatcaacctaccaccaatgcattaaattcacctcggacaagggaatagcactcggatgggcagccaacgcagctcccgaaaatgctatatgggcagctacgatcttatcaaaaaggctgaccccgtagtactaatgatagaagacaaactcgcggaaataaaaacagtcagatcctctgatccttctcaacgcggacctcgaaaatcattgataacacaggtctgcatagacgaatcagatcccaaacgatgcgatgggataggtcaagacctcgacctagcaatacaagaggatctcataacctttctcaaggaaaacaaagacagctttgcctggtcaagtgcaaacctccgaggtataagcctcaaggtaacctcacacgaactcaacgtcgatccgacctaccgacctgtaaagcagaaacatcgcaagctaggtcccgaaagggccaaagttgtgcacgatgaggtcgatcggttgctaaagatcggatcgataagagaagtaaaataccatgactggctcgccaacccggtcgtcgttaaaaagaaaaacgggaagtgaagagtatgcatcgactttacggacctgaataaggcatgtcctaaagacagcttcccactcacacatattaaccgactggtcgaagccaccgcgggacacaaactattgtccttcatggatgcattctccgggtacaaccaaatacttatgcgcccagatgaccaagaaaaaacagcttttattaccgactaagacacctactgttataaagtaatgccctttggtttaaaaaatgctggagctatttaccaaagattggtgaacggaatgttcgccaaccagctagataaaacgatggaggtctatatcgacgacatgctggtcaagtcagctcacgaaaaagaccacgtcccgcaattaagagaatgcttcaaaatcgtaaacaaattcgaaatgaagctaaaccccgagaaatgctctttcgaagttccctcaggagaattcctcggatacctagtaaccgaaagaggcatcgaggccaatcctaagcagattgcagccttcatcgacatgccatcgccaaaaatggcacgggaggtccaacgactaatcggccgtatcgccgccctcaaaaggttcatatccaggtccaccgatgaatgcatccctttctatcagctcatccgaaaggataaaaagttcgattagaacgaggactgcgagcaagccttcaaacaattgaaagcatacatgtccgaaccacccatactcgcaaaacccaaagaaggagaaccgttgtacctgtacacggcagtctcccgaaccgcgataagcggcgtcctggtgagagatgatcacgaaggacagaaaccgatctattacgttagtaatacgttgatagacgccaaaactcgttatccagcaatggaaaaactggcactggccgtagtcatgtcagctcaaaaactgagaccatattttctatcacatctcatcgtagtgatgacgtctcaaccaatcagaaccattctgcacagtccgactcaatcaggtcgactttcaaaatgggctatagaactaagtgagtacgatatagaatattacacgagaaccagcctgaaagcacaggtcctaaccgactttgtaatcgagctcccgttaacggacctggatggaaccaactccaataagaaatggctcctccacgtcgatggctcctccaaccgacaaggatccggagtaggaatataactcacctcccccaccggggaagtcatcgaacaatcgttccgactcggattcaacgcatcaaataacgagtttgactacaaagccctcattgctggcattaggctagctcaaggaatgggaatctgcaatatacacgcccatagcgactcccaactcgtcaccagccagttccacggggaatatgaagctaaagacaagcgcatggaagcgtacgtcgaactagtcaaaaccttgacccaacagttcgagtcttttgaactgaccaggatccccagaggtgaaaacacctctgcagatgccttggcagctctcgcctccacgtcagatcctttcgtcaaaagaattatcccagttgaaggaatagaacacccgagcatcgacctaacggtcaaacacgctgaaatggaaacctcggcaacttgcaactttacgcgagtaactcgaagctcggaacccccgaacaacttgcctcgtacgaacctgaaccgtacaacgactggagaattccaatcatcgattacatcgaacgagggatcacacctcccgacaagtgggagaccagaaaactcaaagcccagagcgcaaggtactgcatcatggaagggagacttatgaaacgcagcgtcgcaggtccctatatggtgtgtacctacgggcaacaaacaaaggacctcatgaaaagcatgcacgaggggcaatgtggtagccactgtagtggacgtaccctccgctgcacaatgctagccgattgcatagctcattcactcaggtgcggtaaatgccaacgacatgcacctactcttcatcaacctcctgaggaaatgtcttcgatatcttctccttacccatttatgaagtggtccatggatgtcgtacgtcccatggaagcctccggtgggaagaagagactaaaaaacctgctggtcctcaccgactacactatcaaatggattgaggctaaagtcttccaacaggtaaccgagaaacaagtcgaggtcttcctatgggaaaatatcgtatgccgataacgggactaacctcacctcgggaaaaatcaaagcattttgcgacaagtggaagattcgtcttaccacatccaccccccgttacccacaaggtaacggacaggcaaaagccgccaacaaagctatacttagcaacatcaagaaaagacttgattccaaaaaatcaatatggtccgacatgctccacagagttctctgggcctaccgaactacacctcgcaaatcaacgcaagaaacaccgttctctctcgcctatggtttagaagcagtaatccttgtcgaaaccatagtaccaagcgtgagaaggaccgccagtcctgctaacaccggaacacgcaaatgttacaggacaacagggacttcatcgatgaacgcagatatcaggcaatgatccgagttcaaaactatcaacaacctgccgcccgctactataactccaatatcaaaattcggagattcgaagtaggagagctcgttttacgaaaagtgttcagcaacacgagagagctaaacgctcgaaaactgggaactaactgggaaggtccctatcgaatcaccgaggtggtacgtgacggcgtctataagctcgtaaaagttttcaacggagtacctgagttacggccttggaatgccatgcatct

SEQ ID NO: 37917 - DNA, 8002 bp, Arabidopsis thaliana landsberg
ggaaaagaacccgactcagaacaaaaagtagtgaacatagatgaagagccactcaagcacccagctccagacagaatgatacttgaaccatgtgaaggccatgaggaagtgagaagaggagtctccacattaagagtttggtcaagaagccaaagatgataaaaccagccactttggtcatctggttccgtaaaaatagccgaatgtacaaagtcatattcctcaggaatctttatatttggcataaacccatcagcattttgtgccaacaaacttgatagaagtacactgcagaatgtgaacaaaaatatatagtaaagaatatgcatacctacgattatgctaaaaaactatttctgaacatgtaaatcagtaaagtataatatatactaaagaatatgcatacctacgattatgccatgcagaatagttgctgaaattgttattgatcatatcatctgtatactgcaactcatcctgttctgatctgttggttagctctacaacaaacctggaaaggaacaacacattaatatgcaagcttgattaacatacacaatgctcctttcaaaaagtgttgacattccctaattttcacctgcgatagttccaagcatgaaaatttctggaatccagcttctggaatttttccaaaagtctcaattcattccctacggatgaatgccctttactcaaaacccactttcgatgatgccaagcaccataggacttgaaattctgcctcaaagcactttctacctgaatttagaaccgacttcacagtaactaataagcaactactttcataaagagcaaattcgtttcttttaattgacaggataactcaccactctgagttcttcatcaagaattgcgctgaccaagtttggatcaggctcaattctggcaaggcgatcctccacagcaagcttccggtagttccatgcggtgtacgcctccggattgatttctagaagcttcgtgcttaactcaatagcttcattggtataactagaaaccaaaaaagcaacaaatgattagtaaataaacaaaggatccttcaaatcgtactaaaaatctgggaagtacactgatccgatggaaatgaaggagaagattgtacattttatcgtgatgattcgtcataaactgagactggagagagcgaagctgaacagctttagcagctgaagctgcttcctcttctggcttagaagcattccttggacgaccgtgcattcttctccgacgactgtgagagatgcgacagtgtgattcaacttttccggttaaatctgatcagaaattacgaaaacagttaaaacaaacactagatcgaggaaagaaaaaacgtgatccaaatctagaaacaacagagatgacgaaatggagaataagaagcagatcacctgaaaggagcacgttgcggcgtcgatcgagagagagagacttttgttttcgggcaattgagcgactgagagaaggttctatcggaaaatttaatgggccggtttaatgatttcaatcgcttaaaccagtaaaccgggtttaattgaaaaatacggtcgaacactaacccggttttggaagtcttcgtttatgtagtgaaaggcttcgtcatcatcgttgtttcacagttgaaggttttcacgagaaagtgaagatttttggagaaaccatacttttgtgaaggttcgtttcaccttcaatttcgtttttccaatttgggtatccgataattgtaagaatttggggttttaaggtcagattgattatgtatctaatgcttttacattgtagtagctcgtgttttggattttgaaggattgatttctaaatttccttttgatcttgtagttgaatcacaatggaagattcagagaaaagaaaacagatgttaaaagcaatgcgaatggaagctgcagcgcagaatgatgatgatgctactacaggtactgaaacatctatgagcacaggtcacctctccaatccattggcagagacatccaatcaccagcaggattcatttgaaacgcaaaggtttgattattataccgatcccatggctgcttattctagtttcaagaaaaacaagacccctaagcaacaatacatctcatctcctagtcatcaaggaagctctcctgtaccacctcagtttccaccatcagttcctccaggtgcttgtttctgccttgatagtcaatgactctgtcttaatttttgttttgtctatattcttgtgaggccaaagaaagtagtccactgataaagaagattgcctaatatcatgagagtttaacttacagtatgttagttggtccttggtgagtataggtataggattgaacagaatcaggaattcactttggtatttggttgttgggctttcgtagagttaggtgatgattctcttctacaaatctatatgaaatttttgttctttgtttgggtttagtcatgtgttcttgattataatctacaaatcaagatcaatggaggaagaaatttgtctctcagtctcaggcttcaaacttattagctttagctactttaatttgatatatctctttaagtttcactttctaggaattgacagtatgaaaatcacatcaattatggaattcagttaggtttgtgtcctgtgccttgcaatgaacagtaatccagttctgatccttgcattataactttgaacaggatcattatgtagtgagtatcaggcacagaccaatcatggtggctttcatgcagctcattatgaaccaagagggatggcacatctttcaccctcacacggaggtccacccgccggttggaaaaacaactttaggcctccaccagttaaccattcaggtccacctcaatgggtacctcgcccttttccattctctcaagaaatgccgaacatggggaataatagatttggtggtcgaggcagctacaacaatactcctccacagttttccaattatggacgacaaaatgcaaactggggtggaaacacgtatcctaactcaggaagaggcagaagtcgaggacgcggtatgaacacaagctttgggagagatggaggaagaagacccatggaaccaggggcagaacgattttactccaactctatggctgaagatccatggaagcatcttaagccagtcttatggaagaattgctcagatgcttcgagcagcagctcaacaggtcaagcctggcttcccaagtctatagcaccaaaaaaatctgtgacctcagaagctacccacaaaactagcagtaatcagcagagccttgctgagtaccttgctgcttctctagatggtgctacatgcgatgagtcaagcaattaatcaggacaactggcctagtgaaaatacaccaagtccaagcatctgaggtacctggaaagatcaccgttgactctttcgaactaggtattgttcagtgacttgtgtttattttcttaacaagacacaacagcgaatgatgaacatctctgagggcgcaattaggagtagattggttggcaatagggatgttctctaccaaaaattttactgttttttcgcaagatttagttatcgtacaattatgtaaaatcattatcaggaaatttgttgcatgattgtgtttgaggtggaaatgaaccgcatccgtattaagatcatttttgctggtggaaacaatgttaccaggaaactgaacttggttttttatagattaatgtgacttgttaggtaccgtaatataatactagttggctacgacacgtacatgtgcgtttattgcttgaagccaataaggacaaggtggacgtaataaagtgtgcttgttgttggatggatctgaatatgatgactcaactgtccaactctaatgttgttgctaaagacccaaatcccacccacatttaatgttgccgtcacggaaacagttttcccaactgtcctaaatcagtgatacccatgcctattctgaactcaactctctttcgaaactcaatccttatataacacatcccatttaagcctataagctacacatatcagctctctcacaaaaataaaatggagggaagcccagtgaccagtgtcaggctctcttcggtggtgcctgcttctgtggtaggtgagaacaagccacgacagctcacacccatggacttagccatgaagctccactacgtccgagccgtctacttcttcaagggtgcacgtgacttcactgtcgccgacgtgaagaacaccatgtttactctacagtctctactccaatcttatcaccacgtctcaggtcggatccggatgtccgacaacgacaacgacacttcagctgcagccataccttacattcgctgcaacgacagtggcatacgcgtggtcgaggccaacgtcgaagagttcacagtggagaagtggctcgagttggacgaccgttccattgaccaccgattccttgtctacgatcacgttcttgggcctgatcttaccttctcgccactcgttttccttcaggtaaacacacatacacaaattttagtataatataatggattatttaagttcacatagcaacgaaaacggctgattctcccacgaacttagtttctttcttagttactaactatcaaacattcgtttcaaattctttccaatcattagcttaattaataattatgaaatgaatatttaatataaccgtggaacttgaagagaaaatattttttacatgtgaaattgattcttcactatatatgatcaggttagattctgtgtgtgtgtgtgtgtgtgttttttttttgtccaaatcaggctagctagagtaaactaaattttttactttgaaattcgtttttcagataactcagtttaaatgtggtgggctctgtattgggttgagttgggcccatattcttggagacgtgttttcagcatcaacgttcatgaaaacacttggacagctggtatcgggtcatgccccaacaaaaccggtttacccgaaaacccccgaactaacctctcatgctcgtaatgatggtgaagctatttccattgaaaagatagattcggttggcgagtattggttacttaccaataaatgcaagatggggagacacatttttaattttagcctcaaccacattgatagcttgatggccaagtacaccacgcgagaccaacctttctcggaggttgatattttgtatgcattgatatggaagtcgctactgaatatccgcggcgaaacaaacacgaatgttataacaatttgtgaccgtaaaaagtcttcaacctgttggaacgaggacttggtaataagcgtagtggaaaagaatgacgaaatggttgggatatccgaactagctgcactgattgctggtgaaaaaagagaagaaaacggtgcgatcaagaggatgatagaacaagataaaggctcttcggattttttcacgtacggtgcaaatttaacgtttgtgaatcttgatgaaatagatatgtatgaacttgagatcaacggagggaagccggatttcgtaaactacacgattcatggggtcggagataaaggtgttgttttggtttttcccaagcaaaactttgcaaggattgtaagtgtagtgatgcctgaagaagaccttgcaaaactcaaggaggaggtgactaatatgattatataactttgtatcttcttcttgttgttatacataaatgctgttttttactctttgtaatttcattatcgaattgttgggaagcctatcaataaattgtttgaactgtttacttttcctgtcgctttattattgcgtcacaccatccaaagtttacaatgtggactcttctattttctactccgtaaaatcaactttagagctatcaagattggatcatttgcatgggatttggagtgaaaagataaattgttcttgtttggtgtcactgattcacaatgatgatccactatcgacagtagaaagcatgatgatgaaatcttgggtatcttctctcaattttatcactctcacagatttattttgtagtttatacttttgttcatacaaagaaaactttgacaaatcattcatgtttgactaaaagaagggagacgaaggaaaataaacaaataaatatctaaatggtaaggacagcgtaccaagaaaagttgagaaagcagaagagaattaccaataaatcatatcatcaatcaccagacatctctgaggtatcttccttcggtttgaagtttcttaactatagcctctgcctctgacgaactcacaccttcctgaaattttgtaaagataaaaatagtcgagtatcaaagggaaccaaagtgaaaaacctaaatttcatcacaatgctcattcatacctgctcctgaacaatggtgtgtagagttcggtggacgtccctcgccatgcccttagcatcaccgcatacatagagatatccttcttcctttattagatcccaaacttgtgctgcctgaacaaatagaaaatgcaaaattaaagagattatgtgacattccttttcccaaagtatgatgcatcacttgatatatttaccttctccatcatcttatgttgaacatactccttctgagctccttcacgggagaatgccatgatgagctcagatattacgccttgatcaacaaaattattgagctcatcctcgtatataaagtcctgcaacatacatataagcactcagcagaagctcaacatgcatgatgacacagcaaatgaagaaggtgtttttggttgtgaaagtctcaccatctgtcgatttctacacccaaagaagagcaaagatgaacctagttcttctccatcttcttttagtgccatcctttcctgcagaaaacctctaaaaggtgccagcccagtcccaggtcccaccataacgattggagttgaagggttggatggtaacttgaaattagatgctcgaataaagattggggctccactacattcatgacttttctccgcaggaactgcattctgaatttttcaaactgttaagaaaaaaaacagtgaactggcagatagtcaaaaagaaggtaagaagtaccttcatccacgtagaacacacacccttgtggattctaccagtaggagttggaccatatactagtgcggatgtaacatgaactctacttggcgccaatctgtattgtaaaaaacggtaaagagtgatttgaatgccagagacgatcaagaatagttttccttctgccacaaaatatatttcaaaaataaataatcaccttggctaggatgagatggagtagtaaagaggttgtagactaggagctattgcagcaaaaaatacacctagtgggggttttgcagatggaaaagcagccatcacctctaaaagacttctctgacatgcaacaatccattgtgagtactcatccgacaacaaagaaaccgtcggtgttaactcatgaaaccttaaaatcacaaagaaatagatacaccaatgatttcagaacctttccatcaggtgatgtcaggtgcttaagtttctcggcttcacttggttcagtggcataggccgccaaggcaactaacgcagactgaaaccaaaaaaatacaagttaaatatttaggaacaagcaaagaccaaagcaaccagaacaagcttgtgaggctaatctccaaacaaacagacgttcacctttcgaggagggttcaaaaggtctgcgtatcttgccaaaccagtcccaagtgtgcatggaccagggaaaggaggcggcactgcgctttccaatggggagccatcttccttgtcagcatgtatggaaaatactaaatctaaagagtggccaagcaattttccagcttcttcaactatttcaacatgattttcagcatatacacctacatggtcacctgtttcatatctgcaaagaaatgccatagtttttatacacagttttttaacggtgaactttttacaaaacctttacaggacaatcaactgttgactaa

SEQ ID NO: 37918 - DNA, 4370 bp, Arabidopsis thaliana landsberg
aaccagctttaaatttttaacaaccaaactcagtaccaacatacgaataagattaccctgcatttgtttacatatttagcctattactccttaggaaaggaaatgaacttacatcaggtgcccattggaccgaatttacatccatttcatgtgctttctccttcttaaccaaaagtttgtatgaaggtccatcaacctgacacaatgatgaccagcatttcattttggctgtacacaaggtatattgtatgtaatgaaaaatcactcgctagagtctaaagcaaacgaaaaaataaatcaagaaaccatgagctttggtttcttgtgttgtgctacaatgatgacacagagcatatgccaacaagtaaaccggacaagatatggttaatgatatttctaaatgatactaaaagaaggatttgtggttataggtaaaagggagaagggcatacagagtcacagtcgctgtccacaaataactgtatagtatcatcgcctgctccactagcaataacaccgtccctatcaagatatcagatcttatcataaacttatgtcgatctatccagtaggacacatagaagacaatcaatattggtcagcaaagcttattactactttagctttatttgatcaatgaactagataaaaaagtgtatttatcaggtgtaagaaatcatcttcttggtttgcatgggaatatagtaggactttacaattgtttctttcaaatccctcaaaagtgacaagtctataccttgaccaatgaactgaatatatggtacgatcgtgaaaaccagagagtgtacaaacatgagtcctgcaaaaatcaagcacgtaaatatttcattagctacaagttagaacatgaaatccctagcaaatgaagaatatccaaccgcatgtatcttatgtcaaacttatagaccatacaataacaaaaaatacatcttcaaaagaggaaagatgtatatgctaaactctatgaagtgataattgaatgccattatatcctcaccagggtacatatccttcaccagattgcatccttgaaatatctgtcttccatattttcattgctagatcatcactgcaaagttcagacaacccaaatgttaacagaccaggtaacagagatgaaatctcctatccgaaacaatggggagaagattcaccaacctacaagtgaccatcttgtcccctgcagcattaaaagagatactccagacggtagaagaatgaccactgagtgaagattaaaggcaacatatattactatacgcataaaagaaatatcaagaaaacaatagcatcaaggtaggaaaatttcaacatgtgagaagtaaagaagagacaaatagaggatatacttgttaagttcacttaaggtttgtacacaattctaatcaccatcttcatcctcagagcaccaaatctgttaatagaaacagaaacattgcagttaaatgcttatatatatatagatatgccaccaattcatgaaagcacatttgaagcattgttctcttaaccttgatagtgttgtcataactgcaagagaacaaaacatccatggtgggatgccacaagaccatcttaacatcttctgaatgaccagttaacactgcaatagtatcaaattcatcgtcctcctctggtagtatttcccaaatccagacagacttgtctctaccacaagttgcaagcaacgaaccagatgcattccatgatacacttttgacttcgctttcatgtccctaagaaaattccacgagattttaaaaagtcaagaaacccagagggacatcaaagccctaaaaattttacaataaatttcagttgtcaacaaacacataaaggataggcctttgagatagtacatctagtacccgtaaaacagagacagtttcggagtcagtagcaaaaatttcccaaacgcaagtagtgccatcgaaacttgcagtggccaataacttcccacacggtgaccaagctaacgacttcacacttcttgtgtgcacaccttccaaaacagcctgaccaatcacgaagcttcatgttcattagtgacacattatctaacaacatcaaattcgaaagaaagagagaagagagaccttgcaggtccaggaacgagtaagagaactctgctcccagattcgtacggtcttatcggcactgcaggaagcaataacaccgtcagcggcgggattccaggcgacgtttcaaacacgatcagtgtgaccttcaagtttctgaaccctctctaacccctaaatcttatccatcactttcatctccttctggatcagcagagaagcctataagttccacgaaaatcaaattttgctatatatataatatcggcccgtcgaggtaaataacaaaagttaaagcatatggttaagattaatttccaataaattttagaaagtctaaacaacctctcaaggtattttaagaagatactttttccaataaaataaaatctatggaaaatatttggaagatatggaaatattgagctgtaaattctcatttatctgatttgtaaattttctttccaattttctgaaagtaaaaatttactttaattttttttgggaaaaacaacaccttttaatgtattggaataaggtgaatggtttgggctctctcaagggatgtctttcttgcattgcatcatcttctattcttcttctatctgcattgcatcaatgaatccactaaagtttggttcctggatgggtggtgatagagatggaaatccaaatgtcacggtaaaggtgataatgagggcttgctttctacattacttttttagggttagaattttgctggtcactcaacttgctaacacactttgctggtcattaagagtgagtccttgatttctatgtaaagattaacttgctaacacacttggttttatcaataaatttcttgttcagagaaggagtattgcatatgtttaggtggatggctatcgatctttacgtaagagcgattgacatcttaaaattatacgccgctctgagaatgaatgtgtggtttctgaccctcaagtgcttcagacactgagaatgaatgtgtgttttctgatcctcaagtgctcgacttctatattaattcgaaaggagttaagatcaagtagattgttgaacctcagtgaactagttaatgccctctgtgatcatttattcccattttgcttagtctgcctatatataattctaagtcaatgaacttgtataatattctaagcaagacatcagtagcatatagtataagttgatacacaataattaagccaaatgacttgggaaattatacgacttcagataaaaagcgctctagtctatggagtagattaagcatctgctggtgctggagtcgataggctccatagccaacgtacattttgtttcattttagaaaaagcattacaagttcttgtttggactatcagacaacaaaaaaaagtaacttttataattcgcctaggacccaaaagttatgagcacgggtctaatagtctaacattaataagtgttattgattaagatcgtaggcatgattaaagatgcattccagcttcagttaatagtcggtactatagttcctagtgttattgatactattctgctttactaaatcaaaatttcaaactattaaataatatagacttgtaagcaaacaataacaaggatatgatatcaataattatcgatttctattgaaaataattttgtcctatacgaacaacaataactgtttcaccaaatcaatatccaattttgcttggagtggccatgcaagatacttgtccttgacccttttctttgtctcataccagcttagaaagtcattgtttaggcaagtaccattaacattatttaaaatacagatcaagtcacgctaatacagatcaaatcaagtaccattagattttcttcttcttttggttgtaataaagaagagcataatttcagatgttgcaatctatatagtctacgagtaatagagttcaattccatcatcattagccatgataataaagacgtaacacataacgacacattgaacttaaaataaataaaaaaataaaaaaaaatgataagaaaggaacaatcaaagaaaaggccaagcaaattgattgatatttttgtaaagcttacgtaaaaaacttatatgaaaaaaatacgtaaatggatataagatttgatggcacaatacaaagacacgagtggtgagaaaagaaagaagaaaaagcaagaacccaaatggatcacacatctcatcaattctccttaaatggctaaaaaagatctcacccttctttacttttttccctctttctgatttgagat

SEQ ID NO: 37919 - DNA, 4292 bp, Arabidopsis thaliana landsberg
  unsure (1)..(4292): unsure at all n locations
taagacttctggaacttcttggggaatggtatgagaaaggaaaagttttggtttttgttcgttcgcaggaaaaatgtgatgctttgtataatgatttgatgaccaaatgtggttacgcctgtctatctcttcaggggggtaaggaacagactgatcgtgaatcagctatatctgattttaagagcgatgtctgcaatttgttgatcgccacaagtgttgcagccaggggtctagatgtgaaaaagctcgagttggttgtaaacttcgatgcaccaaaccactatgaagactatgtgcatcgtgttggtaggacaggtagggcagggcggaaaggctgtgctgtaacatttatctctgaggatgatgcaaaatatgcaccagatttagtcaaggccctggaactatctgagcagccagttcctgatgatgttaaagcagtagccgaagggttcatggcgaaagtaaaacagggtattgagcaagctcatggaactggctatggtggaagtggctttaaattcaacgaagaggaggatgaagttaggaaagcagcaaagaaagcacaagcgaaggagtatggctttgaagaagagaagtctgactcagaagatgagaatgatgtagtaagaaaggctggtggtgatatctcacagcagcagattactcttgctcagatagccgccattgcttctgctgcttctaaggctcctgtgactgctaaccaattgcttccaaatggtggtgggctagccactgagccaggtatccctcctactgatggagcaggccgcgttgcagccatgattgctgctgctaacgtgcaacagtaccttgcaaagattcaagctgatgcgatacctgaacactatgaagcagaattggaaatcaatgatttcccacagaatgctcggtggaaagttacccacaaagaaacgctgggaccaatatcagagtggagtggagctgctattaccaccaggggtcagttttatgaggcaggacgtataccgggacctggggaacggaagctgtacttattcattgaagggcctaccgaaaaatctgttaagacagcgaaagctgaactcaagcgtgttcttgaagacattacgaatcaggccatgtcctcacttcctggaggagcatccgggagatactcagtcctttaatgtaagtcgagaattctagtccaatttacaatctttggtgataaatttttgctaaatgctttgctttagccttgcatgcagactattttctttcttacataactcttttaatctcaaagttcagacttatggatctttagtttctgtcttttaacaggaaagcaacaatgaggtgtgtgattataagggattcaaatcactgagagttttattaaacaagtattattggttgatgttgtggaatacaatctctgcacaattgctaaatctttttacagacttgaacttgtcgtgattagagacatggtctcataatgcttggtgtttttcatcccgcacttctttttcctctttttaatcctattctctttttctatgtcatgtttatacaatgtcctcgatgggtttgctaatgagcattaccgcgtggtggctgttaaatgatgggtaaaatctagtttgatggaggttgtgtttggcactatgcttgttagtttcttgcatcaagttccccgttttacagcttttggcatcttttctgcaggggaaatctgtgaaacatgaagctcccggagagatgatatgtaattttttgtgatagacaaggcaaagcttttcttacctctccaatgggtaagagttggagcttattcagttatgtttctggatcctatgtctgtgaagctccgactatatctgcttgaccaatattcttttgagggaaaagtttacatctactgggggagttcatggacttgcgacctacttaaacgctgaaggatgctttccgagtaatggtaaaaggggatggtgcattcagtatgtagtagacataggatttatgaatcaagatagtagtactcaagttttgtggatcaaaatttaaaactaatgcttctgaaacagtgaaacagatggtctattatgtgttgatgataaacggctattctcgtagacaatagagaagcttgatccacatgaaaggttgttggtggccaaagtcgatttgtgtgaccgcacctttatcaaacaatgaacataaagaagtgtcagaatgttaagagtaatttctggaaaagggatggaacattctattcactccaaatgttagagtagcattgcacaactctaatgtctttgacacaatcagcaaaactgcatataattcaccagagtatcggaaaaataaccacaagattatatgacacttcaccatttcacggggactcgcattgtaaacaacgtagagttaaagacaattgtattcaattcaatatgaatatatccaatgttctcaaatgctactcggaaattcggaatcattgtaagttttgttaactgtattttctctagataatacaacatacaagaatataaaagaaggaacaaaatagaaattgatttgaaaaaatatttatactatatccacaattctttctttttaggtagttaactactaaaactataaccgaattgccatgcaaagcaaagtatgcgagaaccacaactaccactcccaagtttctcatcttctggattttacgtttcataattgatactctgtttcttagctcgataaaccagagaatacgaagatcgatctctctattcctctcgattctccgttctttctattccgtaagtcatcatcatcacgtctcacacgatttcaatgtttttcgtatttctattcttctcgatttgaatgcataactggttattctatagaagatattgttttggtttctttggtatcagattgaaagcgaagatgacgatgaggcttttggatctgttcataacctcatcgataccagttgcgaagattctgttgataacaggaattggattttacttggctcttgatcaagttaacattctcaatcacgatgcaagaaaacaactcaacaatgtcagtgttttccgtcacatgcatagccattcaccaattttggttaatttattctcttatgagttttggtttctacagatagttttctatgtgtttagtccttctcttgttgcaagcagtttatctgagactattacatacgaaagcatggtgaaaatgtaagtgtttttgattcaaagaactgattcttcttgaaaatgaaatgttgattttgttggggtcattttcaggtggttcatgccacttaatgttttgctaacattcatcattggttcgtttttgggttggattgttatcaaaatcactaaacctccttcgcatctccgtggcatcatcgttggttgttgtgctgctggtaactttaatatcatcttacaaaagctgttttcattttcttagattcagtgatgagattgtgtaatccaacagggaatttggggaatatgccactcattatcatcccagctatatgtaatgaaaagggaagtccttttggagatcctgagtcttgtgagaaatttggacttggttatattgcactctctatggcggtatgtcaccatttcttaactacttcttatgcttctctactaaagtttttttttaatgccaatacaagtcaaaaacgttttgtgatgtatatcagattggagccatttacatatggacttatgtatacaatcttatgcggatgctagcaaatcctgctggagaaaccgcaataaacagtacctcgtctacaatgccggggatttgtcccaaagtcgaagttgcggagcaggtattagtctaaacttttccttcttatattcttgttagccaacttactgattttgagagaatgtatatgtgacaaggttgggacttggggcaaggtcaaacaaagagtgtgctctgtagcagagaaaatcaatctacgaacaatatttgctccttcaactattgcagcggtttgtttcaatgttcccttgaactaaacgactgctatctagcttctgtatgttcttactagttaagcaactaatcctctttctcttcagcttatcgcgcttgcggttgggttaaatcctttactacggaagctactagtcggtaacacagctccacttcgagtgattgaggactcagtatctctattggggtattctacaacatattananatctcacttgtcagtgataattaacaatgcttacttgagtagcttaatt

SEQ ID NO: 37920 - DNA, 9309 bp, Arabidopsis thaliana landsberg
cttctggccctgcccaaactaaatacacagtccattgtgtgaccaaatttggaagagagtactcaggacaaaacacatcacaaaaacaaaataaaaacaagagatggtatattacaatggtggagtgaggtgcatacctaagtggaagaaggagcggagttggtcgtcaatagctgcctgtgattgctcccaggccatcgaagaatctccctgttgtgtctcagcttccccctgggggtactcgacctctgctccttcgtcgcgcccagcaccgctcagatgatactcgacctctcttcttctgttgcggtcagcaccgcggtcgcataagctacgcgacaggagaagtcgtgtactcctactgccagaccgagcgagtgcagccttcttctttctcccgagctcccgaggctcgaatgatgaatgcctcgcagggactggtgggactgctcgatcactaggctcaggcctgtggtgacttggctcaggcctgtggcgacttggctctggcgcatcatatctcctcgagggcatgtcctgaggaggctctccctgcggaatagctgtggtagaagaggagcagcttagcttgtctgtcagaaacttgatggccttgaagcacttgatgagtagcctctcttgtttcttgcaccacctctgcaacttactgttgtttctgtgagcttcgctcaagctcttgctctcccgcgctggaggtacgtgctctctgaaatgatatatgctcgtatcgtactccttctccctatcctcatctgtctcagcaatctcatcctctgtagcttccgtcgtttgtcatcagtcggatgagcgctctcaatgtagaggtaatcacgcgcaggtttgaagtcaatgttttcactctgaagtatggttaaggcctcgatgcagggaagccgaatgttggctgttcgggtcaaggagtgctcgaatttgtagcgatagaaatcgccaaccatgtcgttctccagaaactcacaacgacgcaaatgatctaaatccatcatcctcggatcaaaccccggagacgtgagaggtacaccacatgcaatcagaatcggtgtcacaacacctcctacacaaagggctcctcgcgccctcttcttccctttggtgtgcgcccacttcctgtatccacacaggtgggtcaacagaagcataaccggtggtgcatcattgaggtcgcccttcaggaccttcttcacctttgttctgcggagaatgcccttgagtgcagattcaatcatctccatgtctgtgttagacacggtgcctgtagattccctagagtacagaacattcgctacagagcgctgatagtagcggatcacagtgcttcaaatctggttgctcttagacctcgctgagttgagcgccatatcgttcccaaaggttaaccacaaatccttcaactcttccctctcgaacttgggtttagttccctttccactggggaaaccaaacaatccttccaagctcttgatagatagctggtaacgctgctcgttcactgaaaaggtcaagaactccaacccttcactctccagcttatctgatgtaagtccctgatacatctccacttgtagagtggagagaaactctattgtttccttcttggaagctatgtacgtcctccggtagccccagctgggctaaagtctcataacaggggtacctcgttccccagaagtcgtttagatcgaaaagtctgatgtactcctccactgtaacttcatcaggcctgttcaacagcttcgtctctctgtgccatgactcgggctcatacttgacgtcaatatcttcgtcgatcaactcatatctgctggtcattgctctctttcctctagcaatctcagctctcctctcattgcgtcgagctactgagcgttgggtctcagctctgaagctctcataagcttgtcgctctctctctggtccagttgaccaagattcagcttcatcgacgttgtaatccccatccatggaggattcgccgctgtagttactcatattgatttcctgaaaaagaatgtaactcaaagccaaatatcaatatgttagtccgaataaaacgcaaacactaaaccggtcaagtacgcggtcgagtaaaacggtcgagtacagtgagattgtggcttcgagtatagcgttcgagtgaaagtcaatgagagacggtaacagcgtggtcgagtgaatggtggcgaggcttgttcggttgattgcaacggcggtttgaggagcggtcgagtgaagagatgaacggaggcgaagtgaatggcaaggtcgagtgaacggtggatagttaagagatcgtgaagccagtccggtggtcgagtgaacggaggcgacggaagcacggtgaatggcgagaaactccggcgaagatgttgaggcgaagcgtaaagtggtcgagtgaaggagagacggtgagagagtacgcgaagctggaacgacgaggagctccggcgaagtcgagtaaatgaagatgaagatgaagcacggagaggtcgagttgcggtcaagtgagaaggatacgacggtgagacggtgaagcttccggcgaagtgaagggcggagtggtcgagtgaacggcgagtggtgagaaggaagagatggcaaaatcgagtaccgtcttcgagtgaaggagagagtgaaggcggtggcgcgaacggcgatggttgttttgtggtcgagtgaaggagggagacgaagccggaggggtgagatcgagtgtctttgtgtggtcgagtgtttggagaggaagagagatggtgaggtttggtcgagtgagtgttgtgaggaagagatggcgtcacttcgaaaagatgctgatgtatctcgtagattttgaaaagtttgtttgtaatatatagagattaaaagattgttgttggcttataaaaagctaagctctgtggttatagagtgatgtgtataacatttatacagactcatcatagagtttggttctttgtgtatattacatgtatgtacacttcttcatatattacagagatgtgtacataacataacatatccatatatgtttcatagattcctattatcagtatgctgtttctgattacatatttttacaagttcctaactttcaatcagattctgataaaaggctcttgaagatagtaaaacagtttgataaagatttgaaagaagaaacatatggagaatcagattaacaagtcattctcatacacagtaaactgtgtcagaaggtgtcctaagatatttactgattattatcatcatatttctccaagatgttatctttcaccaatttgattacttgaaaaactgaatctgaaattactaaaaacaaaacttatgaaaactgttttctttaaagggatgaagaatcagaaagaacgtagcgaattgaagtttttatcgatcaattgaatctaaagaatcatcacacataatcgacaactttcatcacattcttcagaccaatttcaaacaaggaaaattcgtaaaacggaatattgcaaaagaagcgaaattgagaaacgagaagaagaaatcgaatgaatgtgcaaagaacggcggaagatgagctatttataagagattgagaagaaaccctaaatttatctgtttgactaaaaaagacacaaaatctttaaactctctgtttggacacaagtacaattccagttcggactgtttttattggttacaaatttcctttttcttcctttgcttttgttgggccttcttgcttaaacattctttactcaattttggcccagtctattgttctaatttaatacaataaaccttgttaaaatgtagtttaacgaaagtgttaacaaatagccgtcttagctcagtggtagagcgcgtggcttttaaccacgtggccgtgggttcgatccccacagacggcgtagctctttgattttgttatagttagtcgttttattatttttagtcaaaaattcaattttacaatttaatcatggctttggcaagtgagcaagtgggtttaaatttaaatatttttcttttttttcgacagcaatacaattttataaaagcggtcgattttatgttttttaagttttataatccggcttaaataatagaattaggagatattaagaaaaataatataattaggatatattaattaaagtgaagaaaaatggcaaaaaaaaaaaaaagaggccaaaattctcacttttttcttcgaccgatttctttctcctatttcgtctatatcggcaccgatccaaaaacacatacgatgctgatgaagacgaagaatacagagagacgtatagagagagagacaaaggctgagccttttgggtttctcttagagagaagatctttagtgtgtgtccctacaatgtctgtcaagaataatagcttctcgtcggctgagattcccgatgtgcagaccaaccacgcgaccgatttaaccccgaagctacacaggatctacaagagaaggatgagacgaaagaagagaaagaaggagatgaggaagtgaaacacgacgaagcggaggaagaccaagaagtagtgaacccaacgacgccgaggaagatgatgatggtgacgatgcagaggaggacgaggaagaagaagtagaagcagaggaagatgaagaagcagaggaagaggaagaagaagaagaggaagaagaagaagaagaagaaggtaaaggatgtgtttttgtttcttctactctcgtgtaaacgtgagagtgttttgtgtttgttcatgtgatcgatttggttctctctctttgtttctgtttcagattctaaagaaagaagtccatcttctatatctggagaccaatcagagtaatgatttttctcatttctctgtctttctcttctccagatgtgtttagcttgtgatgggttctctactccaatatttctttacttctgttgttctagtcaattaaatgttaaaattgctctgcttgatttagtaatctgttgatgcatcttcttagcacttgcatgttgtaattcctctcgtattactgctcaaaacctctacgctcttgtggctaaacaatgtaaagtctttaccttgaataatagcggccattactggaagttgtgtcctaagaatgattcatcttctatttaacttgacctttagaatgtcagctttatttttgtcttgagatagattctttactgtagaataaagaagctggatggatctttcttgtttaattgtgtctgcatttttttcatgcaggtttatggaaattgatctaggggaaatccgtaaagacgtgcagtgtccaatatgcctttgttctcaattttgtcctgaatatttctcgttgggaacagaacttttgctaaagctcgaaagccgttactttcttcagtcggcatgaaattcttgcgtcttttcatatcgtattcttgtagataagtcggcatgatttggttcacactctatttttaagctacattactacatctggctgaaacgagtttcttgttgtcctgttttcaggtattataaagaaaacaaggactgtgatggaatgtctccacaggttctgccgggaatgtattgataagtcaatgagattggggtacggtttcaaattgtttgggtcttactcttattatctatgttgttttcgtttcttcttgcttctcagttctgtgccactttcaagttaaatatttcatcattctcttgggagccataagtgttggcttttctaaagcttttttttgagtttatattaactgaagtttctattgcaggaataacgaatgtcctgcttgcaggaagcattgtgcaagccggcgttctctaagagacgatccgaaatttgatgctcttattgctgctttatttacaaatattgatagttatgaggaagaggtaaagcatcaacatagttttcctgcttgtttgttttggagagattgttgctgttaaaacgctttgttttttttggttcaggaactggcttttcacgaagatgaaatggctcgtaataagcaggtcggataccatggagaatgttgttattcacttttttgactattgcttaaaatatacttaatcaccttcttatggcttttgtgtagattcaagcatctatagctcagatatcgcaacgacaatctgaggctcttgtgaaaagacgatctcttggtaaagaggcagcagtcttaatgagatcaccgcgtattgctagtggctccagaaggagacggaacagcagaaacatggaacaacaaaacgcatcagaagctcatgaagatgatgataatgatgataataacaacagaggaagagacaaagattcgtcttcagatgagcgtggtacagaagtccggcagaagaaacgtagaaaacggtctacaagtcgttcaacacaacacccttcttcttcaggtgcaaacaaaaacaatggtaactgtgcagataacgacacagaagtgtatagagacaccaaaggcatatctcccgggcttgtgtggaatcccgagatactggcttggggaagaggcgggacaaggagtaacacaaggcatgggaataatacttctggaggtagtagtaagagtgtaaggaatgcccgtgtgaacaaacttgttgaatatctacgcagcagcgtagatggatctagtgttgaggtaccaaagaaaaaaaacgatgattctcttcgtcttgatgacctgtatttttgattgcagttagtttggatttcgattaaacttaatctatcttgcagttggatattcatgtcaagcttgtctcgctggatacaaaatgtataccagacttaccacagccatatctctgttgccgacccactttgcttgtaaaacagctccgtgaagtgagcactctctctcccttacagttatcatcagacttgtcacagtagaaagtggttttttgttatatatattgatgcgaaagtacttcaatatgattcaataacaaaaatgatttcagtatcacatacgctaatatatttgtcaactttcaatgttgtacagttcgttgcacttcagatacatttgaagactgaagaggttgaattgttagtaacaagaagaagagtaggagaagatgcggcaatagagaatcttcctgcagtgactccagcttcagcagcagcatctaaagatgagatgctgagtttggaagacaatgaaacattgtcaaggctcaaaatcgatttcatttcaagccatgaacaacatttggtagcgtcaataataataatttttatctaaatatcttacagtctaatctaagtatgattcaactttgtgagactttttccttatttggtttgtgccttcagatcatagcttaccggaagaagcaaactgagtgaagaaacttggagcctaatggacgtgctgcggaagtgcaaacagtgtataatatataaacagatggatcagggcttgttttgtttatccgtttgctagattatatatctcagttggtttttttatttaggaagttttttgtttgtgacaaacttttttcctttgtgtattcattgtagacgttgcttagtatttccggagcaagtttttatatggaaaccttttttttactatatatatatcagtcaagtctcagaacacaggaagattatgctactgcctcattttataatggagacgtagagcggttggtgcggttcaaacgttcttgaacagcaatatctgctgctgcttagtcttttttactttttaacagctacctcatgtgaggagaaaccatcatcattgttctcctgtcgattcttctaatcactctaagctttggtgaatttggttttgtcgtctccttgttcgacctgtgtttaattgacatggagttttctttgtttaacaagtgtaggtaaaaatcaagaacagaaaagaagaaatcaactcctggtttggatcagaacttacttgtgaggtaagaatgggttgttaaggtttgacactggtctggtttgaggaacgattgtccttctcagttgttttagagctctctcttcctctacctgacaaagttttaggtaaaatacatttactatcatactcttttattagatacatctatacttggcagaaaatttatagtattataccatttttgcggcttccgcctcttcgagatgtctcttgtacatcatctctttctctttgatctggaaccaaagatgatagaacaagttagttgagaaatcaaaaggtttcttttaatctgctgatcgagttagataagcttactttatggtcaaagtctgccctttcgataggccgatggtccacatgcagattaaactcttgaaaaattctgtaagaggcctttagtttatccagaacagaaatttgatctctgagtcagccagtcaggtgagaattcacagaaattatttgagtctttgaatatgtaaaggaaactgtatatgttgacgaagaaacagcagatgaacagtcacttactctttaatcactggctgtgctctgaagacaataggaaacaaacaaaagctctatagcctgagacatttccgtcgacactactgaagatgtctctctccgtacgggctagcggctagcccgggccatcgtttctagatggaactcctgcaacagtaagaataaagccacgtttaaaacgtctcactcagaaaatattttggataagagcgtttgaatctcgtggtctgatcagtgtggttgacttgaaattctggagaatgtggtgtacttctttgtggtgtgggcatagctggagctgccaaaatctttgtgaaacagagaggaagcgcatgcttagttttcagttttctcatttctgtgcagctctgttgtttctgaagttacagaagagagagacgttgtgggaaagccacgcagtaccttcttattctaaggtcgctcttttaactaaggcatctttgccaacatctcttcctcaagctctgaagtgcgttaagtcttacaggacgaactctctgagatgtcacaaactctgaattctttcgcctttttagtgtcatcggcagacgcaatgcacctttatgttctctgtccgggtttgcttagtgactgaagggcagaagttgaagctcgtgttaacaagtccttgttttttcttgtgaggcaaagttgttggttttaggttcagaatctagtgacatcaacggtcggattaacacatacagtgagatagtgaaacaaatattgcagtttgagttgactaacttgtctggatttacctcccatcatcaagcttttgccttttgat

SEQ ID NO: 37921 - DNA, 6032 bp, Arabidopsis thaliana landsberg
agccaagttaaaaatgcttacacttgttccagcaaaaagttttccgtttgcagcagtcattgcatgcacctgagcaacggcccctttaagatgcacatctttactgttttgaacgttaaaagcctgcaaaattgataaacaaaaactttaacaccagaatcaactgagtttaacgaacagaattaagataacagaagaatatttgtgttaagagacgccttaaactaacctttacagcgtttggcaagccaaggaaaacccatggtccttcactaattagagaccctgcttctgcctggaggttgatggatcgaacacactgaccagaattgcagtcccaaattagcaatgtaccatcaccactgactgaaaagagtttatctgaaccctgaggaagggcgattcccttaatatcattcttgtgtccttcaagagcagctaccatggccagtccaggaaaacaagaccaagagtgtaagaactggcatttctcgccctttttgcagtttccatctttccaaaaattacacacactctttttgggactgccattgagtctcggcccacaacctctggtgtctgaaagagaagagctccttggcccatacacagcattcttcctcggctggtttgatacacgatgtcctgtgcctataacttgtggtttcgctgacccattggctgcattctgccttggcctgtttccctctggtgatttgtactcttttgacgtccaaaccagattccttgacaacttattaggacctttcttcataccattgtcatacggggcataaggtcttctcgtaactatatctgctgcaaaatcttgctgtctcgcaactccaaaattccttccgtgtgagtatttccttggcgccttgtaatccatactaaacattgagaaaacaccaactttagaagactgaaccacagagtcgataactgtttgcttcatccatgatgactgatgacccatacataaattttcacaagggtaacaagtccagaagcaaggagtttctgaattccccaatcgctagagaatcaaaagcaacacattcttctgtctgtaaccccaaattcaatccaggtatcaaagagcaccacgtccacagaaaaaaccaaataaatctctaattcagaactctaaacctataattcatcacctaaaacctattcaaaaccctaacactaacaacaagaagagaagatgtagctccgacaatgtacatagaagagaaactcgaatccataatccttatcggtgaaaccctaagatttatccatatccataccggtggaaaccctagatctctgggtatcgatgcgaataggaggatcgcgaatcgaggagatgaagaaacgcaacccaaagtgaaagcaggaagaagaaggcatcatcataatcgcggagaaaacgtagtcgaagaagaagcaaacctgagagatcaaacgtatgttgaatctagatcctcgattagggaacggtttcgaactcgatcgcagagagagccaaaagaaaaggaaatttagagacggaggaaattgaaggtcaagagtcgactgaaataaaactataggtcttgcataggagtggtgtatttatagatgagcgtgtggcggttacgctacattaatttatagttgggcttaacttaggcccatcattcgtgggtccaactaaggttaaattctatcattaggtttaggtcataatccctaaaccctaagatctttaagaaaaatggtaaatatatattaatcaacatgtaaataaagaaattaaaattagagagaactggaattttcgtacgattgccaaaatcatgtataaaaggattggttatgtctttttccaccggtttagaaaactagcattgtcccgatcatttttttaatgagaaaattaacgtagtttttcaaaaataattcaagtaagcaagaggagcttcataaacaataagataaagattctttagcacaaactacaaagacatgcaagtgcctctactgtcgctctagtcataaatttaggcttttccttcgaaaccagtcacagtgttgagtggtggctactggtcttcctcgtcggtgccgaagtaacgatcgccaaactcgcctaagcccggtataactctgaattcttggttcagacattggtctatttcagacgtcacaattttcaatgctggaaaacgtttgcagacacagtggattccctccggcgcctgtcagaaagcaaggtcatgacgagggaaagagagaagcaaagagatagagaagcagatacataatgagatctttagcttctacattcacaaaagagcgaaagatcgatatatagctttttacactcaccgatataaggttgaggaatataatgtgagcttcaggaacacctttctgtatgagtagttcaatggcttgattagccgagttaccttcaagaaaaagaaatatcacgagatatgaatttcgagaaccaaaaatccatcaaaaaggaccaaaatcgaaatatacagcgtagagagacagagtacctgtggctaagacaggatctagaagcaggacatggcgttcagatatgtcgtgaggaagcttctcataaataagctgattatcacgacaagagaaacttcaaaattcgtgtttataaaaagagattatacttgatacttttaaaaacagagcaaaatattaataggaagacctgttttccattatcgccatcacggtggatgagaatcttccctattttaattcctttgcagcaagcgcgtaatgcattttccatgctttcaccactaggaaaaacatacaaaacagaaaccacttaggagagataatttaatcgcaaacaagtaaatttatgccttgcatgatgtaaaacagttggaagaataagcatcttatcatatcaaacttaaccaaatacaatacctttcaaaggctcaccttctaataattgagaccccacaaagtttcttgcagaaatcaacaccggtatatacagctcctggtgtggaaaagataagtttaaatgagttgaataagctaactctaactagattgacgtgaaggagacggacatctgatgaccaagttatataagaaagtgtatacagtattgttacagctcatgcattctcctcttctacctgtcggagtaactacttgtttctcagtgaaaggcaaatggccaagaccatgctccacaacctgaaataaaggcatcaacaattgaaatgacaaggcgtggaagctgagtaacatttaaagggatgacacgagtaaaaagagtaccaaacgaatgaggcgatctgagtaaaacacgaagtcatgttttgatatgtccttctctcgaatgagagtgtgcatgcctcttatctgcagttatgatcttaaagtgagaatatggttttaagccttaccatctgaatcaagcatcaaacagcaggaaaaggcagaaattacctgaaatgttgtttcaataacaaaaacatttgggtagattttgcagagatcatgttgcccaagttttgtgtggatatgttgcacaatcaaatcaactgcaacgtgattgtcacctcctcgtggaatgatcacatcagcatatttctttgaggggagcacaaaatcatcaaacgcaggcttcacaaactttgcatactgcagatgaacataacactctcaaaacaagataaggtggaaaataaaggaatctcagaaagaaacactgttataaagaagaatagttcaaagggcggaattaagctagagtcactcgaacaacaagagagacattgaattgttcagtatttcacaaaaacccataggctgctataattctttgtcttgtattcacacattagagcactaactaagataggtgaaccttagtgacaaattttaccccaaaacctgaaacaaagactaacctgttcaagcacagagtcaacatccctacccctctcaaccgtgtcacgcctgattctgcgagcaagcctcacatcagcatctggaaccaataaatggctaagatgagaactttttaacttcaaagaggattattgacatttcagaaagattcaaagtttgctaagtatatagctccaaagggaattcattcagtccttaatggtcaacaagtgatgaaatggcgaaagtgggactagtgagttaatccatcaaaggccccatcaggcatcagccagaacagaaagtggacagtttccatcaaactataaaattgtcactatatcatttatagttgtgcagaacaaataaggtcatattataaaggagaaccaaaaagaaggagagacaagatactgcagctagttaacctgtgtcaacgaagatcttcatattcattaggtcccgaactcgtgagtcatgaaaaactagaatcccttccaaaatgatgacatcacaagcattgacctgaccaaagcgacaactgattggttttaagaaacgataatccgaagattcagccacatgacattacaagctaaacccataaaaccgcagaaaagaaccatataaggaggtcaaacaaaagaagatccatgcacctggcgaaaagcatctactttacgttgatgggtcttgaagtcataaattggaatttgatagggttgcccactcttgagtatgtcaacgcaatgcaaaagctgctcagtgtcaaaggcatctgcagaaaatgaaaaacaagagacgttaaaaaatttcaccaaaacatcaatgtttacaaatcaaaagaacaactcaccaggatgatcaaaattgtattcttgtacatgctcaagttcttcagatgtcaaaccacggtaaaacgaatcctaatcaacaaaagatatcaaacattataagatgtgaatctcatacagaataaagtgggacattgagaacaagattgaagcaatagaatcaaacctgattaactaaaacgacacgatggtcatgaagttgctggattatcatgtcacagaccgtggtcttaccagaagccgtaccaccagaaacccctgtcaaaaggtcaaatcaaacaaaacgtcaaaaaaaaaaaaaacgatactttaatacaattgaaaccaaattagttctgttaaatctcaggagcacaaaaaatgctaccatactcagaggttctatcatcaaaaccctagattccaacgaagttaatgcagaagaaactctcgaaatcaagagagacagaacccaatttcccaaatttgataaaacctaaacaacgctagagcgaaatggggtttgagaaatcaccgataatgaagggctgcttaggcgcttcgggatcggaagaagacggagaagaagaagaaacagctgatcggagtgaagagacgacggaggaattgggtggagaagaagagagaaggccgtcgaagcgaagaccggagaattgaggccctgatgccttctccatcgcgtagtctaaagaagaagaatcttccggcattggattgcgataaaaaggtggttgtagatttggattttatgatttttccggcgaatcgaaaaaaaacagctccgtagtgaagactggacaagtgacaacgattctgttcaacgcaaatatcagacctctgtcttgtttattataaataatgtgtttgtacttacatttaggatttgggataggaacaaatcttattatattagattttatattaatattttggcttataaatttatttattttatgttttgataatttgatactctttattgcaccaaattgtggtgatgctaattaaataagaaaacaaataaaatagatatacatttttttttttggtggataaatagatatacatttcgtagaaactgtattgggcttgtgaaaataaaagacataataaggaatattccacttttttacttccattttataccaatcaacaaagctacacttgttataggaaaatgtatatgagatcaaaatagtccaaaagtggataaaacaatattctgctctaaaatgcttttattgaaattttcaagta

SEQ ID NO: 37922 - DNA, 2805 bp, Arabidopsis thaliana landsberg
agtgtcttcgagtacattttattactaatgtttttcaataatgtcactcacttattactaatttttgtaactgaagttacgtatattttaaacatgaaaaacctaaatcaatcttgtagaagcttacagaacaacatagcatcaaatcccgggggtagagatcgtcctatatcactaccaatcttacttacacattgtatgtgtatcatctatttaacttttctacaatttagataaccatcgcgagatcatgaaaactgaaaacaattttggaatcttataggtgttacagctaattatgtggtgccgtacgaatttacacacaaatgtgctcattccattctcatggctggatttcagagcacgctaagaaaatacgaagggtctaaacatgaattctttctctttactttggtttaattaccatttattcgaacagatgcctctaaatatgtctttgccatgtacagggaaactaattgtaatgaagtagcggaatggctcagacgataccttgggctctgaggattaacactaaagtctacgttataagaaaaaggaatcagacaccagactatagtacaatatatatacattaaaaaagttttatattttctttatgtctttctttctttctttgctattcatagtcaatagttaatgtattttacgttagtaaaccaaaatgaatttaaccgtccactttatttatataacttaattagtgaggtacatatttaattgagttggttaataacttcttatttttaatttgtgatatttttatttcatctataaaatgccacatttcatttatttttgggtgacctttttgtctggtaacgacacgggataagatcaaagtaaggaatgataaaattataagaaaaagccataataaagttgataacaattaagagtcattctaaggaacaaatcaaataataatcttttatgctacaaagacatgagactctcgcaatgattcgggaaattatagagcgcatatatacgtcccctaccaactccattactgagcctaaattcttcgtctacaattccattaaactctacttttctaaacctatttttcttcggatcacaaaacaaaacaaacgatttaagatactgcgttgaaatataaacaaactcaccagcatgagtgacaccagttagcttggaaatggtgttcgttctcaggtcattgtgaacataacgtgcaagaaactgtttactcgaccacttgtgtttctctgcatcctccaaaatccacaatcttataccatcgttattcaaggtatatagtttatcaacacaagctaacctcccttcataatttatcataacatgcctataaatattttccaatggtagttttatcatatcgaatttttcagatttgacatgaaagctcattatacaccaaacacgcgtatgataaacataggctatataatatacaacccccttaatgcatcttccccaagtatcatttgtagaacggtgcttatgcttagtttttaccgttctccatgatttttgagctgatcccaacgttaaaacctgacactcgtcgcaagttctattacgaggcagacacactactttgtgtttaccttctattggatcgtatcctaaaaagactgttagttccttccagctttttcttggtttgggtaaggttaagaactgtctcgtgatagggttccaaactatcggcatttttgatgtcttaaagcagatcaagccctggacagattccgtagaggaataaatactacatccttctggtaattccatatgataacgataaagaggctgagaagaagagtaagaccttctagaattctgaagtgaatgaagatgttgcggaattgaggacacaaacaacttgtcattttatatgaagcaaactaaaagactcggccgtggggaccgagtttcgaacaagttgatgaaatatggatcggtggtgattgataaccaaagcttagacacgcaacgaaacgactaaaattatatcgttttgcttagccaaactctatgtcacgcttctaactgaggatacgactaaaactaaattgttttgcttagtacgtttttaactgagttacgttaaaacggttaactctttatagatcaaagttcgtaggaaatggctatcagacttgaggtttagataaataatttgaattttttttgtttcatatttaaaattaaagggctttgtgcaaaaacactttcaaaatcgtccatttatgtaactaaactctccacctccgaaaatgttgaataatcttacgaaatcaaaaataatacgcaatataatcttatacatttattgtaaacatattcacgatcacatatattttatttttaaaaatctaaaggtagaattaaactcctcgttttaaggacttcgatttggctaattggttgaggtgagatgattccctgtgcagttcatgtttacacaaaaaagaagaagagacaagaaccataatttgtattttattacaaagaaccatcgtagtgacacgggatataatcaaagtaagcaatgagaaattattaagcaaaattcataaattagcataaatgatcattaaaaaaaaagaagggaaaaaatggaaaaaaagtttgcgaacctttcaaagtttgggacgaaagaaaagcataaagctttcaaagaggtacagtttaaatgtctaaaggtttagtgttgacttattgataaaagtgatcgaagtttatgttgactgtggccaatgtaggacaagtgtcgtataaggttatccggtcaac

SEQ ID NO: 37923 - DNA, 568 bp, Arabidopsis thaliana landsberg
cttgaacttatactcaatgcagttaatatgaatttcgtaacattttctgatttttttgataattcccaactaaaaggggaaattttctgcatttttgttatagcaattgcagccgctgaagcagctattggattagctatagtctcgtcaatttatcgtaacagaaaatcaattcgcataaaccaatcgaccttattaaataagtaacataactaaaaaaattatagattgaaatttgcatatatgataagttatgacctacgagattctatttgtaaaaatctaagaaatcaaagtattttagccccattttttatgaattgagccaaaattcattacaaaaattctattaaaggaaatcattgcttcatctagtattttaatataccattcagttagaagtttactagattgaaaatttatgacattcaaaaaactatcgatcctatgtcacattcagtaaaaatttatgatacttgtataggatgtactcaatgtgtccgagcatgccctacagacgtattagaaatgataccttggggtggatgtaaagctaagcaaatagctt

SEQ ID NO: 37924 - DNA, 2967 bp, Arabidopsis thaliana landsberg
gaccaatcaggagattcacgaatagctttaaaggcattgtaaataggcttgctttgccccaacctgagctggaacttcactttctctggctgcataagaccaatgtagttaagtaaaacaagatataaatcccccaagtcactgaactaacacacaaaaaacaagcatgattagttattcaacctgaacgtcttcgatggcagcacgtagctcaggtgtgtccttgacagccttaaggtgattgatcattccccaaacaacagttaaccgatcaacgattttctctaatggttccaccagttttggccatgttggctccacagatttctctagctcctccaattcagcttcctgaaaatcaatcaaagaggctataacaatcgaatcaaaaatacatgaatctgtgaagaaaaacgaagaagaaggtgtgaacatacgagatgctgcaatagagcacgaatcccaggacgaacatgactggcatcaacggaatcaaacggagggaaatcgaagtcctgcaagagaggattcgaggaaagagtctcgtcggagacgacggattccacggcggcagcggcggcggaagacatggacggaggagaggagaaggggcggaaagaggaggaggagagagaggtggaagtggtggatctaggaggagggagacaaaaagagaaagaagaagaccagatggggcaaggatatgatttacgaaaagttgagggacgaaaatgacaagaagaagatgagaaatatttgggttttggcgaacgacgaagaagattgagagaggctcgagacgttggagtcgccattaacatgtttgctattacaagcgttgccattattcttattctcttcatttttatttttattttttcttattttctttgagattttttgggtttggatttgactaagtgtgactacatgcgattatgttgtgaggttccaaagtcgatgatatgttaatcgatgtgccaaagggtaatcttgtcaagtcaaattgaaattaaaacatctgtttacgaatatatttattgtttttgaaatagttaacaaaagctggaatagctcagttggttagagcgtgtggctgttaaccacaaggtcggaggttcgacccctccttctagcgatttagagtttttgatattagagtttcttaccgaatagaagaaactcaaatttttgcaaactttggagattgtagcactactaatatattatctgtattcatttcatttcttataaaaacgaatatcaaacagcaatcatttacattttctttcaattgaagtaaccacaatgtacaacatattaagagcgacaccatctgttttggtcatatcgatcagctctctaagtaaatcgcgtctctctttccccagccgaggccattagaagccccacagcaacagtaaacatcaccagcattccaacaagcaaagcatatgttcgcgtagatgatctcctatactccccaaacagatatatcccccaaaaagtcgatactaaaggaagtgcctgtacaagaataccaatcaagaatcactaaaacgcaagcaaagatcaaagaaacgttctagtttaggattataagtgtttgtgtgacctgaacagcatctgaggctgcatatcctgcagcttgtccacccatgaactgaagaccgttaccaaacccacataacaatccagctgcaagtgcccaacctcttccgttccagtcactcaggtattctctaaaggaagatcttggtgagtctagcacaggtttgtacaggaaactaatgttgagagcgaccgcgattacaaagcaagatagtgagaagtagaagaacgcagtgtagacaatcagcttgggaacgccttgttttagagtgtgccattgatcgtttgttgcaaggttgaatagtggtgagaacaatgagaaagaaagtcctgcaaaaaaagttattcccagaccaacaaccatgctctttcctaacacctgaatccaaaagaagttcatagagattgatttacgttgttgcctcgaaactcaagaccaacttagaagaactaaagagaaagatcctactttgattgctcttttgttttcgagtgctataagaaaagctgcagacccttcctttacattctccatctctttttcttcttcttcttcttctactataaaactaaagaagtgatgatgagtgatcttgttaacactatcagacaattatgtatgtcaaactttcacctccaaatagtctctggcactcttcaggggtcacagtttcacaatcccctgagagttttccgagtttcgccttgatatcagcagaattggaagagtgaacagcagaaccaagacaaacagctaccaagaagcaaccaacaccagagaaaagaatatcagctctgttcaatccgttgtccaaaaagtaattgacagtagtgcctacaacaacggtgatgctcgcagctgtcacttctgtaacagacagaccaacaaaagctaaagaatactgagtagcaaggtttccaatacttaaaccaaccccacccgccattgcaaacaacacagagggccaattatcttgaatctgtagcagcagcagcaagagattcatcaatgcaatctccattatagagatcaaaatccttcaagttctaacctgagtgagttgtgtaatgaaacttggtgcctcatgtgtactttcacctatcccaccaaacacaaaggctataaagattgcagccaaaaagttagtgatggaataatcaagataagtatgttgtgggagacgaccacgccgttcaagaagagccataagagcaggccaagtgcctaaacagagcagagaaagcaatagacataatattgctcctcttttgctctccacaacatatattcccaattcttgagctatcatcatcgaccttcttcgtcaataagttcctgtttctcattaaagatag

SEQ ID NO: 37925 - DNA, 5728 bp, Arabidopsis thaliana landsberg
  unsure (1)..(5728): unsure at all n locations
tagagatgatgatgttatcttttgtaaagatttaacgaccgttgtgactattaaaaatttctcccaaatcgagaacaaagctatttcacccgtcttgtctactctcaaatgtcttgacctttttttttttttgtttttttgaaatttttaaaaattaataagaaaaaacttaaaggatttgaaaaagagaatctgagaggagcacgacgagtcgacgactattacttcctctgatcagccatgtccagtggcgattgcttccattgtcatcaaccaggccactgggccaaaaactgtcctctcaaaaccactacgaaacccaccgccgccgcagccccttctccgccggacattcactgtccctgcaacgccggaccttgcaacactgtgacttctaaaactgagaaaaacccaaacaggagattctacacatgcccaagctgtggatatttcaagtggtgtgatcaagtaagtatcaaatctgagccactctctgttcttcctacttgtccttgtggcgcagggccttgtaaaagagtaacattcattcatggaccaaacactcaacgttcttactttgcttgctgcgttaagaaggtaacaaaagaaaacgaaactctttttcattacaataagagtctgatttgaaaagttgttttgttttagggtttaggagattgtggattctttaaatgggaggatggtgagagtttgctacatgaaactgagttggactctgatggtaatgtgaaaaggaacagacttggagttgtggttgaattagaattgaatccagcttcatctagtgagtctaatactcttggaaacagannnnnnnnnnnnnnnnnnnnnnntccagtcactgtgggaaaggaatcgattccggttttcgcaggtttcaacgatcaaggatcggtctccaacagtgagttgttttacattttggcagtcactaattttggaatgcagcaaacaaagttgttgtgtgtgcattatccggtgttcttgatgctaggcaatttttcatttcatttgagtgcttatattcctttatgttgtttttttgctaggcattgtcccttcatttgatttgattacactgtatgacgatgcggttcgccttgagacgaaagagccagtactcccttcagttgcccctaaacatcttgatactcaagtggagactttgtgtggtaatgcattggaggccgtagagagtagttctcagaacacaagcgatctagttttgaatgctaacaacaaacctgagcatatacatcaacgagctgcgacatctggtgaaaccgaggcctcatattcaggtagctcctccatgatggtacttattgagcaatataagtcagagaagctctatctcgagagtatatctatgaaacatgttgaggcgttgactgcctatacgggttcgtacaagcagttagagtcgcttcgtgatagagcacatagtcttaagaagcagttacttgaggtagagaaacaggtgaagctttgtgaggctgagacctcagagtttgcagcaagtgttcaagaagtttctggtgaaatggcgaaatcgcagaagaaaatggtggagatagctgggaaagtagctaaggaagtgagagttgacaagcaaagggattaagcagctccgtagagaagaagaagtagaagaagaagcagaagaagaagctgagaatggacttatcttccacatgaatgtttctataatctgtatattgaagatgatcgacgttttgtaaaacttgtattatttagggctaagcattttgtgatattcctaaataacagccacaatattatttagcttgtagtctttgtcctttccttgaatcagataatgaagttaactatagtcaccctccatgttgatccacatttgctgcattgtacgtaacaaggctttagcttctgcttccagcggtgatagtacagttccaatttttgcaaaactcgacaagcagcaggtttgtaacgcccgtgtcccgagttagggagtaaccaagatcttacacacgccgaattcgaggacgaattcagtttaaggggggtagacttgtaacgaccgcgtcccgcgttcataaagaggcaggtttgttttaggagaaaactagatcatggtcgaggaacggaccaaaatactaagtaggaagaacgagaaagtataagctaaaccagctaggtgagctggacaagctgtatgaactagctaggtaagctatgtaaactaaactagctggaagactagctagctcagctaggtgagctgaccgagagctcgactgagctcggtgagctgatcgggtactgacccagctgggtggtcattctaagtaagatcttgcttactccattcgttaaacgactcgtcatcggtcgtgaattgatgaaccaatccctatcgttacttcaccatacagccaaccaaccccactggtctaagtacaacgatagagattggggatcgtacgattcccttggttcacgatgaccaaataaagctcttggcttattggtccatccgtcctctaaacgtactccccttcgttccatggtggacgattgagcccttggcttatcgaaccatccatgtttccgatccggtcatttactacgaccgcccacggtttactaaccgtttatccgtccggtctatggtggtcgataaagctttcggcttatttgaaaggccccgatccggactgcctaaagtccgggcgagttctctcgacccaagccactaagtgactcggccctaaccgtttatgaggttctttcctagtctaatccgtttcatatgattccgagattcaatatatgagacgaatagagtaaacaaacaatcggacactttattaattaagcaaaggattcgatacaacctatgagtttgcatataagctattacaagtcatataatcgatccctagactatctgaactatcaccacccatcatcccggccttgagtctctcgcgcctaagccaagtccttcccacgatcaccattcgttcctgaaagtcatagagccataagtaatcttatttacttaatcatatgtatgcaagtccatgcaatgctctatatgccatacactactccgatccgtggagagaattcagagaggggaagatcgcgcatcagtccggccgattctcggcaggtcagttaagacccgccggtcctccgccgagccgcgtccccgcctcagccgatccctacccggaccgagtcttgtgtaggatgcacatgacccggatactactcagccctctagtcggtcctttcaaggatccgactactaattcacatcctagaacccttagactcaaagtctaggatcccttaccttccttctcgaggttaggtcgatccgaccttccttctttattgccggccacagcccggctaccgaatcctaagactatttattctcccaagagggagagagttttaatggtgagttttcttgtgttttcggtgtgttgtggtgagtggaatggtcctgggcgcccttccttatatagggggcgaatggatgcttcccgaatcaacacatccgttccttgcacctttccgaagagttgcacctttccgaagagttgcgcccttccgaagagttgcacctttccgaagagttgtatctcttcgcccataaccgcccagttcgtccgtcactcgcccatctacctcgagctcgtccgtcactcgtccagctacctcgagttcaaccgtcactcgtccagctgcctcgagctcgtccgtcactcgtccagctgcccgagctggactgtcactcgacctgagtaaccgtcactccttccagctgagcttgagctttgggcgagctgacccaagtgatttctttacgatcctagcttagcctgcatgatttcccctttgtccgagcttatggccagctccttctcacttgtccgagactccaccttcctctctcggaccaagtcctagccaacgatcctattgaggatcgcgggcgttacaagtctcccccccttgaattggattcgtcctcgaatccgcatcaagttgatctttacccatctccttgaaccactccggaaaattggccttcatcttattctcggtttcccaagtgtattcctcacggcctccacaattccacaagacttttaacaaatcccttgattttccccgagtccctttcgtcattcggtccatgatccgtaccggccatgcttccaccgtcatgttctcctttaacccgggaggtatatcttccacgctttcttcttgatcacttaaacacttccgtaattgtgacacatggaagacgttgtgaaacgcgtttagtttgggaggaaggtcaagtttgtatgccaccgcccctactcgttcgatcaccttgtacgggccaacataccttgggcttaactttttccttgaggtgaatcgccctgcccctttgtaggtcatcgcctttaagtacaccaaatctcctacttggaattccaattcctttcgacgtttgttggcgtagcttttctgtcgatcttgggcttcctttaacttgatttttaagaacttcattctctccgtggtttcatccacgatcgtaggtccaaacaaccgacgttcgcccacgggcgtccaacacaacggtgttctacaagctcggccatacaacgcctcatagggagacataccaatactagcttgaaaactattattgtatgcaaactctactaaccttagatatttctcccagtttcctccccaatctaagacgcatgccctcaacatgtcctcgagggtttgaatcgttcgttcggactgtccgtccgtctgtgggtggtaggcagtacttaggttcactcgagttcctaaggccttttggaaagccttccaaaactttgacgtgaaccttgtgtctcggtctgacactatactaaccggaatcccatgtaaccgcacgatctcgtctatatacttctcggcaatgatttctgctccatccttatccgagatcgccatgaagtgcgcagacttagtcaatcggtctaccacaacccataccgcattgtgtttggacttgatccccgttggcagtccggtgacgaagtccatcgttatgtggtcccacttccattccggtataggtaggttttgtaacaacccacttggtacttgatgctccgctttgaccagttgacaagtcgggcacttggccacccatctggccacgtctttcttcattcctacccaatggtagtaccttttaaggtcgcggtacatcttgttcgacccaggatggattgagaacttcgattgatgggcctctcttaggatctcctcctttaatgccctatcgttcggcacacatactcgaccgttcaccacgattgtaccattgttcgaggtttggtactcggtcttattgtttagtgcccatccttttatctcctcgtcccgttcctgagccagcctgatcctactaagcaggtcggcctgatcggcagctcccaaccctaagggttcaacttctttagacaaggcattcacatgcaatgtccccatcatgttaaccaagtccacttggctccgttccgcctcaacttccgagcgcctcctactcagggcgtcggcgacttggttggccttgcccggatggtacgctatatccaagtcgtaatccgccacaagctccatccaccttctttgcctt

SEQ ID NO: 37926 - DNA, 5185 bp, Arabidopsis thaliana landsberg
tatctattgtctggattcacgttctaggtgatcaatctagatctagtattaagaacaattaaagatgaagaattctacagataacctagcagaggggcgatttaataaaccatatgaatccctaatgagaaaccctaaacctaacaagtggattactcagacatgatcaaagaaacacaaatcataatcttaataggaaatcaatagtcaatatatcatgagaaaaactaagaaagatcttttgtaaagggaatcttgataacacggctttttagcccatttagctattgttttcttatgtttcagagagcatttgtggccatcattctagattaagaggagaaacacatattctaggtgccaagaaggttttaagagttcgaagctaaaagtatcaaaaggcgaccattcaagtacttcagaattttaaaacatgcggccaaggtcttccccatcacggaaacaagatattttggtatgaatggaaatctagaagagtcaagattaacgtcaaagtcaaatcaaagcaatccatgaagccgtttggaagatatgacccgaagagtaaagacatgtcaagatccggctgtttggaaataataaatccggaacacagccgcccgataagacttgaactagggcagctccgagtggctcaccaccaaccactaggtcattcccaagtctttccctttttgcgccgccgccattaagctcttttcctgaagcccactacccggcccgatcacttactaatccggcggattgacgttcttacctctaaacctaattcttgggcctcaagtacaaatacttgttataagccctaaccctaggtgtgccttcatcaaaagcaaaccctagccgtcgccgagagctgccgactcgccgccgcaactcttgagctcgaagatcaccatctatctctctttctcttttgttttgtataagactctttaaggtggagctttgcctcttgtgttcttcatttaaagaagtaatctctaaaccctttttaagttttatttgtctttttgttttggtttactcaacccaacttttaattagctcctttgccatgagcgagtagatctctagttaggttttagggggtttcaaaggggaattcatggggactttagatcaagtttaggttggcggtttctatggttttgtttgatcgtttacactattctttctagttgagtttaatcttaatgcatgtatgtttggaactccacctagtacatgatcttaggtattttatacttggtagaatcttgtataattgcttgaactaactcaactaaataaataactataactgttgctcacccgccgagtgatagggacttatggactagaattgaacttgaacttaatgctttgatctgtatctcgaaaccatgttagcacctactagccgttagggcaactgagtggcgaggtatagttagaattgccggctttcacctactagccgttagggatagcttgtcttgcctgagttttgtatgtctgagaatttggaagtaaacaaacctaaccatgttatcacctagattgagatctatacctttatgttgaaccatgacatccggagaaacccccaaagacctagcgcttctctcttattgcttacagtttattttagttacttgtcttttatttttcttattcaatgcatacaacaaccccctctctttttatttggtcctaacttcactctcttctaaaggatttctctgaactacttctctccttgtggatttgatcctaaattactactttgaaatattgtgcacttgtagtagtcgtgtggtctttcaggtaaaagcatgaggcaaaataaaacacgcatcacttcgccataagcgtagcgacaaaattaagtctcgagatctaaaagaactttcataatcagataacttaatattttaacattcaatagcagtggcatgtactcttacaaagaggatattgaacattttatgggctaggtaaaaaggctattatttggtggctcaagtgttttgggttctcaaaaagtgtaactgatgcatgacattatgcgaaatcacagtgacacacagaccaattaggaggtacatagcttcccttaagttcggatcaaaccaaccaacacatactattttaatcaaatcaatgagttcctatgatgcttaacaatataaccaataataactcaacatatctggttccttgatctcctttcccgctctttctctttttttcgtttttttttttttttttattctcttgttttttttagagcggaggagtggaaccggtgtctcacaaaaatctgcattaggaaaactcaacaaatgtaacatcacatacccatgaatataacaaatgtacaacctcaaaaccataatggctaaatatcatcacatatgaacaaccaacaaactacaactcactatcctaacagaaggaaagctatgttggtccgtatactccgtagttttcgcacatggatgcatatcataatgatcatataagaatgcatgaggtttcaaacaatgggtgggggaacaggtgtggtactagactaaaaatgagtctagtcattcagagttagcaaagagtgattaaaatgatgcaaagaaaactctgaatgtatgatccattacatgattctcaagcccctaagtgagatagattaagtccagattaagttcaaatagataagagaaagctcaattcatccaaatttcaaagagatagggattattattaagcgatctagtgatggattttcctgacattccaagttattgaatagtgctaaaatggtcccaaggcaatcaaatcaagcatggtgcaattctctctgaaaagatcacagttctcaaacagcattttgactcaatcaaggacacgattttgacttgataaaacaaactgactcaagaaaaagcaaaacaaaacagcaaactagattagtagacaagtgacaacctccccccgacttgcttcacaccaactcggtgtgaaaaccgttcaaaggaaagctgccgcacagtgtgaggggaataacaaggggaataacaaggggaagagtgtgagttatagcgctactcaacggtggtgggtggggctctcgctagagctctgctctcctggctgcctcctgctcctgcctaaccgatggcctagggactgctctggtggtgtttgcgaggtggacgctccagcagcagggaccaacctctcagcatgtcgatcctcagtagccttggaccggtgttcacggtctccatcatccactcctcctccgcgagtgcaaacacaaggcctgatctttaaaatggctctatacatcatgtgcatcatactgttgttcttccttgtcgattcgatcatccatgccatctgctgggagatatcgtcacccgctggtggtgatgaaacaaggtatggtgctggatcctcaggtagcagcaagtatggctggtcgtgcgcggaaggtgcctgatcagcataatcctcatgatcgtcatcattaccgacaacatggtcagctgtaggctgggccgctgcagtctggcgtcgtctagtgacagctccggaagggttacgaacaaggtactgcgcgtccggttcgaacgctagattcgtcgcggagagaaatgaggtaatgtgctggttgggtatcctgcaataataagtaaccccgtctctacccaaaaattggtataattgactatctggcttggtgaaattagtgcgaatcaggtactgcaaatccatttccgctaccgttgggggacaaattgtttcggtcttagagaggtcgaaattgcaacccctgaacaatggggtaagggcggtaccagcgaagatgctctgcccggctgatgtagaacagtattcttcatcttcaccaaggtgtcacacaaaaccgcagctacattagtgtcgggagctggaagatctgagtacgcgggtagtagatgtttgactccgtagaaaagtagtggtaactcggtctctgtcacagctgcaatcactggcttgaagtgcaaaacgctaccgaggactttcgcaacataacgcacaaccggactcctaatatggatatcttcgctttgcgcgactgatatggtcttgtagctatcgtgttccaaaagtcatcagcaacctcagaagacaatttagggaactcaaccgcttctccttttgtaaatccatacatgtcgcatatctcaaacagtgtcttgctgtagtgcttcttgttaagaatgaatgtgagttttccttgacttggtttcgggttctcaggatccgtgtaagtgagtcgacatgtggcgatgaactccttcacatcgatatgctttaagtctactagcatctttgtgtccatgccatcccaagtgcctgtgataggacgtttattaggatcatcgtttgttggtgcctcggtattgctcatgcgtgctctagaactgcctgcagcggctttagcgcgtcccatatctatcaaaagaaacaaagtaaagtcaagaaatcactcgaaaacaagtcaaaagcttaaccattgtactttagttactaaaactaacaatgcatcatgaataatcaagtgtcaagctttcaaactcgtttttcccttttttttttcaaaaatgaagaaaaagtccctgttttttactaagggaaaattttcaaatttcaaattaagccttaacccagcaattaaaggcacagttaggttctccaaactatcttagtcaagaatctagcatcaaataactcataagcatcatgaaattcaaagaatttgagatttttcacctttgaaaaacggaacctaaaagaggaatttcgagctcatacctttgcagattgagaaaacagacaataaatatggaaagagggcaaaaatccgagtgaaatagacaccaattttgtcaaaaacgaccaaaaaatgaaagagatgagtttagggatttttggtgttcttgagaaaccaaaaaaatgaagaagatgaagtggatgtcgtgaatggggaaggggaattcgatccctggtttttgtgttcggcgtccggttcgatttgagtgaagaccggttcaatttcggataaaaaacattcgccggtttggaccacccagggatcgatcgatccgaggaggggatcgatcgatcccagtcc

SEQ ID NO: 37927 - DNA, 4861 bp, Arabidopsis thaliana landsberg
atgagtacatacaaaaaagaagaatctttaacatattgtccctttccgtacgatttaactatatccaggaaaattcttggaaggtgcattagtcatttgtcattaagtgctatacggatacaatttctctaaatctaaaagaaatactagaagaaaagatgccttactaacataattctttttttgcaaatgcaacttttatttgattcgaacaacaaaaccttgtactcttttttagtctcatcaaatggtatacatatacattcatacttcaactacatatatagtctaagtaattcctctggattgttctctaaatagtttatgaggaaagtgtttgatccgaaaacgaaatataaagtatagacgatgattgatgacataaacaatctagatcatgcaaaacttttcaagtaaaccagatagagttcaactaaactgaagaacaaaagacctgttccaaggagaatgagatggagaactgaatgatttgaagagccggaaactgacctcatagaaacatgacattctcaacctgagtagaggaaactgagtctgcattacatggtagatagttctctgtccatccttcttttacaaattttctcactttattttccttcagatcacaataaatagcactagatagtgatgaatgcgcataagatggtgtgaaaataatctcacatgtgtcagcgtcagttgtacggaacttttgaagcttaagaatacgcgagtttgttgatgaggcagctagattaggcaatgcaaaagtcttcttcgaccattccccattagaagcatcttccagaatccacaaaccaataataccactcgttttcttttcatagaagatgacagccagttttccctcatattttgccaactttgaaaaactacgaaagttgcaaggtactttgataagatcaaatttttcagacctaacatcaaaactcatgattgcagactcatttagttttgtgccaataaaagctcgataatacaaaacaccgttgatgcaaagttcttcacttacaggagagtgaggaggaataatatcatgaatcatcctccatgatgaatcccgagttcccaatgtcaaaacctgtatctcctcagctaaaccgcgtctattcctaagcataggcatgcctctcgtaatgcacaccactttataattaccgtcaaggggatcatagcctatgtattggtttatggctctcctccctgctttgatcttgggcaaggtaattgatcgtctagtgcaggggttatatatgacgaggctagaaggtggtccatagcatatcaaaccgtggacggaaggagaaatggtcatgcgttgttgagtgtagcaagtcacatggtaaggtgaacggatgagaagattgaacccaaagattgtgctctgaatacaaatacaagacttttgggtcttttcaaggactcattgaggaacaacttcatgaaatacggatcacggattatagaagcccatagcttagatacacaaaggaatctgattaggggtttgagagacaattttttaagaatctccataatcagatcaactggaagcaactctgagtttacacttacctttgtaaacttctttctctgtgtttccatggtggagggcgtgaaagatgacgatcgatctccctctggcagccacctttgcgtttgccgtctagcacaaaacttttgtttaggtgaaaaccctaaagtcttcatcaatgcaattgcaattaatatcgtttcatcattccatattagtaaataatttttataggtaattaattgttgacaaaaatatataaataattaagagttgttgacaaaactttatccaaatttagcttaatattatcgttcccacaaaaaaaaaaagactttatctaatgtttcctttatattcaccctaagcctcccaaaacctgtcgactttaattaaactaattaagctattgcttggagttcgttaatggccttctctgtagaagaaatctcgtctattctccctaacagtttatccgcaaaccctaggaatgtttctcaaaatactatttccccttcctttttcaagccctcccttaaaccgtacgcttccaaaaccctaatctcattgtcatgtagacgctcactttcccctgttttctcggcgggaacatatgtcactaacgttgacgaagatgacaagcttcacgaagaatgcggagttgtcggaatccatggagaccctgaagcttcccgtctctcttacttggctctacacgcactgcaacaccgtggccaagaaggagcaggaattgtagccgctaatcaaaacggtctcgaatcaatcacaggggtcggattagtctcagatgtgttcaccgagtcaaaactaaacaatcttcctggcgacatagcgatagggcatgtccggtactcaacttccggagcctctatgctcaagaatgttcagcctttcatcgctagctgcaagctaggatcactcgcagtagctcacaatggtaatttcgtgaattacaagcaactgaagacaaagctcgaggagatgggttcaatcttcattacaagttctgataccgagctcgttcttcacctgatcgccaaatctaaggctaagacgtttcttttgagggtcattgatgcttgtgagaagcttagaggtgcttactcgatggttttcgtctttgaagacaagcttattgctgttcgtgacccttttgggtttagaccacttgtgatgggcagaagaagcaacggagcagttgtttttgcctccgagacttgtgctctggacctgattgatgcgacttatgaacgtgaagtgtgtcccggtgagattgtggtcgtggatagaaaccatggagacagttcaatgttcatgatctctcaccctgaacagaaacagtgcgtttttgagcatggttacttctcacagcccaactcaattgtctttggccgttctgtgtatgaaacacgccgcatgtacggcgagatcctagccaccgtggcacctgtcgattgtgatgttgtcattgcagtgccagactcggggacagtggctgctcttggatatgcagccaaagctggagtgccgttccagattggtcttctgagatcacactatgctaaacgtacgtttatagagccgactcaggaaatccgtgattttgcagtgaaggtgaagctatctcctgttcgagcagtccttgaagggaagcgggtggtagtagtggacgactctattgtccgcggtaccacgagtttgaagatagttcggatgcttagagatgccggagcaaaggaggttcatatgagaatcgcattgccgccgatgattgcatcgtgttactatggagtggacaccccgaggagccaagagttaatctctagtaagatgtgcgttgaggcgatccataagcatattaattgtgattctttggcgtttctaccattagatagcttgaaaggagtctatggaccagtcgagtcacacaggtattgctatgcctgctttactgggaagtaccctgtgaccaaaacagagtctgaggaggccgacgcttcatgaaaatacctctactctcttctttgctttactttttaagttttgagaagcatagtttttaattagttgatgcattgcttcatattttcaaagaaatcatcgcattgtcttttatttaatcagtcaaaaaatattacagaatgacgtttcagacatgttttaaaatgagatttgatattacagaaaatgtggttgaatcagccgttttcagctctgtcatatgcgttggatttgtgcttgggggcaaatgtgaagccctccggaacctttccaagcagcatttccgatatccgcacctgcatatagtaacattatagcaaacttaagcttatatagtccaaagtaaggtggaatgaaggagaaggatataacaaacgcacccagtcacccgcagattcagacatcatgagtgtctcgagatcatcacgaccaaagtatgaaggcggacgccagttgatttgctgcgggatcacatcaagcaaaccgacaggtatgtacctaaatgtgtagcttagccactccagcaagaaatgcctagttgtctcaactcctgttgaaaaggttaagaaaaggcagaactttagccacgagagaaagagcaaaccaaaaaaacataaattcaatttcatgctgcgtgttttttacctttcgtgtcggatccccaatgttgaagaccaaaacgtacgaagtccttcatgatgttaagtctttctccagaggtaatgtcccaatgccgttgctctttaatttcagtaaagatccaaggctgcacaagtcaaaagtccattgaggctataaaatgatttgctaggaaaatgctgatattttttggtcatacacacaccttgatcagtgctccacgagcaatcatgcagctagacaactcaggacagtcagacttgtgtttgttccagtctaaatatgagtacacatctccatttcctataacctgtaggttagtagaagcgtttttggtacactggtatatatagtcccaatctgcagacttgctataacgttgctgtcttgaccgcccatgaatagtcactgcagtggctccccagtttccgatatctgcaattaaagaatctatccggttcttaccctcaaagaatgctgttcgtacctggcaccaaaaaggaccggagaagtaaagcctggttataataccaacacatttgcatccaattatgatgcatattcatatggaaggcgatttagctacagatttgcttaggcagttacctcgatagctgataggagctacaacaatggaagaag

SEQ ID NO: 37928 - DNA, 2172 bp, Arabidopsis thaliana landsberg
tacagcctgcaagaagtcccgaagtcgagttgagaggtatcgcgaggtgaccatatcacgaggtggaggctaagccgagttgagagcaattcagtttaggtgttgtgggtcgagtagcaaagcccatgaaagatcaaagttaattcaaattcgaacgttagaatgttgaacccgaagaccgaaacggaagcattaaaggggaattatggcatataattaggattaattactatgtttttgtataaataaagaaggttttgtaccatgtaagacacacacaattttttcagcaaatgtactatagtcatttcaatatcaattttaggctttttacatttgatttttgttttcaagaataattcttttcacaaacaaataaatacttgagtatgtgaatccgacatccacaaagctcatttccaaataaaacaatagaacttgtcaccatttactcgataataaactgtctcagaaacataagaataaaacaataactaaccgttcaaaacagaattccatcattgaatctttagctattagtatcatcagtaactccacaaaggtttagccatgtatatcagacaacattttgacatccaaacgtcgcctcgaataacccatctcggaacagctttttagggtttgacaaattgtacagttacttggcctgaacgcaacaagcataactccttgaatataactctgattcaagatccgatagttgctatggattactgggatgctaatgaacatttctgtactttaaccttggagtaaatacgtcatatctggtgtcgaagagcctccaaagttgcctcctccacactaccttttatttcgtttgtttcctcttttttgttcttctggtcaactttgccctccaccaccactgaaacctgccacagccacgtcataaccaatccgaccaaccacgggattccaccaagtctgggacgtctccatctctctcttaatctacataatgatataacataataaaatctgactcatataacattattttggtatttatttttccatattaaaatgcaatattattaataaacttattaaacagtaaattaaataattaatgaagtgaagtggatgtgttatcgttggaaaggcttgattcatcttatatatattagatgatttgttcctagctcaaacaacataatatttctatatttgatcataattcgcaaatatctttgttattgttttttcctttacactttttttttaattatgttgacatatcaatgatcactctgaaatttattaaatttgtttcttgttttttttaagtaagaatttaacttaattcttaaccaagtcaatttcacattactactagatgaacacccatgtagcatgggtttttgtttttaaaagggttttctgcaaaataacctttcaagtgaatcttgtttgtaagattaccctccaaatctaaattatacaaatcaatatcacattctcaaaattcacccgcaatacagccctcccgtgtagtgatgacatgacattcgatatttttttttgaaaccataagagttttgtgcaaaaaaaaaccctcaatttttttcttttttgcaaaacaaacctccatgtcaaataaatccaggtctgaccacaatctgaataatcttctacatcatagcctcttatgcgtatagatgaagtgatagtcaataactcattttagagtacgtgcaatagggtttagattttattagtcatttatctaaggtgcaatgtgcaatgagtagagtttatatgcaatgtgtaatgggcacaacaatttaataaaatgtattaacaagttaaatttttgaatcgataacctaattaactaaaccgatcctgagagaatatatttagaaagaaaatgaaaatttggttctattttagaaagaattatttaatatttggataacttgcctagcgaaagtataagatcgaatcctttctatttctaaaacggcttactaatccttaacttttcgaggaatccttcatcagtgggttgtgaatgactgatttttctcaatcttatacgaccttgggctccgtaggagcacgctccgaaagagctgatgaaatggaaccatcctgatttgacttcgttctcaatagctcatgagattatcactttatggtgaccct

SEQ ID NO: 37929 - DNA, 3584 bp, Arabidopsis thaliana landsberg
gatttctctataaattattttcctctgtaggattatgggaagtgcccggttactggcgaaccacttaccatttatgacattgttcccatcaaaactggggaggtagtgtaatctctttaactatttgatgcaaagtactgttgacgatatttgtttgagattttttaatgtaattgtcaattgtgtagatcataaagccgaaaacattgcatacagctagtatccctggattgctcggaacgttccagaatgtaagttcttattttgtattccctataccttctttttcgtttctgaattttgttctctgtctattaaggatcatatagagttaaaatggatgaacttgatttgggtatgcatcgctatctgagttatttaacatagcagattgcattctactctttacattgaattatatgttcatttgttacgaatagcaagacgaaagtgttcgctggttatttttactttaggcaaaagaaatgcttaaaaagtttatctgtttgttgtgcttgtaggaatgggacagtttgatgctatcaaattttgctttggaacaacaactgcatactgcgaggcaagagctaagtcacgctttgtatcaggtaattatggttaggtgcatttgccaccaccttatcagactacatgaattacaaatatctattatgtattctagtttcttttcctggatgtttccatttatttcttgtgataaaaggtgattgatgggggatacacttttcctttgcagcatgatgctgcttgtcgtgtgattgctaggcttaaaaaagaaagagacgaatcacgacaattgcttgcagaggctgaaaggcagttgcctgcagcccccgaagttgccacatcgaatgctgctcttagtaatggtaaacgaggtatgcttgcacgtttgcttctcaatgtaagttggctatgtggtaatttctcttataacaagctactatgtttttggttgcaatataggtatcgatgatggtgagcaggggcctaatgcaaagaaaatgcgtcttggaatttcggctgaagttatcacagaactcacagattgtaatgctgctctttctcagcagcgtaaaaagagacaggtaactgcatatatcagtatattagttaggaaatagaaggcaaaagagaattacatatatatatagtttgtctgtaacatacaatggatatctgcacttttggagttcaattagatttgcgagtggggcttctgtcttaataatttctcctcattggttctctagatccctaaaacattggcttcagtcgatgctctggagaagttcacccaactctcaagccacccccttcacaagaccaacaaacctggaattttttcaatggacatcctacattgggaggggtgacacctaagaacttctctattttccattcatcactttatgtagtttttctctgtcctgagaagtcactgcattgaacgtcatagtgacatgtttacttttgcgcttacattatattgtacactgccatgaatccccatctggatgcttatcaatattattcttcagtatatagattttgtacactaccatgaatccctgtgtctgttctctatttagtattattcttaatttctcgttatatgtggtaatcaggatgtcatcgctacgggaggaattgatacaactgccgttctctttgatcgtccttcaggacaaatcttatcaacgctgactggtcactcaaagaaagtctgtcttttactgtattctttttttatttttcattttcttttttaacttttcctttgtagttttgtgcttgacatgcattgttccttttgcaggttacaagcattaagttcgttggtgacactgatcttgtgttaactgcttcatccgacaaggtaagctaaggttatgtgtacaagctcctttgaggattgcatgattttatggagtagtagtgaagagattaacttctcatttcttaacactctgcagacagtccgtatctggcggaatcctggggatgggaattatacctctagacatacactgaaagatcattctgccgaggtaaggatgtaactgaagaacttctacaggctacagtctcatacagttttacgttttatttatttttggtctgtttaacgtaaaagcaatgatgtggttttcaggtgcgagctgtaactgtccacgcaacgaataaatactttgtgtcagcatcacttgacagtacatggtgcttctatgatctgtcctccggtttatgccttgctcaggtctccaaaattttaatccacacctgatacctgttatccagtttcagatttcttcttttatgctaatataacaatgaaacatttaccttctttattgtaatgtgaattagactcgttagaataaatgtttctgccatgcgtctttctcattattgttgttattcaggtgacagatgcttccgaaaacgacgtgaattacacggctgctgcttttcatcctgatggtctcattcttggaactggtaccgctcaatctattgttaagatttgggatgtaaaaagtcaggtaaaaactctttgaccttccttgctcatcaactgttgtcacttgtaagtttgttctcacttcactctcatctctatctctgtcgtttgataggcaaatgtggcaaagtttggtggacacaatggagaaatcacctctatatcattctctgaaaacggttatttccttgcggtgggtacattgactgattgacctaaactaagtagaaagaaggatagcaccaggttccttttgactgaccaatatttactattctttaaattgtacagactgctgcactggatggtgttaggttgtgggacttgcgcaagttaaagaacttccgaacctttgactttccagatgcaaactcgggtattcaactacctgagcactcttactagtctattttgttgagtgagttttcatttcttaaggcctgaatgagctttttttgtgcagtggagtttgaccatagcggatcttatcttggcattgctgcttcagatataaggtgaggtctactttgatacacaatgttgggaattaattgatataggagctcactttgataacgagatattgaaagatagttgtgcaaactcaattaacctgctatcaccagaaatgcagtttgggtatatgtatacgtttcttctgcaaatcatactaatcgaaaacttgtgcttcaatgttgtagagtattccaaacagctagtgtaaaagcagaatggaacccaatcaagactcttcccgatctgtccggtacaggtaaatgctacatgttaagcttttgaagtcactgctcttccttgttttattgagtctatcattcagacattgtaactacataaatgtgcaggtaaagcaacaagtgttaagtttggactcgactccaaatacatagcagtcggttcaatggaccgtaatctcaggatatttggtttacctgatgatgacaatactcacagattcagcacaagattcatgaagagatatctcaaaagtctcatcatcaagagtagcaatatcctcaat

SEQ ID NO: 37930 - DNA, 4668 bp, Arabidopsis thaliana landsberg
ccaatgacgtttgctgcaggttttacaataccaggttgctttaatagctctgctccacacttaggaagagcaactttgaccactgacccaaatctcttcttttttctgctatttgacatattggcaatgcaaacatcagttgcatcaatatgtactcttatatgggcgcagttgggtgatccatcactcgtttcatcatccttaaatgtggccttgcccttactgcttttttctctactctgcatgccattggcattcctttgtggtgtggttactgcggttgggcacgtgaaatggtttgtagtcatcatttccttaatatcggcgttcttcttctattgggcgaccagtatccttgccccccacgtcatgctacagctatcaaacgtttctcccgcgtcatgtgtttatctcgatctttgtatgtgttatcaagagttggtgtcaggatctcgatcgggccgtttaattcctaaactccgtcatttgatgaggccgaagaaagattaagatccttaacttatgaatggtcaaaagagtcaaatagtcaatgatcaactttaatttgtgattcaagaaaaaaaagaatggcaaattaatagagggaaaataaactacttgttataaaagattaaagtaagaaagaagaataaagactagagagaataaaactcgaaacaagagttttcttattgttttctctctgttttctctctaacttacaaatgaatgaaatgagttatatatagtagagcttacttagctaagaagtaaattacttaacgaagaagtaatggataaacatcatccatatattagggaggaagtaatggatgcccagcatccatatcttacgggcgaagcaatggatgaacgacattcgtatgatcgtcatcccggacgctaccatcatgggcataataaatggaaatctcatgattttctctatcgtcccgaggacttggttcttcttgaagaacctttttattttcttcttgcaatttctttcgaggatttttatcttttgagccaatatgcctctcacgctttaattgaaccttatgttcattaattttgctcccatctaattccagctcattaggaattttaactcttgacggggcatttgtagcggggatatatgaccttgtcacctttcttgtatcggtgaacgaatctggtaattgatttgccatattttgtaaatgtacaatcttttgtacttccagctcacgatgcttcgtggggggatcaagatattttaaagatggtgcgcaccattctatatctttatgcatatgcatttgatgaattcctccccctaaagctgggaattcatcttcattaaaatggcaatcggcaaaacatgccgtaaacaaatcaccagtttgtggttcaagataccttattatactcggtgatacataaccgacgtatattcgcaatctcctttgggaccccatttttgttctttgtggcggtgctataggcacatataccgcacattcaaaaatgcggagatgggataaatttggaacttgaccataagtcatttgtaaaggggaatattcattatctgcgcttggtctaatctgaaccaaagccgcagcatgcaatatagcatgaccccatatagaattgggagttttgttctcaatattaacggtcttgcaatgagttgcaaccgtttaattaatgattcggccatgccattttgtgcatgaacatgagggaccggatgctctacatcgattcccatcgatacacaatagtcattaaaggtttgtgaagtaaattccccagcattatcaagcctgactttctttatggcataatcaggaaattgtgcctttaacctgattatttgggaaatgaatcttgcgaaagccgtgtttcgtgtagtcaaaagacatacatgtgaccatctacttgatgcgtcaattaataccaccaaatatcgaaacggcccgcacggtgggtgaattggcccacatatatcaccatgaattctcgacaagaattcaggtcttccattcccaattttgtttggcgatggccttattatgatttttccttgaaaacatgctttacaagaaaactcaccagatttatatattttctggtttttcaatggatggccattagaattttgcacaatttttcgcatcatgactgaaccaggatgtccaagtctttcatgtcatatcttaaatgtactagtaaactcacttgagtgtactgtgacactcgagtttactgtaacatttgatgcgattatatttatttttgtgcaatataatccggaggataacattggcaattcttctaatatatattgcctctcggattttatgcaaagatattccatgccctctttattcatagtctctatatgatatccattacttcgaatatctttgaaacttatcaagtttctatgagacttaggggaatataatgcatcatttactttaaaatgagttccccttggcattgtaaaattggtttcgccaaagcctaatattatctttgcatggccatttatagcactcacgcttctagcggagtcttttatttcgagagaggagaagtactttttatctttaaagatagtgtgcgtataagcactgtccgccagacatatatcttcatcctcaatcttgtattttgacataggctatccatatgtcataacatattttctggaataaaatatttattcatgaaactttgacataggctatccatatgtcataacgaatatttattcatgaaatttgacataggttatccatatgtcataactaatatttattcatgaaatttgacataggctatccatatgtcataactaatatttattcatgaaatttgacataggctatccatatgtcataactaatatttattcatgaaatttgacatcggctatccatatgtcataatatataacattattccagaattataaaagcatctataatgcttgtcatgcatagcatgattatacatatggctataatatattacattgatttttcgttgtcatgatcaatcgagaaaatctgccatatcaagatgattatcatcatcttggcctttaaaggaaggtcctggctcatcccagatgagattagtttcaacatccctttcttttgccttttatgaggctttatacagatcggctaaatgttttggtatacgacacgtctggtaccagtgtcttttcatgccgcatctgtggcaagtgctttcaacatgtcttttcttaatacgaccaacattatttttgttggttctttccgtgttaaaatcattgggatggaaacttcttctttttccttggccacgatcacgacctctcccacgaccacgaccacggcctcgacaaggtccgggtcctcgccaattatcatcaccggatgtagcaacattcacttctaaaagtggagctgatccaggtgggcgagataaatgattcatcatcacgagttcattattttgttcagcaaccaaaaggacttgcatcaactcggaataacgagtgtatcctttggcctggtattgctgttgaaggattacatttccaggatgaaaagtggagagcgttttttcaatcatatcataatcgctcactttttcaccacataatatcatcctggaggtgattccgaacatggcggaattataatcaccaacacttttgtaatccaaaaaccggagatttagccattcatgtctggcttttggcaaaatcacatatttttgatgatcgaaacgatctttaagtgattgccatagatccacaggatcttctctcgtgatgtattcatttttcaaattgtcgtggagatggtggcgtagaaataccatggctttagctttgctctcatctgatgtcgtttcagatgcatctatggtgctgagaagcccatttgatctaagatgcatcttaacatcagatgcccatgtcatctaacttatgccagatacatcaagggcaacgacatcgagcttagctagatttgacatgattatctatataaataaataatcatttaattactaagccatttatggtattttaattaggcatagctattattcgattaaggagaagacatagtcgcatactccaaaaataacatacatataattttatatgaatgaataaaaataattttagtataatttaaatgttacctcaaaagatgcttgaatagacgatcggtcggttaaacaattacccgaagagacgatcataatgataacgtattaaaaactataacgcaaatatatttaatattattttattctatagaagatgagagacataaagagagaataatttgctttttcttattcttcttatttctcttagcacaatacaacatgtataagatcaataacttgattatcaagttattaattgataaggataagataaactttacttttcttgggaacaaagctaataaaacgtggtaaaaaagttatgatggataattatccatattttcaacaataatcacctagttctgtaattttactaccgacacttatataagcatttgggcttgatggcccatcatcctcttctcaccaaattttaatggctggttctgaaatcaaaacattgtggtttaaggaagggagctttttatttta

SEQ ID NO: 37931 - DNA, 1468 bp, Arabidopsis thaliana landsberg
tgaatttggtaattaagacatagacctctgcagactgcagtatgccaagggctaattaactctcgagaatccggtgaagatttacggatcaaagtttgcatcagtaagccaacgagagcaaaacaataccagattaaggcgccaactacattaaacttggctaaagaacttgtatgcttatgattttactctctataatatcatcttcgaaattcagatacgtgagcatatgggcatcaatcaaaaaccctgtgccttaaattcaacaataatgaataatgagtgagaagtggacacctagtaccttaacattatcactagccttgtggaataatgaagctactgtgtagcttcataattggcatatacattatgttctaaaagcatgaacttgactaaattttcagaaactgactagaaatcacacatcaaaacctgatggagtctttaagtacatcaatgtctaacatatataaagacttagtggaatcaccattaaaacactaatgcttcacatgatacttagcatctagatgcttaagttaacgcttaaccacagaatctatccaccgcgtgacactgaaacaaaactgttcattctcaatcctccagacacactttacctgagcttgtacaagcatgaatccttagaggaatctaaagatctatcagcaaaactcactaaggcattgtaatctggaaattcattggcatctaaattcaaggaagccagagtttttccacctcttggacaaaacactacttttgacataatcttttgtcggaagctgcagtaatttgcttatcctattatcttctcttccattaaatcgatttgtaaaattaaactgaagattacacagagacaagctcaattactcaattagttggtttatctgcataaattatgtacatctagcattcattcaatgtctattgtatattaaagctcttagtaaagcaggttttcaaactcaaattgtagactcagacaaatatagaagaagccaagactgtttttaaaaacttgaaacaatatcattcatacatacttaggaaaacaaacaattttcttacaaactcttaacatacaaattaaactcataatctaaattgagattacatacataatagaaaataacataacattgaccaagtcaaagaatagatcttggaacaacaagacctaattataagagaacatcattggatctgcaaacgacggtgcttgattccatggcgcaaactgatcaaaggggacaagtggggtttgtgtctgcacctgaggaggaaacaccatgggaggaagatcaaagttacttcctagaccagatccttgttccccaagtaaagtcgattgctcaaagctagaaacagagttagggatttgacagaagctaccatcatcatggttatagagaaagactgaaatcttgctctgagtttgactcattgatgacgttgatag

SEQ ID NO: 37932 - DNA, 3272 bp, Arabidopsis thaliana landsberg
ttttggcaaaggttaagttttataccatttttgattttggacagaattacaaagattacatgaaacagattaaaacaatctacagaagataaatacaatattactactcaaattgttttggatcgcttctaaacgttcaagaccaagttacgagatgaaacaccgattccgagctcgcaaaactcagaaatttgcgtagttgccacagagccgaagcactggaatcctcatcttagttgccacgagctaaactattcgagggccgtccacaaaacctcgatatagaagcctacagcttctccacaaaacctcgatatagaagtccacaaaaccacgagctaaactatctgatttctgatatggttttggtctgtttgatttcacacaacacaaatcaaacatcagcacaaccatagattatagtattaagtttgtttctttcccacaacatcgaacaaaagacgaaacacaaagcaacatcacaagttcacaatcacagattataatgaagcatgttcgtttcgttaccgccggcggttgcggcagcggcagcggctgcggctgcgacaaacctaccgcaggttgttgttcgttttgctgccgccaacgctgccgcaaccgcagcttttaattatcgacgctaaaattaatcggcgtccaaaaattttcgccgcaaaatgctgcgtttgccgctgcgttttactaaacgaacataaatagctgcgtctgccgcagccgcaggtagctgcggcgacgaaacgaacaacctaaatcatccaaactccatatcttgtaagtttcgacataaaaactttgcagtcttataaactaaatagtgagttatgagttgtgtggaccgcatatttggaaaagagaatgaccgccagtgatttcagaccatttgtatgtataatcttggtgagtaaactggttgacattgatggaagagttattgggatcaacttgtaagtctcagtcaattctgcatggttttgtaaacgagatcttgggttcaccatacattcctcagtcagttctgcgaggtttgcctttcagcgagagaaactatgcaaataaacgtgaggagattaatgttgtgtgggaatccaaagagtcaatattctatagtttgttgaaaaagattataggttcaccaaaggtaatcacaaccgatcttttgaaaacatttcctcgttagtatcaagtcttaagaattggtggataaactttattgataaaagtagattagaaatcaaataatacaattagaaacaatcacatgtgccaagacgatcattgcagaatcctcccttgggacattcaaagctacaatcaacatccctcttgcaaggtggggcttgctgcaaggccctagcggtgccggcattgtttgaacttcgcgcagcaatttcgaatatctcgttaacaccggctagttcccttgcttctgatccaagatctattcattcatcactttcttagtatactaacttattaaatgttctgaatttgttttaactcaccaaataaaaaatatttttgaaaatatttttaatgacttttattttaaatttaaataaattaaaaaatacttactagacatgatgaccaaaataaaaaccagaaatgaaagtttgagagaaacgttcatcatttttgagcaaaaataatttagacttgtgaatggttatttctttgtcgtcgtagtacttagtagttagtacttagccatatattcgttcttccatacatatataagttggcgagtctagtcatgtcattggtactggtcaaagatttgagaattgatacataaccaatgaggaagttttaaaacatcagatagcatcaagaactattaattagtcaaaattcgacatatctttatgatatttttctttaagtattcatttaaaaattcacagtagaagcaaatgatgaaacctgtaaaaatggactatgtagtaaattaattttattattatggtgctattttggaatttaattttcattttttcagaataacatttttcatgttaaatttcaaatatattatttaaagattttagactgcttaaattaaaaaatgcaaacaaacacttgaaaaataacatcgaatttaacaggcgtgagtattcagctaattgtgttgggttcaggtcagattattcgtgttgggtatttcagatttagaaattaaaaagtggtttagatattttaagacttcagattcagaccggatcaagtttttgaattgggattcgaatttacttaaaatatctaaaacttaaaattttgtatcaaaatatattcaacataaaaaatttgattcgggtttcagatttcttaatctaaatttaatttaatgtaatttattataagaatgtctaaagtaaatggaatgaattataaaataacataaataaaaaattgataattttgatttattttaaaagtataaaataaaataatatgaactgtttgacggaacagataggaaccatcgaagaacacgaggcggagctatgacgccgctttctatatcggcatcgccttcgccgccgtggccacttctctctccgccactatcttcatcgtcgttaaacagagctgctccgtctattttttcccctttctctcgaatcaaccatggcttctcgtgctctttcatcgccgttcaacgcttcgctctaagccgcaagacaaggaagcagttacaggtggtggctatggctcctgaggaagagaagctcactcgtcgcaaccctctcgatttccctatcgttagtatctcttcgattcctagattcatcgaaatttcacattgctactgtgtctttagaattttatagattgtcaatttggtattgaaacttgaaattcatacagagatatacttgagagattgtatttggaatctgaaaatttcatgagcagattgttgtcctgtgcctgtgtagatcatacttatcagtttgatttaggtaatgatttggtagcagatgagattgtgagtcttatctatctcaagctttcattgttcattacttgctagacttatcaggtgtagagagttctttggttacagaactttgagtttatgtatgaatcaattagagagaagctgtatctaatgacaacgatgctgtgttttcattttgcctagtgatcggaattgttatgtatatgatgttttggggtttgtggtaggaatgggagagaccaaagccagggaggagaccagatatattcccaaagtgtagtcctatact

SEQ ID NO: 37933 - DNA, 1073 bp, Arabidopsis thaliana landsberg
taaaggagaatctcacacgtgacataatacttgatatttgttaccctctgcttcccttcttcttaagtttctttcaaggtggctcacactcaatacacatgctttcttcttttgactgagaatggtgataatcttttgtttgtctctcttcttctagactgttgaagaaaattagcactcattctttacttcttggaatggatgaaactttcttgattattatgaattgctaaatattatgcaactaccgacgcaaactcttgctcactcctgtattaaccccaaagaaagaaagaaaatataaataaaacgtgacggtgaagccaatggattttgttgagaaaattctgagaaagaaaaaaacaaatctcacttttgttacgttttcaaatcatgatttgtgtgcttactcatttccacagatacctctgcactgcaatcaacactcgggagttgggacgatctatatagactactaatatgatcaagttatagaatgaagtttaaatcatcttctattgaattttagagtagattagacaaaatataatcatctttcatcattttcacatatatttacattcattcgttgactaacctttgatttagtggaattagatgaaataagacaaaatgaatttatagggacttatcaatttttcgtagtccgtagattcaaagcaaaacgtataatataatgtcattattttcgccgtacgcaaataaatcgaggttatggtacatagatagaggagacatatctcatcaaaacatcaacgttattgaagacgttgcaatgcattaaataaaaccaaggtgtatactatatactattattatatctacctttcatttattaaggaacactttaattgacttatcctatagaccctacctcatgtcgtgcatcaatcacaaaatttataacaaaaatttgtattttaactttgtgtctacttacatgaagtagttaaaattcataacaaaatcaataataaatcaaacgcgcaaacataacgtgagtccacacctaattttcaatactcacaagtcaccatgaaaatgactcatta

SEQ ID NO: 37934 - DNA, 2319 bp, Arabidopsis thaliana landsberg
ttacttcaagtaatctcattaatggcttctcttagtctttgttcttcttatcattcaaatgtttaggatctaagcttttacaagcttaagtagaaacaattggaacaggtcaaaatatggttttagaaaagcacaaaatatggtttcaagttcaatcatatagcataacataaaacagttcacaatggagttaagatgtctccaaaacttctgtaagaagagagtaaataaaagaccaaacatgaacggataatgaatttgcattcatcaatgattcaaaaggaaaaacaaaactacaaatccttcagaaagatgtaaaacaaaaagctacgataatatcactgtttcaccatataaaatctaatatagaactttgaactttaaatagaaaacttcattcctcaacagcgatcttgcctttctcactcacatagataccatcaagaaacttcctgatatccttcttcttcacatgacatttctgcacaacaatcacaacataaaagattacaacaaagacttgaacacgtaaatcaatcactgaaatgatccttttgatttcactatgcaaaaatgtgatcctaaactcaaacatcaaccaaaaaaacactttcatacacaatgctgaaaagcttaagaagccaaacaataggcaaaattggcaaagtttacttagcgagtaatctaatcgtctattagagacctatagagataatacaaatcgattttcacttcatttatgcaaaatctgattcctagaactgaaccgtgtcacctatctaacacaatctctcaaccttttagtcccaagaaaatgcaaatttggctagataacacctaaatctctttgataccagctagttagagagagtacctggttgatcaaagcgcatgaccttgaaacaagctcgatgtcgttaccgtcaagaacaatctcatccttcaccttctcagatcgaacaatggttacaccatccaacatctctaccttcctcacctattattccaataaacacatttctatgtaagttcagtgctcgcaaactcagaaatcaatcatcatcgtccaatcataaagttgaatctagtgtcagtctatttcattccgagatctacacgaatctatgagaatcaaatcagagatgaagaagataaaacaaaccttcttctcgccaaggaagttacggatctcgatagactttccgtcaccgccgatggaggcgttgatgggaaaatgggcgtacacgaacctcatcttgtaacggaaacctctggtaacaccggagatcaagttatcgacgtggctaagagcggttctgatggaggcgctggttttgcgtgttccaaaccacgaatcgatcttaagcttcttctttccagtctctggatccttgatcagctggaaatcgaggttgagatgcttgaaatcgcgaacaagcttcccgcgaggtccttcgacttcgatcactttagcgtgaaccttgatggtaacactgtcggggatgtccatcgtttcggaagaaagaatcgtcttcatcttctccgatctttgttttgctctccctgacggctctctggtttgatcaaagaaaccctagagggagatttctcgacggcgttttaaaaggtatcaagagaaaaaaccctaaatatctttcatatgtgggcctttatcaaaattcagcccactaaaatcgtgcccataaagaaaaccaaaaatgagaaaaatacattatttacaataagcccatggcccgttaaaaatattgggctggaatgacggaagtggtgctctctctccttctcaagaaaaatgacggcgtcagaagtgggtcagaagtgggtttaaaagtgggttttactaagagactaatcagaagtgggtttaaaagtacacccattcctagcccaataaaactgaagcccaggaaacacccaaaatatattattggcaataacaggtcatatatatgccaattaatataatcaagtaccaatagaatgcatgctattcggctttttctggattcgggtaattcgaattagagagtttagtatcctttcagatggataagattagatatttatgtattcgggttgatcgggttcagatcaaatagaggagtttaggatttaattgagtaaatatatataaaaattggttcagtttggttcggtctatcaagtttaggtcgaaagaaaacaccattgtcgaaagaaagccgtagcaaaccaccactgaattagccacagatcgagtcaccgtaccaaacgcaaacaacatattattttctctttgctctctcttcgatttgctct

SEQ ID NO: 37935 - DNA, 1246 bp, Arabidopsis thaliana landsberg
  unsure (1)..(1246): unsure at all n locations
ctaagtctccatgctcgaatctaaatacattgatttaaaatttgcttaaggaaagttctaagattcatttggttatatcttttgcttgcaaataagagattaatcaatgatacctggtttggagatacgtataacgggttctcataaagagtaggacctccaaagctgcccgcgaatatcttgattggattcagacaaaaccttggaccaacctgttgtcaatagtgtatccatttcaatcaaaaccatagtcgaaagactattattaaaagcttgtaactctttgtgtccacaaacctcgataagggtcattttatccaggccaccttttgcaattttatctgactcattgtgaggaaccgaaatctggtaatttcggaaccatatatgctcatcaacaattgaaaacacaaatacatggtcatggtaaggcttagatttcctgtgttccttaggaattccgaagacctgagagataaacaaaacaaaaataattaggatgtgaaagtcttgagaactaatggaccaaaaacattatccaaggatatgaatctggcaacaacctgagtaagcatctccttcaagagtttccagtgcgcatctttatcaaagttggatgagaatgtcaaaagtggacgtgacccttttagatgatttccagtgagtttcatctcttccattgtgtgcacttcaatatacagaaaacaaaagtaaaaacccttttaccaaaaaatacatagttacagacacagaactcagctatagaacaagacacaagctgattgaacccatcatagctaaatacgtgactagatctatcagctcttgccacttaaactaaagtcagaggatctcgactcttaccagctttaaccaaaaacttcacagatggtccattaggggatttgaccatccacatgtagagatctttatgtttcctacactgaaaatggaaacataaacaaatacaaatcaaccaatacattcaaagattgtacatttacatcaatatgcatatatttaagcttccacaacaaaccaaaccctaacaatttgggataactatcaaattttgataacatggaacaaatactaaataccaatagagtcaaagattgtccatttgcatcaatatgcatatacataagcttccatcgagtattctaatcacgagtttctgaggtttgactcttgagtcaaacattccacagtaaaggaacanatctgactacatgggacaaaaact

SEQ ID NO: 37936 - DNA, 4223 bp, Arabidopsis thaliana landsberg
tgcttgacccaaaccaatgtcgcccatttccaacacgaaacggaaccgcatgccccatggcaaaagcttcagcagacgctaacgcataatctacgcgccaaggccatctgcaacatgtttccctgtctcttgctccactatgtcacgagcatacgcacctcagtttatcaatgtatacatcagaatcaccgatcttacccttcttcaactcctcgtaaactctctctaactcctctctagacaccaaaggtttagcatttaactcatctacagaaacctgtaacctctctgtcttagactctaccttcttcaactcactatgtaacacagaagatgtggaatctatcgtctgcctcaatgctcttgattcactatccatcttcttatcaagaaactcaacttgaacctgcatcatcttcgtcgtagtcttcaccaaaccatcaactgcagaaatccgactctccaattccgaaagcaccatttccgtttcaattgggaaattcgaagaagacagagacgaatccttcaaagtcaatttcctaatcaactgaatcaatccaacaagtaacaaaagagccccaaattgcttcgcgaataccctaaccactgtcttccatttccctctatctatcttattcccctgagacttccgcgtccgacgctgcgtggtggttgtattagtccccgtcgcggtggatcctgatttccttgtcaccggacctacgtcgtaggtgttggatctctcaccggcagcctcggcgcgaatcagatccttgttcgtaccagcagacgactctccaattgccgcattggcatgagattcgctcggcgggaaatcaaaattagatttcttctcaccggagagaaccggcgtccgccttattgtcctaggactagcggtgattgacaccgttgacgccgacatgatcttcaattttgaactacagaattcgaaatgctcttccttatgaataaataaaccctaattttgactacagagagagagatttgaaatggaagaagagtgaggaagtttatataggagagagatcactacaaaattcaattttgaaaatctgaatcgtgtgttcttcagtttcgccatttttatttgttttgatgctcctccatttttttcaaaattcattatgatgggcttttaaaagcccaataatggaaataaaatggcccagcccactttcacgcctcgtcatcttcttttatgctaagaagaaactgttgcttcatcattcttgcatatcaagatatctagagtcgagataagctcatgattaaagaaagtaaatttattcaccagactattattatatatacacaagggtacgttataagcatttatggaatgtaattagatttgaaccacaaagagacttttgacatgaaagttgatacttccttgtcattgtttctcttcacacagtggtagttttctgatgggaagaagaatcagagattggcattcttatctttgcagattccttcaacaaatcgaatgaagaaaaggaatgtggcgggagaacaacggtcatatcctcctctgccaactctagcaagctttcatgtggtacaacctgcaaataaaaaccaataagaacatgggaacactcagaatttgtgatgataatgatgtttcttccatctcttgatttttaccttctctggctgtgagaaggaattttcatccatcacattggtagaggtaagtactgtcttctttgatcccgaaactctcatcacgttcgggtccaatccagttaccaacacttgcatattttctgagttagctccgaagtttacagcctgcaaataacagattttgaaacaggtttttagggtcaatatcagagctccggttgaatctttcactcggtttacctttatgcgtatgtaatctttgccattgtttttccaagagatagcagatgcaacaagagaagtagagtttcccttgagtgttgaagtgagaagagttgctccgcttgactctgcaaaaaaccgttgaacccaatagctaggtgttccatatagatgagaggagttgaagactattgcatcagggttccacctgaaaccaatttaacaatttgagattattgccttatcttcctgagtaaccattcgaacggaaaagtaagtgagagataccgtctatcatttgtgttcacaaagagtggagcataacttgccatttcaacaatgtcactgcaaaaagtcataagatgtttaacttatttgatgtttttagttgagatcaaagcctgggaagagaaattcaaagggaacctattcttttcaagaccaatgagaaacgcagcttctgcaagagaggcaagaaggcttcctgtaccagcatcttttccagtaacagcatattcactgacaaaagcctgtaaacaaagttcacgagtgagtaaaacgctgaaagcttcatcttgtgtttgttggaattaagttttgttataatctattaccgcacctttggacctttgcgtgaagtgcgatcaaattgatgatacatggaaaacaaattgctagcagaagtgtaaatctgtgacaaaaaggaaacacttttttcaggcggaagagagaacacaagacaacggttacagtttctgtcaagatagaaaattttacgtgatagtcatagtaatcagctgggtggtcgagtggatgagaggatccatcgcagttggagatgattttgatatctggataggctttcttgatagcatcatagaacacaatgtagtttcctgtaaagttgtaatctcatttagtgtcaaagatgctcaacaaaaatctaagtcaagatgtgatcatagagaaatgcaaaacctctgtagtaagttttcccacaatcttcatttccaatagcaacgtatttaagttcaaaaggttcttggcgtcccattttagctcgaacagatccccaagtagaattggcatctcctcgggcaaactcgataccgtcgagtgcttcctgaaacaaaaagaggagaaagttttggttttccggcttcttcactagtgaaacagaggaaggtttagtaatcatacttgaacaaagggcatgatactggcagtttcaacttcatcattgtgacttatccctgcacaaagtaaaaaataaggttgacagaattggaagacaaaatgatataagtcagttacaactaagtttttggagagtgaaagaataccgttgttaaacacccatatcggggctgcaccgatgtcttctgccatctgcaagaatgttcatttaatattcaataacgagcttcggggatcattatgtactcaatagaaaagaagaagtctcacttgaaagaactcaaagtggccaaggccatcatcggtccaatacttccaaacatcaccaaaatggcccggtctctcttcccaaggtcctacggtttctttccagcggaaggcattacttaaccattcaccctcgacaaaacaaccacctaaattcacaaatatccagagtaaagaatagactttagcttatttcatcttaagtcatgctttttgtcatattgaactaagaggtacgtctatggatagaataagtaacaaaaatgctactacgccttaaataatacgtacctgggaaccgaaaaaaacaaggttttatatcggccatcattggaaaagatcgtttctaaaaccatgtccctgcaatcaaccaaaaagatcgagtatgggatagagggcttcttccaatattttctctattagcaatctgtaatcttccatctcaaggctctacagggaatcagagagagcgaaaaaagaaccttgtgagtatccactggcatggccgagacttggtcaatccatattgaccctttcttggttgttgttaactgaagtcttgcactaggatcggtcgcttttgcctccaaaagaacctcttttttaatccatttcgaaacatcagaagcagaagctctacattgaaacaaatgaaagcatacaattgaaactttcacacactgaaacagcaaaataaacatattcagacttaactgaagaatctgaaattatttctcacatgatcttttcagaagcaagagtccgtgatccattagagctcgtcaacgacacagacaaatcgatatcaccagtcgaactgcacataaagagccaccttgaacttctttcacttctacgaatattctagcagaagatagaaa

SEQ ID NO: 37937 - DNA, 5791 bp, Arabidopsis thaliana landsberg
gattactctgtaccatagaaggttattctaccactaaattctagtggggtctggttttttgattaatatgttagatgaataattgaataatggaattttgaaatagtcaaatgatcgaataagggatgtctgagttttgtaaaatagacataaaacgttcaagaactggttgtagttagtttataatgcttcgttttatctagttataatattagttcattcattgcggtaatcaattttagaaaatgtgaagatttgagtatttttttcactttggtatctatgtactatgttgttggaataagattatacaaattgagaattctccctccctctatgcgtatgtgtgtcctgtaatctgtatgcatgtatagttgttgacgttttttattgatatgatgactcacgtatttgttaaaaggatatggatgtatattttgtattcttgtataattgttcaaaggactgaaactagaacactatgtaccttttggaatgtcatgttatgaaaaaagtattgtctgtctttgtctccaattgtgtacattgtgatacactacacaaacccataagccctgccacttaccatttcttcatctcgtttcatttaatttctggtttcatctccctcatttaatctcgtatattaactctttctgtgtcagcttatttgaaactcgttacgtagtaaccccatttaggcatttaatgtcaagattagtcttaataggtatagtggaaattgcaagttttggagtattcgattatcaaagagatttattattacatacgttattcaactcgtcttgtcactttaggttgctcgttaattatataaaccaacttcttttgttcattaattagtattactaaaaattttgtatccgcagatcagttatacagtaataaatcatctttggatgcgtcacaaaacggcactgttaattagaaacgccgcgcgtgcacatgacttcaaaaagaacattgtcgataattatgagaattgagtctttttttggttggttccgtaggtactaagtgataaccatgaatttgtctcatcaatcagacaatcactatcgcaagaaacacataaacatataccattagtgcgaagatgtatcactaagccaattcacttctttagaaattaaaccaggaacgaaacgagtctagctgtctaggctatggtaattaaattgccaaaagaaagaaaggttctgatgtgtttggaacacaaagatagcccacacacgcataaaactcatgccctagaatgtagaagaacctagacctagtagtagaaaaatggtgaaaaaagtgacagagtctttcgatacacatagcaataaaaaagttaacgattgtccctaattaatctgtaagcaaaactaagggcgacaacttatatatgtgacatttttgttacaaattgttacgtgggaaaaaatacatatgtttacgaatattgagaaacaattttgtacaaattttatatctaacttttaaatgtggaagaaattaaataagttgctaccgatttatcgacagcaaatggtggttcaccagtcagtcaccatatgttaaattgttatcccgataaggatttttacttgattttaccaacgcagcaaaacaaaaaaaacgaacggctgagatgtaattagagaacatagataacccaacacatgccccttaaaggatctcaccgagaatgtagaaccgggcacgagaaatagcgtcagattacaaagagcgaaaagaaggagggcttcttcttccaatttgtgatcggtgctgatcgatttctccatggataatctcagttttcacgatggtaacatcttcaatctcctccacacaaggtcccaggacccaagtcatgtacgtctccccccaatctttcttctccactgcgtcccattggaattcgttttttttccctcattgctagggtttttagctacagtgctcgagtttgatctatggaggtgtttaatttatagttgaatccttgaatcaacttttgtcaattcttgcttccaattgaatttttactctctctggcaatgtttgtcgactgttgtatgtgtacgaggtagatcaaagaatgcagtttcactcttccttggttcggagactttctcatgagcaagaattggaggttattactcaatctttgactatcttcattctgcttgttgctctttccttaagatgtttttgttgtgtgtggcagggacatcaaggctgtgttaatgctttagcgtggaactctaacggttcacttttgatatctggatcagatgatttaagggtatatgcaatttttttttgttgatttcaagtctttgtgtcagttagttgagcttgtttggtttgggaacaaacgtgtatcacttgtatctaattttggatgggattgttaaagaagtccatttaagcatctaatttctctcgcctggtgctgtatcgttgccttgtcttgacatttatatcttcttttaatttgtagatcaatatttggaattactccagtcggaagcttttgcattctatagatacagggcatactgccaacatcttctgtacaaagtttgtccctgaaacctctgacgagcttgtggtatctggtgctggagatgctgaggtatataaaactacaccttttgggttttgcattcatttggctttgcatggtattcaggtgacttttacttttcttttgaggtgtgtgcatatatttttcctatcgggtaggttaggctattcaatacatcccggttaagcggtagagcagaagatgacaatgctattattccatcagcattgtaccaatgtcacacacgaagagtgaaaaaactagctgtaagaccctcttaatcattatttgggtctatcattttgagctgtttgcttaacagatgtttttaccaccatgtaggtcgaacctggtaaccccaatgttgtatggagtgctagtgaagatgggactttaaggcagcatgatttccgggaatctacctcttgtcctcctgctggaaccgctcaccaagaatgccgcagtgttctggtgatatccaaactgtggttacattgttttcaattacgtttgtatttctctagtacttccatcttggctttaactttctcaaaaacagtattttgatacttgtctataatcagagtctttttgtggatgtttgaatatcatatgagccctatctggatactttgtagacgtatagttataggtgtggctcttatgaaaactttcttctgcaaatgaaagttgttgatagctctgaattttgcagcttgatctgcgcagtggtgccaaaagagcactagctgatcctccaaagcaaactctctccctgaagtcttgtgatataagtgccacaagaccgcacctacttcttgttggtggaaggtatttgcttccatgtttttggatcagagttctctccttatttcttaactaacttgctactctcttttttcatctttggcagtgatgcatttgctcgtttatacgatagaaggatgctcccaccgttggcatcaagtcggaaaaggatgcctccacctccgtgtgtcaattacttctgtcccatgcatctttctgaacgtgttagtttagcctgattgatattaagatactctactagttcttagttctgcattgctgttttcttggtcaaagtgtttcccaagctcactgtctgctacatcttaaattatttcaggggcgaacaaatttgcacctaacacatgttactttcagtcctaatggcgaagaagttttgctcagttacagtggggagcatgtctacctgatgaatgtaaataatggtatttgcagttgagttgtttgctgcttaaagcttaaattccgtgaatagttaatcgtgcagtatgaacttgaatttgttaagaaaaataattgaacttcatattgaaatattttgatttatgtcgctttgttttctttttttttttcctgttcatgcccctttcagttctgctaaagacattgtaatcctgcatgaaaaatttcgatggaacatttggaaagttattgatattctctgagatttcaaatggatatgctattatgtggcccttttaaaaattggattaaggatgatggatgtgttagcccaccagttttttgcttaccttttgttatttacatttgtactgccaatctgtacttcaccacttagtttagaaatatttttctttgctagttatcttgttttaggcaccttttcgcattgaaaatgtcagttttcctaacattttggtactttgacttaagctcaatatatgatgattcattcctttgtttgtgacttgtaggcactggaatcatgcaatacacaccaggagatgtagataacttgttttctttcagtaacaacctccacgatgtagaatctccacctcaggtttccaccactcctcaaaatggctttcacagaagtagcaatgctgcaacggttcgcacctccctctgtaattgttccatatggtgaccttgtcattccatattcttagtgcatctgacgccgttcttttcaggttaagaagtgtacggaattggtagaaattgctaaatggtctttagaagagggtacagatgttttctatgcaattgaggcagctaatgaagttctggatgctcattctaatgatattgagtctgcgctaaggcatgaatgcctttgtactcgtgccgcattgttactcaaggtcctttagaactggtgtctataactagcttgaatccctacattactcctctctaataaccacaatcagctgattcgtttatttttcagaggaagtggaagaatgatgctcatatggccgtaagagattgccataatgctcggagaattgatgcttcatcctttaaagctcattactacatgtctgaagcgctgcagcaagtaaattcatagctctgatcacagttaattttaagtttactatttgacatagagatggttctgcaataagcatttattttagtcacccttccatttcatatacatatgtgctttcacgcagttgggaaaatgtaaagaagctctagattttgcgactgctgcacaacagatgaacccatcagatgccgatatagtggcaaaagtggagagcattaaaagggatcttcaagcaggtttgtgccaactgatgtatgtcttttcctgcaggtttgcttagtaacagatgttatctactttcctgctgtttctgttttcctctatgagctaggatagaggttcaagatgtttctgcttagatgtttttgttttttgtttttttaggctcttcaatgagttataaccactcgtttctagtaatcaatgtggacacatgagagaaaatcttaagcatagattcgtagtatcatctttaagtccatctggcttctctttctacatctaattttgttggttaatatgtctgatgtttcttttgattcaaaagtgtatcaaagtaacagatgtagagctattcttttagatttggtggattctttcattcccaaggagtattaatgtgcttagaagctttcatgattcaacaggcaagggaatttatattcacattttaatattcttgtacttgtcttttgtttgacaaatcagctggagctgagaaaaacgaagagacaggagctggaactactagagtactttctttaagcgacatactatatagatcagaggccaacagtgacagttcacatgatatgtcaagatccgaaagagaagat

SEQ ID NO: 37938 - DNA, 3573 bp, Arabidopsis thaliana landsberg
ttttttttatagtattaagtaaaatgagtgggaaataagtattgaatgtttgttttacctctttttcttattttttactaggaactaattgatgaaataaatttatatatttgtattagcttgtgcagtatattattttagatttcttagaattttattaagcattatattttattttagtttggatgaaaatttggatttttttggacagttgaattcgatgttgatggggaacttcgtatgttgggaacaatccgagatttgtccacttgggattgaacctatgtttcggcattcaggatcatccgtataatttgttgtaggtggcattcaagctttcgagatgtctacatgctcattaacatggttcagaggtctttggaaaataaaatattatgtgtctttccaaatactctccaacacttaagtcaataagggcaacatgactgaacgaagagttttttccggtagactagtgattatgttgtcttttcatacgtaaatcaaacaaacatttttcagagtgtcttttcatatatacgtaaagaatgatatcacacatttttaaatctgaaagaaaaaatataaattatctatttgaaccgtaagtgataagtctattagatgtttcctattttgacctaatgtacattgttttagcaaaccgtctaacgatgctgtattagacgcatgacatagaatgtgtctaagcaaaacattgtagtattagtcgttttgattatgttgtgtttgtaacaaacgacatcgttttaaaattggagataaattgtatagtttaagatttttagaattaaaatctttgtctaaaacaaagtcgttttggctattttattagaatttatagtccaaataacatcttttcaatgaaatagtcaaaataaagtcgttttggacatgcatttcgattttaaattttgaaataaaacggcggcgtctaacacttgacatcctcatcatcatgtttttcacggtgacttaacgtggttatgggtcatagctcatggttcatgtatgtttttgcaaaaattcattagtttaggttttgaatttggatttttcttaagtggaggtatatgatttagcacgatagtataatttgtctatgaaattacttttagtggggatatgaaaaacccgtatttcattttaaagctccaaagttttaactacttgatatcactacttgcattaattttgtatatatatttctaaaaattgattgaaaagataaattttaacgtaagttgttgattaacttttcaagaggttaaaaaattcacattaatttcagaagttaattttataatatttattttatttacgttggatattcactcacctataaatagtttacatagtttcatgtctaggatactaaataaaaaaaaacatccttcattatattcttttcatacactaagaataagtcggtaaattctaagcataagaaaaaatatggctaaactaagctcccatgttactgcgctattcattgttgcagctttggtgtgtgcgtttgttcctgtaatttctgtcgaagaagctgaagcaaaatcattatggaacacttgtctcgttaaaatcactcctaaatgtgcattgaatataatctatgttgtttttggaaatggaaccctcattgagtcgtgttgtcacgatcttgtccaagaaggaaaagtgtgtcacgataatctcattaaattcattgctgatagaccaagcttaattggtcgtgaaacacattacttgaagaagagggatgacgtgtggagtcattgtgtgtcaatctctaaaactgcttaaaatatgtgtgatttaatattattttgatcaaatatatttctattttaattttataacatttttgttattataaattaattgctatgtattaaatttaatacaaaataaattgaagtaatctatcctaagatgaacaaatttcgtttctttttcaaaaatagaaaaaggtacatatttaaaataatccaaaaatgataatggaagaataccataagaacactgttagttctgtttacatgttttgatatacggctaactgtagaatccagtcaaggtaataacaaaaagaattgttttttgttcatttcatgcaaacgcaaaaaaaaaagttaactttttaaaaaattaaattttactcttttctcacatcagtcctaaaatcaaaatctcatcacactaacaaccgcttttttgctttcaaaatctacacaaaacttcaattctgaactaaagagaacgttcaaaaaggtgtgtgaaatctggttctgtagtaaattgaatagtttctctttttgaattttatataaatattactattaaatttatgtaatagctatggtaaagttcattatactcctaaccaaaaactacgttagcttaacatcaagaatattgaacactcaatcattttattatgtctagtacaatctgttgctacattttttaatatttggaatggagtttcttgatttaaattatagtttttccaaatagtttacttagtatgggttccttgagatatgtttttttttgcgttcattgataaaaaacatatctttagtttttgatggaagtcttgcataattattaatctaaaccatatccctctctctaaaaccaattgttctcaagttgctttctaatatgggtaacataattaaacaaattgtgagtatggtatttaatatttgaaccttgtagttattttacttacaatcttatctatgtaaagtttgagcttgttatccaataaatttgcttcgaattttgatatatttttaaattttagtccttaagtttataagctgaatttgatagcagttcttgcattaattttgaatttaaattttgaaaaacagattaaatagaaaaatttaacatacgttgtttattaatttatcaagaggttaagaaattcacattaatttctgaagttaatttgataatattttattttagtaacgttggatattcaatcacctataaatagtttacatagcttcatgtctaaaataccaaataaaaaaatagacttccttacattcttttaatataataataataagtcgataaattctaaccgtacaaaaaatatggctaaactaagctctaatgttactgcgctattcattgttgtagctttggtgtgtgcgtttgttcctgtattttctgtcgaagaagctgaagcaaaatcattataggacacttgtctagttaaaattactcctaagtgtgcattgaatataatcgctgttgtttttggaaatggaaccctcattgagtcttgttgtcacgatcttgtccaagaaggaaaagtatgtcacgataatctcattaaatatattgctgacagaccaagcttaattggccgtgaaacacaatacttgaagaagagggatgacgtgtggactcattgtgtctcaatctctaaaactgcttaaaatatgtgtgttgttaaatattaatttgatcgagtatattgatatttgattgttctaacatttttgtttctggaaaattaatttctat

SEQ ID NO: 37939 - DNA, 2352 bp, Arabidopsis thaliana landsberg
ctcaagatctctccaattaaaagggcaaacaaatcggacaattatctctaactttatgttttacttgattttatgtccggttcagtttacataaccggtaacattgatcaagaagatttcttgggaggtaattgagaaatctcaacgagtatccggttcaaagactgaggacgagagaagaaaggtgcatggtcagagcctttgagatgaaaaacttgttctggagggtttgatttgatcattgcatcttggagagaaaccggtacagcgtaatcatcctccatggttttgatgtagaaccgtcggattgaaccgtaatttttctccgacacgtggagcttttcgaccactggtgcgaacgggattggtctcatcgataccgacgctaatgcaacgtcctatagtaaagaaaacaagtcgggtttagttaaaccgaattgtaccggttcagctatttattagcctaatgtgttgtgtacctttggagggctctgattaaagaaaaaatctctaagcaatgatctgtcgaaatcaacggctgttggagggttctttttgccgttggcgtacagaaatagatggacttgttccatcagatcataatttgagtcaggctgcgaatcaattggttgcgattagattttaacgacggtttctaacacataagaaacactatcacttatttttcaattttgctggttcatcatattggcaattaaatgtcaaaatttggctgcttagtgtattaaaaaaaaaatagaattaaatggtttgaagaaaaaagtacctgttgattaaagagatcaagagtgctttggccattagccaacatagcagcagagataaagacagctttggcgatctttgtaggaaacatctccatcgcataggacatacaagctcctccaaaatcatgtcccaccagtatcacctgttataatattaatttcttaaacatgatccaattgttgtaacttttcatcatcaattagcactggaaagactggtttataagacaaagttggaaccttctcggtgggtttgagggattcgaagaaatggaggagaggcttggagtagtgagcgaggctggtgatgttgtttgtgtcaatcgagctcacacctgaaccggtcaactcaacagcatcgacttggaaaccatgcttctctaaaagagttatggttttgtaccaacaccaagctccgaacccaccaccatgaaccagcacaaaccgcttcgtctccgaaccttccaccttatttagctcctgtcacacatacatgtcaccacataaataagctgcgattgctcaaagagcagcttttgtttgagtttgcatgtgaaaattaatattcttcaaatataacaatatttctaattttaattattaatcaacataaaaaaattgttgtttgaatttggaaaacagttatcatattttaaagtataaattcatgcaatgaaacaatcttaacgtatggttaattaggctaattcattagttttaagacaagtacttgccttgtcaacgagctggttaggcttgatcatgggatcggtactggacctttgcctagagctagagcttcttacgaatcccgcgcttgacttcttaggagtctggacggctgaaacgggtcctgagctggtacccgatggctgagcagagggatatacaacagaggtggagcgtctgaaactaggaggaacaacagagttgctgttacgaggcgtttgactaaagagaatattagtggcagctaatgtttggtcttgaataagagagtcttctatgatcatgatgatgttgctcttggtggtgtctttctcttatcttcttttttgtcttgatccctcctttcttggacgtagacgaagttgaggatccagagcaagagagagatggtagtagcgtcctccttctaaatgaaggcatcagcgacagacgacgcacgtatttgtatttcccggagttatttcctcctccgccggaagatttcttggaacgttgttcctgctcgtgagatatgcatgtgaacgagttccccatttttctgaatttgctatgtgttagtttctcaacaaaacaacaaaagagaatgtttatagatactacatgttcccatattcgtgcttgcctctgttggtggttgataacgaaacagttgagaccttcacgttgtgacaaaaggtatgtgctgcactagacattacatgtactctcaaaaaactaattatttgactaaatctgactggtaatcagaaatatatctgagaaataaatgtgctcagagttggaatgtttgtaatttgacatataataagacaatactctatataaattgtatatg

SEQ ID NO: 37940 - DNA, 4971 bp, Arabidopsis thaliana landsberg
  unsure (1)..(4971): unsure at all n locations
ttcgtccttgccaattccggctcaccgacaaagcactcgaccgtctgaactcaccagctgttccgacttcttcaacattactcgacctccaaaggtttactcgaccaccggtttctgttttgctcgattcactaaagcagaactcggagacagccctgtttactcgagtacagaggctatactcgaccaatgtggtccatttcattgccagttgataacgattatggtttcattgttatctttgagactaacctattgatatttgggttttgagttctaaatcttttgcaggagaatcatgagtaactacagtggcagttcttcaattgatcctgactataacatggataagacagagtcgtcgtcttcaaggccaaaaagagaacagaaagaatatgataacttcaggagaaaagctgagatagctcaagggaagagagcaatgacagagaggtatgagcttatagacgaagatctggaagacgagtacatgcctgagcatactcgcagagctaccaaacttctgcacaagcccgacatattgcctgctgaggaatatgttaggcttttcaagctgaatgagttctgtagcatgaggtatccttgctcgacctcacttgcacaactcggattgttggaagatgttcagcacctgtaccaaagttatcatctggacactctgatggcttatccgtatgtagcatatgaagatgagacaatacaattcctctccatgctgcaagtagagctctaccaaggtatgacctctgatgagttggattgtgaaggattgggattcttgcgattctctgtatatggtcatgagtataggttatcaatcaagcgcttggaaggattgtttggcttccccagtggaacgggatctaagcccaagtatgacagagaagagttgaaagagcaatgtggatcaccattggcagctctgtaccgctgaattcttccaggtcaaagagcaatcagatacgcagccctatcatcaggtacttccagcgttctatagccaatgtactctactcccgagagatcacagggactgttactaactctgatatggagatgattgcaatggccctcaagggaactcttcgccaaactaagaatggtatgtctctccaatgtgaagtcaatgacacacctctctctgtactttccatctatgtggatacaagagctgggctgtcaacaataaccacaagagagcacgaggcgctctgtgcataggtggtgttgtgacaccgattctgatagcttgtggagtcccaatcatttctgctggactcgagccgcgagcaatggatatcgagcacctacgtcactacgaattcctggagtttgcaatggttgacgacttccacaggttcaggtttgagcactctacagacaggagagctagcatattgatttttggcctgaggttacacggataataaagggagataatattgattttcggcctgaggttggacgcctctactatgagaacgctccgccattggatgaggatgatcttctagaagaagctgcttcggatgggttggatgaagatagagcagtggagttcgacactagcatgtatcactttggtgaacatgtacctccagcgagggagagcaagagcttgactgaagctcataagaacaacagtaaactgcagaagtaatgcaagaagcaggacaagctactcgccaagtgtttcaagactatcaagcttctgacagataagctgagttgttcctcctccaccactgctattccacaggaacagcctcctctggagatgccatcgaggagatttgatgagcctgagcacaggcatgagnnnnnnnnnnnnnnnnnntcacatgtcccggctaggcattcatcattcgaatcccgagagcacaagagaagaaggaaggctacactcactcgatctagcagcagatcacgcctcattcactcgagaaggtcactcgaccgcggtgctggccgcagtagaaggagagaggtcgagtaccctcagagcagtgctggccgccataaagctgatgaggtcgagtacccacatgttggagctgatatggaacaaggcggttcgtctatggcctgggagcaattacaggcagccattgacgaccaactccgtttattcttcgactgaggtaagcgcctcatgaataccctaaaatacttggattttcttattcgttttaatcactcttgttagtccaagtagctgactcgcctaacctttctttcaagccctatatcacttgtgagtgtttgtgaggtcttattccgattaagtttggtagaaagtgttaggttcgtaacgacagagatagtgtctcatgtagttctagttcgcatttttcggactagataggactaggtgggcgcttatactttgggttgggatgtgtttaaaagaaaaacaaaaagggttgattcattgataagaaaaggtaaaagactctaggtgaagtaagctaaagaagcagaaaaagtctagtaaaggttttgagatttgtaaagaaaagaaagagttcttgttagctattgaagatgggaaaaagcccttggttttagaatgttaaaaacagaaaccttagttgttaaagaaatccaaatccgctagatgtatcaaagtgttgagaaagcttctgctagaattaagagaaaagaaaagaatgattagaaaaagggcttaaaagattcatgaatgcaaagggtagagttttcttatattaggattggagttgggattaccattagagcttcatttgatatactctgggtagatgggatcttatctctgtatgcatagcttgggacttacctttagcattctactaaagcttaatcattcttgagagaccctttgttactaaagcctattctttaagggaccatttttgtctcttgaccctttgcccttagccaaatgagtttaatatgcattgtatagtatgatccatggttcttgcttaataaatgttaaagggaatatgctgatttgaatgcttgaatagacttagtgaaagattatgttgtgttgtgaagaagatggctaaagtttttaagtagagatcattcaacctaacactctagaactagcaacaaggacactgagactatctattttacatgcatattttggttctgaatccccacattcaaacctcactcctagcctagttctattgttgcttgaggacaagcaaagagctaagtttgggggtgttgataacactagattttaacctttttaggcccttgtttttcatgcatttagcttagtttcaagtctctttttatgcattcttagtctcttttccttcttttgcacattttgcattgcattgcacagcatacttgcatttggagtgttttgtagatgaattaggtatttttggactcaatttgaaggtttctagcacaagggatggacagactcgagttcaggagacctaagaaaggatttgaagtatactaggtctatgtactcggctggaggccgagtggagcacacgtgaagaacaaggagtctactcgaccaaggcacttggctggaggccgagtggtgcacttaaggatgaagagaagccactcgaccaagccactcgaccaagccactcggcctacggccgagctgtgtgaccaagaccaagccactcggcttttttactcggtctagggccgagcgctcctgcgccgacttatctattttgtcttattcccaattagggcaacctaggattgcctataaatagacctcttatgtttttccctaaaatatcttagctttgtctgctggacattagggttctttgattttcttttgcattttctggttgttgtgttgagaatctgaatttgatttcttctgcaaaattgtttatcttattgagatctatgatttgttaagtttataataatttttgggttttatgatttttctgggttttgttctatgatgttcttcattgttcttgagtagtcttcttcaaagtttttgaggatgggttaggtttaggtggattcctctgttctttagctagctaagtgtttgtatgcatgattcccttttgttttaggagttcttaatgttattttctttctgatcaattgaaaattgattttagactttctccacctaacaagtgtttgatgaaatatatgaaccaactaatttcagagatttgtagattctagcccaagacattggatgtttagactgcttattgactttaatagattggtgtttaaagcctgctttgctatgtttcatcaatggaaattgagattaggaagtggtaaaattatgaggatcattttcatggaagtggattgatccggttttgaatctattgtctagggatagcttgattgagtttgttagttatctaatggattgaggagtccactagaaccaattaccccattcttaagagctatgttgcgcttagatttattgagtttcgtgttatttattcttctactcgtttagtttagtttatctgctcgcttcactttgttattctgctcgactttgttactcgacctgtttactcgacctgcatgttcatactcggccgagcatctttacattcctctacttagttcattatttaagtttatgcattgagagttcctggtctgtagtttacttcttgcttttatcactcatgttctttaatttctgcttagtatagttagtttcttgcataatcacttaggttgttagataactcaaatcatctagacttggcttgacttagtattctctgatcatatcctgattgatagcaattacacccatttggattgacaccttaaatgttgcaatgacagaagatgcatttagggaattgacacacaaaaccctactatcaatttggcgccgttgccaaagatcgaacccgggtcacccgcatgacaggcgggaatacttaccacgggacgataacg

SEQ ID NO: 37941 - DNA, 13639 bp, Arabidopsis thaliana landsberg
ctttttttataatgaatggtgattggttaataaattgttatgatgattttttgagtgtataaggttaacttttaaatctcttcattaaaacagaatcttaattttggtgaatgtgctaataagataacctataattggtttcttcttttaatgggttttaatttaaattggataaacccaaaatgttttcccaatgatttctttgtgaaatttatttttattttgatggatattaaaccttagtatttacatcgttctgtaaacttgtatttcttcaaaatttttataagatataacgattaaattgctaaacccatttgaaagcctaaaattgcatatctccattactctggttgatgttttttattcataaatcacaacatgctagtaaaacaaataaataattacttactaaattaaataattaatgaaaattgtcaatttcttaatatcataaaaaacaaattgcggtctctaaaaacgaaaagtccaagaaaatacaaaggtgatcattaaaatttcaaactgtttctatgtgaacaatcaaaatgtttcttaattatattcttctccttcatctttttcggcaatctcgatgtctctctgatccgtcagtcaaggtcctccttggcgatttagtaagtaggtgatggaagtcgttcccttctggtgtaaaattctccttgcgatgtacgacggcattttgtaaattttgcgctgcctaaacacatgatatacattattgtgtcatgttatttgcgaatattttgggtaatggaggaggctcaagctttgatttttaattcacaaaaacttatgacatcaataaataatttaaatatatatacatgtccttctaaatagggaaattttctaatagcacatttaaattaaaaacacttataaatagtttttaattaaacatatttttataagtaggtatgagaaaaaaagataatactttttcaattgtttattagaattatataaacctttaaattaaaattattttataagagttacaataaactgaacaaaccttaaaaaatatttattgagattttccttattaattcgattctagtaaagtgtaattgttactaagtatgatggtaaaattattggaagttgaaaacattagattttaaccattttaagcccttgtttttcatgcatttggcttagtttcatgtctcttttcatacattcttagtccattttccttctttttcacattttgcattgcattgcatagcatacctgcatttggagtgttttacaggtgaattaggtacttttggactcaacttgggcgtttctagcacaaggagtggactagctcgagttcgtgcgatcaaaggaaggacatggagtatactcggggtatctactcggttggagatcgagtggagcacacaagggagaggcaaggactatactcgaccaaaccactcggctgtaggtctgagtggagcacatgatgaagaagagaagctgctcgattgaaactactcggcttgaagccgagtgatgtgaccaagggaagctgctcgacttttctactcggccgagacccaagtagtgctgcgctgactttcctattttgtctttttcctaattagggcatcctagtattgcctataaatagacctcttatgtttttgcccaaaatatctttgctttgtctgctggatattaaggttcgtagatttcttttgcattttctggttgttttgtcgagaatctgaatttcatttcttctgcaaacttgtttatcttatggaaatctatcatttgctaagtttataatgatttctgggttttatgatttttttagttttgttctatgatgttcttcattgttcttgagtagtcttcttcagagttcttgaggatgggttaggtataggtggattcctctgttctttagctggctaagtttataaatgcatgctattttctttatgatcaattgaaaattgatttcagaattctccacctaacaagtgcttgatgaaatgtctaaaccaactaatttcagagaattgtagattttagccccagacattggatgtttagactgcttattgactttagtagattggtgtttaaagcctgctttgctatgtttcatcaatgaaaattgagaataggaagtggtaaagttatgaggatcattgtcatgaaagtggattgatctggttttgaatctattgtctagggatagcttgattgagtttgttagttagctaatgattgaggagtccactaagactaattacctcattcttaagagatatgtttcgttttattgtgtaaaactcgtgtttttagtactctgttcgtctcgtgcaaaattggtgtttttagtattgtactcgacctgttggtagtttactcgactgagtgcttctctttgtgcttggtttactttctggttcttgcatttacttcttggttttatcactcatgttctttatcttctgcttagtatagttcaatttctgaatttgatttacatgttaacctgttgcttaggtttagtagaaacacaccaaacctattcacacttggcttgacttagtattctctaatcatatcctgattgatagcaattacacccatttggattgacaccttaaatgctgcaataacataagatgcatttagggaattgacacagaaaacccttgtatcaattggttttatataggatttttttttctttcagttttcctaccaatataaatactattccacctacttaaaataaacatttttgtttttttacctaattatatattgcctccacctacttgtcaaaattcgtttatcacatttttaacaaacctacgattttcctacgaaacttttagtaggaaaggctcctacgttattccttcaattctcttacaaaattattttcgaaggaaactggtgtaacgccccaaccacccctatcagtgggccccacatcctctctcgggctcatgggcccacccttgtctgacagtcggtgcgccacgtttaggaggctttaaagacttgttaccgactctacaaatcaacacatgatctttctccatgctttgtcatcactcgcatggtttcgacaatcagttctcggaaggtcacccatcctaaaactactccagctcaagcacacttaactgtggagttctcttaggatctttaactgaaaagataagtgcactttgatgatatagatggtcaaatcaattcctttaaacctctatgtatacagtaacatattcataaaattaggttgttacaattcactcatactaacagatcgcaacgtcctcgttgtgcaccaacaccgtcacccccaaaggtgtgaaccttcttcactccacactcatctaggttcagctctgataccacttgtaatgccccgaccgtccctaccagtgagccccatgtcctcttttgggcatgtgggctcatccttgcccgacggtcggtccactacgtctgtgaggctttaaagacttgtttaccgatcctacaaatcaccacttgatctttttccatgctttgtcctcactcgtatagttctgacaatcacttttcggaaggtcactcatcctgaaattattccaacttaagcatgcttaactgtggagttctttcatgacatttgagcgaaaagataagtttactttggtgaaaataggtggtcaaatcaattcttttaaacctctctgcatgcactatcatattcctaaaactgtggagttacaattattgtcgtggtcgtcttctaaaagcttggtaagaggcaacaactttgggataccccattgattagcctcagcgtagaacaatctgcatctctcagcgattgtatatagtataatgtatatatcgtcaactcaagactttaaacttcttcaatgaacgtattaaaaaagaaagagtcaaaagaagttgattactaatggatctgcaaagctctttgctagattgattcaaaacaacaacgaaatagcgaactctccttttccatccaggtctcaatgattcaagactaaatacgtttagatagagagacaagtgatcatcacaagcagggaaacccttggggtggacaataaaatacctaaagacaaaaccaaaagttctgaaatcttttacacaatttgtgtaagctaaattaagccttaagatatgatagaaagtctgtggatgtcggactcacacactcaagtatttatttatttagtgagaaggattattcttgaggacaaatatactagaaaatagatagacgattatagagaaaactatgagctttgtaaggaaatgtgtatagtcagtttgcacaagaatgcgtgtgtcctttacatggtctttgacccataatttatactcaaggaatacatttaatcctcatttacacacaattactctgtcttaaatgtatccgttttagtcttcgaattaattattcaaacgttcgaatttgaattgactccgaacgtcttgggcttcaactgtcagcccattcgacacttcactccgggtaactttgaccttgattccgtatccacttcgcaggtcaacacctcgcttgtactatcaactcggggtatcctatgggcttctcttcttttgggcctctcctgcttatgtggcaatctttgaccggtcccaagcccatggtgcgggatccgacactaacaccagtgatctttcgctccacaacggtaacagatattcgcatacggtattttcacttgtttgttaccatctttgttttcccacttcttgtgagagtttgagttcttaaagtgaactccactgcctcgtcctccagtgtatccacgcccacgaccacgaccgcgaccacgaccacgaccatgcccacggccacaaccacggttgtaccactttcttgaccataggatgtcacattcgcttcagggaatgtgtgagaccccgtcccggacgtctcggcgtccggcgacgttgtactcaagttcgcgcctcttctcggccgaacctcttaatttttcgcgattcaacatagaattgcctttacgaggttaaattctataatcgctctcttattacacagcggaagtctttctaaccttggtttaattctaaccaactcttgtaccagtttcatcgtctttgtcccttagacttagatcgatcctttactcggtcaagacatgcatattgttcgctaaccattctaggcctaacaatcgcatattcttttatcctattttcacggtcaattcccaaacgtctatcctaactagtaagctagatcgttacataccttggccaatatgcggatttgattccttagcccgattgtcgccttattctattcgttcaactattcgtatccgatcgtgcattaatgaaccaatccctatcgttacttagccatacaaccaaccaaccccactggtctaagtacaacgatagagattggggatcgtacgattcccttggttcacgatggccgaaacaagctcttggcttattggtccatccgtcctccaaacgtacgccccttcagtttcatggtggacgattaagcctcggcttatcgaactatccatgttcccgatccggtcgtttaacactacgaccgcccacagtttactaaccgtttatccgtccggtccatggtggtcggtaaagctttcggcttaatgattcagccatgcggtccgaacgatatcctaatcacacccaagggtccgtggattcatcccccggatcatcgtaggctagcccatgaaatcctacttctgtcggccttaggtttgctcgcgggtccaacatctgttttgtccatcggttcccaccgtggactttcccgttggttatccgtcgagtcaccctttggtcttaccgatctccgatcggttttaccatggctgaggagatagatacatgaaggcagccgcgatattgatcctatatggtgaatcacgttccttacccatccttggtgctttctccctttaccggtaagattgcatccattggcgacccttgggtgtgttcggatgcacttatccttgtgcttcctcgaacacttttctcgatccatcccatccgacgatcagtctgtccgacccgatccgtcagacgatcggcctgtcccatccgacccgtccgacgatcggtctgtcccatccgtctggccgatccgatccgtctgacgatcggtctggccaatctgatccaacgatcggtctaccagatctgattcgtctctaagacgaacggtctaccctctccatcctctacactccatcgaaccgttggatcgggaggtagcatgcgcatcagttcggtcgagttatactcgccgagccgcaccccctttccgaccaacaactctaggatgtgttggaactcctttaagaatgttttatggtgttttggatgttgtgagatgatgtgagatgccttgggcgtcctcccttatataggaggcgaatggatgcttcccgaagcatcacatccgttccttgcacccttccgaaaggtcacatccgttccttgtatccttccaaaaggtcacatccgttccttgcatctattgagcgatgcaaccgttcgttggtacccgctcgaccttacaccttttggccgagacacctcttcacccgtgagctaccacagtccaccagctcgagtgtcagctgaccggaccacccagctgggtcagaacatgatcagctcactgagctcaatcgagctgtcggtcagctcacctagctgagctagctagtcttccagctggtttagctcacctagcttagctagctagttcatcctagcttgtccagctcacctagctagttcagcttgaactttctcgttcttccgactaagtattttagtccatttctttaccatggtctagttttttcctaaaacaacctggcctctttatgaacgctggatgctgtcgttacaagtctacccccttaaactgaattcgtcctcgaattcggcgtgtgtaagatcttgcttactccctaactcgggacacgggcgttacaacatcattcggctagcgcgatccgagccgctcaaccatgatctgagggtcagctcaacccggctccgaagaaacttcagatcgggtcagaaaaccttcacccgaagaaaggacttaatcaatacaagatcgacataccatttccgaaaagctcggaaaagataataaagaatctccgaggatattatcaaatatagaagctcccacaatcttcggaagataaagacaatctccttcgctgactctaagataaacagaaatctcccgagaatatcgcgagaaggatctgccaaagccctatataaagcacctctaaggacaaacaaaaagaggatacgcactaaaacgctctcaactttaggctatcaaaaacgctctgattttgaaggcaaaacacttatatttcatatttctaaacacttgtacgatcaaatcctcattatttcaataatataaccaagaacaccgtccgcggtaatcagcaattctgttgttctttgagaatctcacaaagatccgttctttgaaggaacccttagtacaatttctattgtgcgagttttgactctcacaatttggcgctagaaggaggggaactatcgagatttctcttactcccagaacacagaaccaaccctaaaccctaaaccctaaaccctaaacccgaaaccctaaaccctaaaccctaaaccctaaaccataaactcttaaccctaaatccttaaacttaaacccttaaacctaaaccctaaatcatagatcccaaactttaaaacctaaatcccactttaggcttccggaatccggttgcggttttagttcttatgctcaatgatacacaaaacatctagtcatatttgacttcaaatccgctaaccaagcttattcttgattctcaaagctttgatagtgaagccgaatccttatgagtttttggttttgaatcgtttaacaaggaagcactactttacttttcaggatctggttgatgtggatgtcggattcacactcaagtatttattcttgaggacaaatatactagaaaataaatagatgattatagagaaaactatgagtattgtaaaagaaagtgtatagctaatttgcaccaagaaatgcgtgtgtctttacatgatctttggctcacagtatatacccaaagaatacatttaatttttatttaatctcaatcattctatcttaaacgcatccgtttccaatcttcgaattaattatttgaacgtttaaatttgaatccactctgggccattcggcctcttcaatccgagtaatcttgacttcgattcttccctcacttcgtaggtcagcacctcatccacactctcatttcgaggaaacttgtgggccttttatcttatgggcttcttttacccacgtagcaatctttcgccggatccgagcccatggtgcgggatccgacaccaacaattagcccccaagtctttcaaagtactactccagttcggaaggctttaatgctataagggcaaagattgcaccaaatgattcttgtgatttcccgcctaaattacgtgattgcattgatctcggaattttcccatagttaatgatgtgacacctgtcacaattatgaccgtatatagtttatttactattaaagcgaggaaactcttccacttcctccacgactcccaaggtggttccgtcatcattactggttcgcgtgtaggtaaattcactttactctttccttgtcattttatttttttacgcttctctctcaaagcaaagttcttctctttctccgacccttcaatcttcctattctctacacgatgaattccgaaattgaaagacctgaatccccctctttcgacgacgccgactctagtaacgacctctgcacccggccaaatgacatcgccggtccccactatcaatccacatgcactctccaatctcttaatcgattgggagagctttgtcggattgcgaccgaagtaatgaaggattttcggatgccggagcctaccgaatcgccggaagaacaccgaaccgggttcttctgcgtgtacgaaatttacttcaaagggtgttgcttgactttccctctccccgaagccctcgtgcgttacttgtcggcccttgaaatcgccttacccaactaacttgcaacctcctccggactattcttggaattattactattgcggctgaagctggatacgccatcggggttcccaaactgaacgaacttctcagtgtggggagttcttcgaagaaagtcggatacttctcggcttatccgaacgctaatagaaatctcatctcgcaccttccgaacaaagatgagaattggcatcacccgtggttattagttaaaaagagccctgcctcgatcggaaacctcctggacttgctcccctcgaagtggaacactaagcccggtagttattaggtcatgcatatgaacttttttttatttcatgccttatctgaccatcttctattttccacttcgcagctttcatcgcacctacccttcctactgctgaattcggcgaattctttaagattgtcatcgagggagaaaccctttggaacttcttcactctcgaccggttcatagaagccaaccacaagcttaggatgatcccccctggacatctcctccagctgccactgccccctcttttacctaaagggacttctgctcgggccatcgcagctcgatgcaagacaatgtccaagtcgattgtggaggcttgcgaagtgaacaaatcattcctccaatccacagtcgacaagaaggtatatagcagaaccctgctagtcgatgatggcagcgccgaaggggcaagatttgccggtgcttacagacccactcctcaccgcgaaggtcatagcggccggtcatcccacaaggagcgatcacctcgacgtgactcaccccggcccacttcccgaactggactcagcagcgagccaattgctgacctgattcagaagaagagagacagaccatcccgcagcagcttcttccccaaaacagacaagacgagggcccgaactgaccgctctcctcgaccgttgtcgccaccccgatctatgggtcctcctcctccagtcaccgtatctcctttgtccggatcaggaggtgaaaaggcatagcggagtgctaaccctctgacggaatgaaactgaggtccgagatgctggaactaaagctgttttggttccttagacaaagtcgctcacgggttagaaatttcctcccatttttattattgcattttttaccatttcgacttattgacttagcgttccttgactggtccgaccttctttaacagcgatggaaacggagggaaacgtctttcgatgtttcaaaaccggaaaagacaccatcctgccagccttcgataggtggcgtcctgcaatttgtgaacgattcctactccatgcccatcactcatctcgggttagttcctttttcccacaatagatcttttaatctttgctcctttgctctgtcgctaaccccttctcgttcttatctgattcaggcgaacaacgaactcaacgacatgattgagtactacgaaaagctactacttgatagggaaaaaatgttatggcgtggaaagataagtcttcgtcccttgagtccaatctccgctcttcaaatgacaccaggctgaaattggaggatcaattggacaacctctccaccgaactcatgaagtccaacggcgagctgcaggaacagtactaaaggtacgataagatccaagaagaactctcaacttcttgggacagactttcggaatcctaatccaatgcctacgaattgtccaaccagatgtccgaattgcagcataagtacaaagcggtggccaactatcaggacgctgagttggcgaggtcggcatcaaaggccaggaaagaggtgaaaggtcgcgggatggagttgatccaaggggcaatcgtcttcatcaaaaccgaaaaggctagaatggagcttgaatcggacatcaagaagtacgagagcaatctcctccttttggaccaaactcatgaagatgactttctgaagaacgagagagggaagagttgaaagccgttctggaagagaagcgaaatcgtttacctgcccttccttcctcgtcgttcaaccctcagcagttcgaggagttcttcaccgaatcgcctcctttgagcgaatctggtttagactgggctggtaaattccgactcttctctttatttttcaaaaaaaaccgatccacagcgaattactcttgtgttaatccaagataattgcctcaggtgtcagcgattccgttgaacccgaagtgcctattgcaccatcatcagttctggaggcgataatcaccccgtctgaaattcctccatccacgaactcggagacagtggtcatcgaggatgatgatggttcagactccgtgattcgtggcgagcagccgctactgacgagccgggtgagactgagacagctgccgcagatcctgagtcagtttgaaccgaacccgagatacccaagaacccgtagtggctgtgtccacttaatggggattgtcccttgaactcgaaattcattattgttgtttttctttttgaattactttatctgcctaagtaggctttaaacaaatactttgcctgaggaggctttaaaccttttctttaagattatgatcccaaaagggttttccttgtgctaattttgagtatggatttgcaaagtccatctctttaaatagcgtttttgtttaccatgtggtcaagttacggtatttgtaggttgatcagacctatccctaaaaatgcggacttgaatccgcgaattccccaactcgggtttagtcagttcgattatttttgcggtctctgagcctttactatttactttgcatttaatggcccacttatcttaaatgtgacagttgcctttttgtccttggaaatctggaaaagtgtcacgcttctaaggcaataattgccttttcctcgatcccaaaaatggataaactcattcggatacgccacaattattaactttgtggtttcgagtaaaaccctaaatcactataaataagggcataaactttcttaactctcgaaagacatgttcgcagaaatttacttgaacaacacctatagaatggaacgcgaaggagcaaccaccgtctgcccccatgaccccgggagtcccttgtttttgcccggcgatggcttcgagcccgccggtgtcctctttccacacgcttgtttccactttccttcgaaggaaaagaaggaggcatacgactttatggacaaggtaaagcctctcttgttctctttttcggaacgagttctacttgttttctaaccagttcgtactttaggtcgtcgataagcatcgccgcctgtgcgatgaaaggcagcgtttaggcctcaagaggcaaacgcttgaggcccaaattgcttgcatcgagaggcagataagggccatggagagcgacccttttcagtgggagtggaggaacttcgactgcgtggcgaagatctcgcacatgcttcggatgtacctccgtgctcgaggccaagtccccggtcctgtaaacgctccggttcaagtgatcccgtctgacaatgaagacggtgaagattaggaggaagacagtaacccctggaagcgcgtgaagtgaacccgacgtggacgacaaaaacgaagcgtccactttgaaccccgaaccggcgatgaaggagcctgttcctgagccccttccctaaatgttcccgagactaaaaaccctcttttttattttcgcatggacctaactactgggcttcggcccatctatttaagagaactttctaattttccttgattcatcaaatttttgttttggagatactctttgaatgaagggcgaccaaagcgacgtgaatgcctccgcgaatcactccggctctaaatggagtcaaatctttgaaagctacgaaaacttcctataaatttcttttctaggtcctctttcattcctcacttacagtacaatattttttttttctttcacagttatggccttcaacctccgatgctcggaatccatgaggacatttcgaatgaggacattccgaatgtactagacagaggacgccccccacttcgcagcttcagatcccagatccgagctccgtgtgcacttatcaaggacctttagagcagagatcaagacatcgcgatgtccttcatcaaagctctcgcggctcaacacaaaaaacgctcaacggaaaagaagaaacttcgaaagaagatcaaccaaatgctacgaagagtcactgtgatatcaagggagttacacaccctcaactctcaccccagagattggatcgaactcgaaatcgcagaatttgctagcatgccggattttatgatgcccattcttgacatcgcgagtcaaggggtcgacgtgttctgcaagacgaggaggatttcctagttcgaaaagcgtataagatttcggcaccctttctttgtttttaaaaaaaaaaaaaatctgtctttgtttcttgctttgttcgttt

SEQ ID NO: 37942 - DNA, 791 bp, Arabidopsis thaliana landsberg
aacccctatcacttagttttcgacttttcggaaatatgttagccgatgtattagtcgttgttgctcttgtttctttagtacctttagtggttcctatacctgttatgttccttggattatttacaagcgggattcaagctctcatttttgccactttagctgcggcttatataggtgagtctatggaaggtcatcattaatggtttttttttaatattcttttttaggttagcccaattaattatagaatagttggtttacattatgtaagaaacacttgtatatgtgatatttgatattgcctaggtatatatgagttaaagatctatataatctgaatctgctctactatttttgtgaatttctatttagatttagatagggattcgattagaagttcttcctttttatctgtgaattggctgaaaaaatgataaaaaaagaacgaagaattcaaagaatggttcataaaaaaaatggcataaaaaagtcgtatatatattatggatttttaaaaatcccgcggataggaactactatcaaagtaattcttatgattcaataattttattatattatttcatatttcaattaaagtttttggtttttttggctggattaatcttagcgattacttaattagaattacgtcctaagtcattggatgattgtatcattaactatttctttattttggtgtgaggaacttatcatgaatccactggtttctgctgcttcggttattgctgctgggttggctgttgggcttgcttctattggacctggagtcg

SEQ ID NO: 37943 - DNA, 2728 bp, Arabidopsis thaliana landsberg
aatcagatggaagatcataaaataaaagcttcacatagctactctcttattaactaaatggttctatacatttactttgcttctatctatttgtacaagtcaatggtggctcaatacttcagacactttacaaaatttaaaacaaaggataatgttttatacagttatttatctatcttgagttgttgtcaccttcagtttcaagtttctgaacacgtagccggagtctttgctgatgatggtgtagtttccagagaccattacccaatacaacggctgagtatataccatgtgtgatgataggagcaagaagattgtttgtctgcaatattttcagtttggtatcaacgattttactacgacatgtcgaaaaaagaaatgcgtgaacagaagaagtaaaaacctgaatccattcaaagccgaggtatagacccaaaagcccttcaagaagaggagagtagattttcttcatctgtcttcgctcataccacgctgcaaaaaggaacatagaatccttagtgtgtgatagtgaacatatctaaatccttatgctaaactgagttttacgaacctgcaaacaacttcttcagctcgtctcgggcagagcgagttttcaagaccggtgccattatataagttggatctaagagaaataacaaaacaaaatcagctatgaggttaaaggttttgtaacatagagaaatgttttaagtgtagaaggaaacctttaggggaagcagctatgtagtagagagaaccagtgagagcggctgtaatagtggctgcaaatacttgagcaaatggtacaaatggtggcaagagtccagtctgaaaattcaaacaattaaaagtcaaatacacttaaacgagttcaaggaacaagaaggagacaaggaagaacagaaaatctataataccaaagcaaccattcctcgagaatccgagattagatctgtgccccttaggaatatatcagctagtgcaccctgtcaaaacaatatcaaaaccacgaaaaacttcacatacctaaaacagaaagagaaacaaaacaattgaagactattagaaggcacaaaacctgaaacgcagcacgatagaagagctcttctccaactgaacttgcagtaactactaagataaactaaagaaacacaagacaaaggtttaacattttttctcaaagattcaatcaataagattctgtgttgagggttcttcacctgccaagctgacattccttgaaagaaacctcgaagctcatcatcttcaacatctctaatggcacgagcatgaggcgacaatttaacaacttcatcctatacaataaacaaccaaatctttctcataaaccccaaaccttcatagccatttaaagagacattcattatcactactaacttacatcatgaatgaagagaagagccatgattggtggtgttgcatagccaagtccagcaagtagtgcatcaagagaaggatcaaatccaccagatgaatcaattccagtcactgaacatataaatcttcctgctacagccattgctccatatattcctaatgattcaatcacacattttaacttttcatccacacaaaaattactaatgacaccacaaaggtaaaatttcaagtttcacatatcagaggagtgaaacagaagacatttaatgtaaatctactcaccgattccataagtaagtctaacgacggcgccgattttgtcccagatcggaaaatcaacggtggtggagttagcaaaaccacgatcaagtgtagtaacctccatggcagtaccagcaaatctgcctgctcctcctcctcctccgccaccgacggtgtctgttgtcttctcaatcccttcactgctccgttcagcggaagctataacgcttcgtgacctttctccaccattgaatctcaattttaaactccgtcttctctccggaaactcatagatactagttgaggaggaagaagaagaagagcataagcctgtccgtgaaaacgacgcggagctagcatacgagagtaacggaagctccattgaaggttattcgaagtaaccggaaactacaacacttattggtgatctctggccggtgaattctcactgtgcttcgtcttcttcatttgctctgctaagtgcttgtgctttttgtttggttttgggttctttgaatttatacgagatctaaaactggagagataaggtttattctggtccgttggatttttatcgtacggttaggaggatatctggtttagatgaagcatatctctgcgaccaatatttatttgacacgtggagataacattggcgggatcagaaaatctgttcccgacggggtaactgccatctcataaactttttatttattatattatcttaagatattattaatataaagtttaattttaataattgtgaaatccagggaaaaagaatgacaatggttttcatttatgttgtattcaatttcttttgaatagattacccttttttgattcaatttctttttaatgttttgattttatttttgaatatatgtatactcgaaaaacagtaaaattaacactctaagcaatgatatttcgttaatattttaatctaaatcattatcttaaacaataattggcataagaagtaaatagaaaatgtgacaaagatatttaaattaaaaaataatatttttagatttttataaactttggtggttattttgactat

SEQ ID NO: 37944 - DNA, 2791 bp, Arabidopsis thaliana landsberg
  unsure (1)..(2791): unsure at all n locations
gagagatattcagagaggggacagaacttacatcaaattctgcggccatggcggcgtttcggagctacgaagttatcagcaccgctcgccggagaaaatatagacagcttgaagacgagttttgccaagaaaagactcatagccataagtaacagcaaggttggtcaatggggttactttgcaaattataaactataggatttgtttctatcttcgattttggcatgcattttacttctacaactgatcaaccccgcttgacaattgaaatttatttctctttgattttggcaaatcattttaattgtagtactaagtaccaaccaatcctacttgacaaatgaatatttttaaatgtattttcaacccttttaatttggtatattttaaaaaaacgttatattatcaattcaaatttgaatgatatcgtttggttaaaataaaataaaatttaatgtgatattagactactagtccaacgaaaatatagcaaaataataaaatggttgacccatttggaataaacatttttatggttaaataattgaaaatatgcaaaatgataacaaatcaattatacaattcaataaaattattatatcagagaaataatttattctcaaacaaaacaaaaaattctcatatgcaattattaaattagagatttttcatcaaaagtaaatacttgtaaatataattcaagattcaccttgtttcaaaatgcatttgaaataccatctcaaaatatttgtatgactttgaactgttattcacttgatctattaaaacggacacatatgttttcactataatacacaattcataagtcttcaacattacttaaaaatcgtctttcataactttacttaatattgttttcggaaactttttttgtgtgatgttttttactttaataatcgattgatttgcttagtttataagaatgttttttgtgatgttttaagttttcaaaaacaacatggaagacaggaatactaactttatagtgaattcggtgttggtcccgaccccttcaccatggtcatgttcaaaccggattttgcaagactagatatggatactaatattgataatgacacaatttctctaatgatctacatcctcgtggagattttattttttaaaataataatgaaaaattatttatcaaatgcttataatcgtttcattnnnnnnnnnnnnnnnnnnttaaaaatcattcgacaatttctttttggtaacttcttgatgtcatactacataatcatagttgatgagtttgtacaaaacttgaatagtttgatatcgttattggaaataacacatgtaacaatcttggagatataaaaatgaatataaaaagtgtagtttgtaaaatatttttaagattattattgtgacgaaattatttttgtataaaaaggtttagaatttgatagatagcgttaatatcataaaacggaagaaacaattaagaatgttcagactaaaaagaaaagaaaaaaatagggaaaaatgttttggcttccggataaatgttggggtcaatattaaagaaataaaaggtgtgggtgctgatacggaaattagtttacaggctgtaatttttctttcaggctctctctctttcgtcgccgaaccagttccagaaaggctggagcgattcaaaatttcacaaattaaagtcttcttcctctccgaatcagagattgtctccttcttagctcagatctgggagcttcttgtgatagatttggaagaagatgactgtgatcgatattctgactagagttgactcgatctgtaagaagtacgacaagtacgatgtcgacaaacagcgggaggccaatatctccggcgatgatgcctttgctcgtctctatggagctttcgaaacccaaatcgagaccgctctcgaggtaattatttctcttctttctgtttgcatcacaatgttgaacatagagtttgatatttttccggtccggacttaaatggatgcatgagtccaattcagtcaaaaaacttgaaattaggtcgcgattagtcctgattttgtatactgtgatcgagttttcgtgatgggaatgaaaatctttttgaatgctttaccagtttctagtttgagaatattttgaggttcatgaaaattttcgatttgcagaaagctgaacttgttacgaaggagaaaaacagggctgctgctgttgcaatgaatgctgagatccgccggaccaaggcacgattgtcagaggaagttcccaagttgcaaagacttgctgtcaagcgggttagcttccttacattgcttctagttatatcagtagcttggttgaggttatatgattgttttgaaggatttaactttttcagactcggtaacaatctatacattgttaggttaagggccttacaaccgaagagcttgctgcgagaaatgatttggtgctcgctcttccagccaggattgaagccatacctgatgggacagcaggtggccctaaaagcactagtgcttggactccctcctcaacaacatctcgtcctgatatcaaatttgattcaggtgattcaaatgaagtagctttgtttgtctcttgtagattgtactataatgttcggcttatctcaaaatcatatgagctgttaatctcattttctgtctacgagcaacctgaagttcaatatcactgagtgacctctattgtgaatgttagatgggcgttttgacgatgattactttcaagaatcaaatgaatctagccaattcaggcaggagtatgagatgcgg

SEQ ID NO: 37945 - DNA, 2367 bp, Arabidopsis thaliana landsberg
tccaagagacccttactgctggtgaatgggtctttataggaccctctctctctattcctctgttatgtacaaaacctcagacaggtaatgaaccctaatatgaccacacactctctctgaatatggatgattcacaagaaaaaacattcgggtgtcaaagtcacagtgtaacaccagagctagtttaaaaccaacacctctcttttttgtgtggataggactggtagcataggaaaaactgttgcaccccctatacacttatctcatgcctttcttacaacattaacctctgcgatgcaccattgccataaattttatgcagaacacacattatctctctttctttctctacccaattatattttcttgacttgcaatatcaaatcatatcattacttatcaacacgcttcattctttcttttcaggattactgttttcgaatagttcagacttatgattcgttaccattgagttattgagtagtagcttaatatcaatgtcgcatttaaggaacattataagctactaatatgaaaagctaagagttcttacgtcaataccatgcattgtattatctataggagcaagttctatgatgtaaaagtagacctgaaacaaggacaaaggtattgtgatgtatattgcacacttgagctttagtattaactgattcttggcttcattcacatatatagaataaaaagcaatatcaagcacctctgtattatgaatgcaatacaaatacatgacagaagaagaaggcctacattcatattcattcatcatcaacaacaaattacatcgttacacaaagtttgctgaataaataaaaattaataattactggaatgagttccaaacatcagtattgtgtggctttcacgttaaaattatacattcttataccaacaacagtgacttttttttttatataactacaaaagatggagcctaaaagtggagtatcttagattttcttggggaatgtcataccaccgcctcggatagagagtgggggtcctttcacagagctcacctgattggtatcaaggaagattatgaccacagttatgtcatcgtggaaatgtctcctcacacctctctctatcttctttagatcagaatatctcatctctcgtttctttgccgcctcttgcagtgccatcttcaccagtctccgtgcaatcccctgcattcatttccacaacaaaggatagagtcaatctttggttttgtaattggtttttactgaaagtgaaaaaaaaaggaagaaatgggtctaacgcacgtttcgtgggtggttctgaacgatgtcaacagcttcttggttgctcatctgttcccatagtccatcagaagcgaatattagaaacttatcctctggttggagatcatgcacggttatcgacggttcccaactcaagataggtcttttcattggctcccgcaatcggtacttcgtgtacaaaggttccttgttgaactccgatttcttaagatacacgtctcctatggatcgtgatacctgcaaacacatagacaaccaagctttcaagatttgacaagtggccaacaataatagcttatccaactcagtgaaggaacatgacataataatattggctcagattttatagcataagaagatctctttgtagagagcggcacctgaataatgcccttaacacgccagacattgtgttttaagacgacaatatgggagtcatcagggtgttaggagtgcatttcctgcctcacagactctatgctcacattatgctcagctgagagctgaagcgcaataacctcacctgtggccttgatgacgctttcccaaaaccgcacgggagtccccaacgttagctacgtaaagcttcccatcgcaaaacacaccgaccaggcagcaagagccgaccgttgatatatgtggcttcactgcccactggcttggccaccacccctagaaacccttcttcggttgcctcataggcctttcttatcacatccacagacatggaatcctgctccgctgcgaatcctgcagacatgaatgttcagttccaatggttccctagctaaataaaattcagtggtgagtagtaacaacaagtagttactcttgagatggtgaaagagatgatcgttgacaaaacgggaggtctcagggcctccgtggccgtcatagacgccaacaaaggttccatagggcccagaagaagagagggtggtcaaaggaccggattcgacctggctctgatcctcgaggaggttgttggcatgaacagcccccatggaccaatcaccaaaaaggtggtgagaaaagtctttgaaccaaagaagaccgtattgtttgcctctctgccatc

SEQ ID NO: 37946 - DNA, 2965 bp, Arabidopsis thaliana landsberg
  unsure (1)..(2965): unsure at all n locations
aagaggtactactatttagtgttcaatgttttgtttaattcatgttctcattgacacaggcacaagtatttcgtggggggaattgcgttagctatttcagacttattaaattacataatgattagatgagatcgcgaagtattagagttcttgcgtccgaataattgatagattctataccctaaaaaaaaggtcggagatcaccctctaaattataagtataacataaatctaattgtacggacataaactcatgactcaagcaataggacaagccaaaaaaaattccaattattgtgttactctattcttctaaatttgaacactaatagactatgacatatgagtatataatgtgaagtcttaagatattttcatgtgggagatgaataggccaagttggagtctgcaaacaagaagctcttgagccacgacataagccaagttgatgaccgtaattaatgaaactaaatgtgtgtggttatatattagggacccatggccatatacacaatttttgtttctgtcgatagcatgcgtttatatatatttctaaaaaaactaacatatttactggatttgagttcgaatattgacactaatataaactacgtaccaaactacatatgtttatctatatttgattgatcgaagaattctgaactgttttagaaaatttcaatacacttaacttcatcttacaacggtaaaagaaatcaccactagacaaacaatgcctcataatgtctcgaaccctcaaactcaagagtatacattttactagattagagaatttgatatcctcaagttgccaaagaattggaagcttttgttaccaaacttagaaacagaagaagccacaaaaaaagacaaagggagttaaagattgaagtgatgcatttgtctaagtgtgaaaggtctcaagtctcaactttgaaccataataacattactcacactccctttttttttctttttttttcccaaagtaccctttttaattccctctataacccactcactccattccctctttctgtcactgattcaacacgtggccacactgatgggatccacctttcctcttacccacctcccggtttatataaacccttcacaacacttcatcgctctcaaaccaactctctcttctctcttctctcctctcttctacaagaagaaaaaaaacagagcctttacacatctcaaaatcgaacttactttaaccaccaaatactgattgaacacacttgaaaaatggcttctttcacggcaacggctgcggtttctgggagatggcttggtggcaatcatactcagccgccattatcgtcttctcaaagctccgacttgagttattgtagctccttacctatggccagtcgtgtcacacgtaagctcaatgtttcatctgcgcttcacactcctccagctcttcatttccctaagcaatcatcaaactctcccgccattgttgttaagcccaaagccaaagaatccaacactaaacagatgaatttgttccagagagcggcggcggcagcgttggacgcggcggagggtttccttgtcagccacgagaagctacacccgcttcctaaaacggctgatcctagtgttcagatcgccggaaattttgctccggtgaatgaacagcccgtccggcgtaatcttccggtggtcggaaaaattcccgattccatcaaaggagtgtatgtgcgcaacggagctaacccacttcacgagccggtgacaggtcaccacttcttcgacggagacggtatggttcacgccgtcaaattcgaacacggttcagctacgtacgcttgccggtttactcagactaaccggtttgttcaggaacgtcaattgggtcgaccggttttccccaaagccatcggtgagcttcacggccacaccggtattgcccgactcatgctattctacgccagagctgcagccggtatagtcgacccggcacacggaaccggtgtagctaacgccggttnnnnnnnnnnnnnnnnnnnnnnnttggctatgtcggaggatgatttaccttaccaagttcagatcactcccaatggagatttaaaaaccgttggtcggttcgattttgatggacaattagaatccacaatgattgcccacccgaaagtcgacccggaatccggtgaactcttcgctttaagctacgacgtcgtttcaaagccttacctaaaatacttccgattctcaccggacggaactaaatcaccggacgtcgagattcagcttgatcagccaacgatgatgcacgatttcgcgattacagagaacttcgtcgtcgtacctgaccagcaagtcgttttcaagctgccggagatgatccgcggtgggtctccggtggtttacgacaagaacaaggtcgcaagattcgggattttagacaaatacgccgaagattcatcgaacattaagtggattgatgctccagattgcttctgcttccatctctggaacgcttgggaagagccagaaacagatgaagtcgtcgtgatagggtcctgtatgactccaccagactcaattttcaacgagtctgacgagaatctcaagagtgtcctgtctgaaatccgcctgaatctcaaaaccggtgaatcaactcgccgtccgatcatctccaacgaagatcaacaagtcaacctcgaagcagggatggtcaacagaaacatgctcggccgtaaaaccaaattcgcttacttggctttagccgagccgtggcctaaagtctcaggattcgctaaagttgatctcactactggagaagttaagaaacatctttacggcgataaccgttacggaggagagcctctgtttctccccggagaaggaggagaggaagacgaaggatacatcctctgtttcgttcacgacgagaagacatggaaatcggagttacagatagttaacgccgttagcttagagg

SEQ ID NO: 37947 - DNA, 1550 bp, Arabidopsis thaliana landsberg
  unsure (1)..(1550): unsure at all n locations
actaaatctaggacgagtgaaagtgccgtcaaggaacatatcggccataaccttatacatagcctcggtcaagtggactccgtcccaattgatgtattgattcgggtccttacacactgtagctgcatccgtcccacacgtttggaacacttggaagttgtacggctctccaattccacaacacgccttgaacttctcggtgataccgtacttgctagggtgtttaatcaccgcacggtacgcgttccagtaatctgcgtagactattgtggcactcggatacttgatcctgcatttattaaatatgtttaaaatatatagtctactactatataacatcaaattattagttatctttacacaactgacctaagttgtttaagtttggattgaagggcaagattgtgagtgtaactttggttattggcactctgcacacatcctagactgtcccgatcatcttctgcggccaacgacattgctaacgttaagcatccagttgctggatgtccttgcaccaacatatatttcacacctttgttcaacaatgtctgcagttatgatttaagaaaaatgttattaactaaacatactacaatgaattcaacacaaaccggtcagttagatccatgaccaccagaattatttctgccatgatccggttaacttctaagccagactggtttatcatcaaatgcctattttgttattgtaacgaaaacaaaaaaacataatttgtcaagattgaacacatttttgtaatgaaaaataaaacatttggttagagagccaaaaacacaaagagaaaaagaaacatgtcaatcttgatttggttgttagtaatattttgtagatctaaaatcataatatttcatatatgttaattatgcgcttaatttataattaattacctccaaaaaccttgtaaaagttgagatactaagttctctaatggtgtcacttgacacagtagatccaagggtatacgcataatcattcactccaatttctccaatccaaaagagagaatctttaaacaacgaaaccttctgattcgttccaagtgtctctaaatacttctcgaaccaagcaagctctgtttctatagactgaggagtcatatcaagcgacagattgttcttgacgaaaaacgcgtgtttaatcaccgttgatccagagacagcgaaattaacgccgtgagtatccgttgctgtgccgttagcgttagtggttttgaggctgagatacggtggcagaaacggtaaattcattgactctgccacgaagtcgatggtgagacgaccgtcggagtaacggtttgttggtcttcggaagaaagtcatgccgtatggaggacttgacaagtgtccgaatccggctggtccttcgccggagcgtgagtttccggtgtcggtgaaagaatctccgaaggcgtagattttgttgaatggacggtggatgtttggaattgtcgccgctgtggagatggtggagaagaagaagattgcgactganatggcggttgtgaggaggggagagatagaggaaga

SEQ ID NO: 37948 - DNA, 5135 bp, Arabidopsis thaliana landsberg
ggcttacataagagcatattttatgatcttaggggtaaccatgttctctttggtgttccgtctgttggttcatctggggatttcttctcaaagtatagcatcaatggacagatgggaaggaaaggaaatgttaacaccataactgttgaggttggttatgctctcccagcctggtctatagttagttctcttgattattttggttgtgatgaaaagttatatgttacagtgtgctaacggttctgcgttttgttatacagactatcgaacgtaaacatttgtttgtcggaattgactccacaatgcatattggattacgcggcccaacaaatctctttgggcatccaactgatgaacttttgagctcactcgactcacacctctcgcaatggataaccaatcagcaaaacctgttgcaaaaatatcatttgggcatttcccattgtcattcacagcgctgtcacattctcaaaagagccttaaagatgtttttctgaagcactctatctcagcttatttgtgtggccatctacactcaaggttcggcaagaatcttaaaagacatcatcactctggtggtatcagtttatcagataatgacttgtttcagctgaatatgaggcagagtggtgctgaaagtacttcgaactgctcttttggagccttaccagctgcagagttctgggaatgggagatgggtgactggagaaaaaacagggcaatgcggatcatggccattgataggggtcatgtttcatatgttgatcttgacttcaagtcaaaaccccagaagactatcatattaccgacctttccattagattcacgttttatgtcaacatcctttgcacgtcacaaatacgagtgccaacatatgatctcatcatcgtatgacgcaataagagccattgttttttctcattctctggttgtggaagttgtagctagagtttatgactcaagccctggatttgataatctggtcatggaagctccaatgagaaaacatggaggcgattcttcttcttccggggcaacattcttttcacttccatggaattatagggcctttgaagatcccttacctgatagattttggctgcaaatagaagtcactgatatcaaaggcagattaaccttatcagaaatgcgaccattttccatcaatggtctaagctctaaagtttcatggacatggaatgagttccgtgtcatgggctgccagtgggcggcattatattacccgattctttggcctgctctatatagtttgtttctcgtttttcttatccccaaatgcatcatcatcgttttcaagaagcagtacactctcaagaagttcattgccaagaaaggacctatcacacttgtactgtggattctccaagacctctgcagaatgcctgtggtttggttcggttacatggcatacttgttctatctcatattctttccttgagttctccggtgaagtgtttactgattctggagacagagcatacatgactattatgggatgggtggtgacgagctcaggcgcagataggaaacatgaatacattggacaacctgatgtaatggttgtggtgatcccacatgtggtctttgttgttatccccagtgtcttggttgtgtgttgtctggttgctgagagagaaatctacaaagatcacattcgaactgtctctggtaagaaagaggatgaccatgaccggggaaggaagaagagatcacaacgccgctcactgttattctcgaacagaagactgtttcggaaatcggtcttgctggcttcattagctctatattggaagcatttcaaggtaccacttgtatattaactaatgattcgtttatttccatcttgcattggcaaaaacctgcgatcatgttcatccgttgtctgttttcattctgcattcacttctgaagtatattttgtttttattgacagaattgctgggcattaggtagagcttatgagatgaatgtggttcattttccaggttacagccttgtagttccattgttgctactatatgttatctgcaaaacccataaagttccatgagatttgaatctatggaagttttggtgtttttatgattttgattatgaagaaacacatttatagggggttttcttatgtgttgtttgatagagttgatatactatatagatcaagaaagttagaccaaattattctgtatccttttgcttttatttttttttacagctagaccaaaaaagtacaagtggttttgctcaatttggaaaaaaaaaacattaaaaatattaaaaaacaaaaatgaataatgacgtcagcgaaagcttctgtcatagtctcacagtcgcaacaaaacagtcaatcccccaaagaattatggtagcagtcaataatcccataaataatcttcttcaacagtttttttctcttaaatttttgtttcgaaaaccgctcactacttcttaattgaaatgactgactgagagctttagcttttgatcgttcgtcttcgtgattcctttcttcttcttctctccgctactgtctgtacctgaaactactgtcctcgatcgctgctttgtctttcgaggttctctaatctgttttttcttattattatctctggggtttgcttttgcgttaatcctctttctgctcgacttacggcgatttttgatatttgcagattaaaaagttaggtttttttcgtaaatctactgtatatgttttagatgaccatggatgctgatgcgatggaaactgagaccactgatcaagtctctgcttctcctctacattttgccagaaggtttgcttatcttctgatatctctcttctaagctctgtttagaagaacccatgattgtgtaagtcttacatcttgtatattttgatgctctgttaccagttatcaggtagaggcacttgagaaagctatcaagcagaacactattgtcttcttggagactggttctggcaagacccttattgctattatgcttcttcgtagctatgcctaccttttccgcaagccttcaccatgcttctgtgtcttcttggttcctcaagtggttcttgtcactcaggtattggtgttaggattggagttgtggacaaagggattcaccaatatacggacttgtcctttgttctacaatttctgcattattacacgtgctccttttccaaatttagaaactttagtgttactttctccattatttctgcatttttccttgtgtgttttacgcagcaagcagaagccctgaagatgcatactgatctaaaagttggtatgtattggggagacatgggggtggacttttgggattcttcaacatggaaacaagaagttgataaatatgaggtctccttttcttattttgaccaattagacatacatatatttttctggtgaaagtgttatgaggatgcgtttcattattactcttttagctcaccattcataagtcttattttcataaaatcttgcttagctgcatcacagtctcttatgatttgtcaccatattgaacttgtttttcctactatctgacgctaatttccactgaaaggcactattactgtttcctgtccactctcgatgcacattcttataggcccgttctcctttggtttcataagtgcaggttctggtgatgacccctgccattttgctcgacgcgttgaggcatagttttctgagcttgagcatgatcaaggttctaatagttgatgagtgtcatcatgcagggggaaagcacccttatgcttgtatcatgagggtgagcatgaaaagatattcctagctttcgaactcagacctgaatgaaatctcattgaaacataggaaatttttttttatttaaaagaactagtttataatgtagttttccaccttttgacaacatagctccttttcatgcaggagttctatcataaggagttaaattctggaacttccaatgttccacggatatttgggatgactgcttcacttgtgaaaacaaagggtatatatgcatctaacattctttcttgattgcatttatacattatattttgtatttgctatttcaagtttggtttttcttctttgtctttcttctctcaactaaggtgaaaatctggatagctactggaaaaaaattcatgaactcgaaactctaatgaattcaaaggttgtttcttttctttatcttgaattttttgtattgtccatcctgttttgtatgatataatgaaattttttttgttctaatatgtgaaaggtgccgttaaaatcagaaacatttacttaaggttgatatttttgtttgatgtagtgaaactagtgattgcaaaatgatttttccgtttatatttcgatactatagtgaacatacatcattggtcattatttcttcgtagtatgaccacatctgatgcagaagcataatattttcttagttgctattttgaactgtacgaagactgttgatgcttgacctgtctcagtacttagaactaaaccatattttcattttcaaaaggtagaaatattataggctggttttattttgcttactccatcataataataatttgtttgattaataaaggtctatacctgtgagaatgagtctgtgctggctgggtttgtccccttttctacaccaagcttcaagtattaccagcacataaaaataccaagtcccaaacgagcaagcttggtagagaagctagaaagactaacgataaaggtacgtgaactaagaataaatgtttatatgcgagtggcgtcttttttgggttttgaaagttttttgaaatttaagaatgtagctcatatttatgatcattctttaattatgaaatgttaactgatagtagacttatttttcagcatcgcttatcccttggaaccttggatctcaactcctctactgttgattctgtagagaagagactgttgaggataagttcaactctaacatattgtttggatgatctcggaattttgctggcccagaaggtatttttgttcttggtactgctgttatcccccacataggaaagtaagaagtgttgtaataattgttttttctacaacaggctgctcagtcattgtcagccagtcaggagactt

SEQ ID NO: 37949 - DNA, 5818 bp, Arabidopsis thaliana landsberg
ctaagaacgaatccggaagtgttacttgcgacgtctgtagactttccgttcgagttctcaaaacacatcagttaccaaaggcagctcatccgcgaatatcgttccttacgaacacgacgtaaggcttttcaacccataccatgtccgtaagttgtgttagtccatacaagtctaatatcagaagtaaacaaggcttttaaagaaaatcttctttattcaataaaaaataaaacacttacaatggattgggtacccgagcctaagagcatgtatgggggatactcatatagtatcataagtattttttagtattatttataatatttgtttattatcagagattttttatgatactcctactaaatatgtttgataagtgtgtattttacatgttttgagcatccatttgtcatcactttaacatcatagcatcactgttttatacaatctcatcatttgtcatcactttacatgtttaggatagatttgtatgcatgttgcatatttgcgttgatttcaggtgatttggagttgttgacgagctatctggaagaagcagacgtggtgatgtcaaaccactcgaccaagaggtcgagtaggagcttcaaaatctcaagagaccactcgacaacgaggtcgagtagagcacatcaccacttcacctcaccactcgaccccgtggtcgagtgccatcatctccatcaccagacggtcactcgatcacgtcactcgacctctaggtcgagtgccttcacctccatcatcagacaaccactcgacctcctcactccacccagaggtcgagtatctccatcacaccactcgactgcatactcgatgacaagcttcagagccttcttcattccgcactcaatcagacactcgagcacaaggaagaaaagaagactccagctatacactcgagctctcactcgaccacgtgggtcgagtacagttcttaatccgtcccaatacttcgtcgttttgagtattagggtttcgggatatttggctataagtagcatgtacttctcattttcgagaggggagtttctaaaaaacctagttttatttccgcagccttgtgttctagactttttgtaatccggatttctctttatcaattcagtattcagcttctgttcttgattttcgtttattgttgttcattctattatcatactattgttacactgctgttatcatgtcttcaacctgttcaacgtttatgctttctgttatgatgtctgagtagtgaataggtttctgaggatgggttagagtagtgtagaattctcagtatgctaggtgattgagtattgattgatagatcccttctggattagttgttcttaatgcctattgctttctgatcaactggaatttgagcccagacatttccgcgcccaaaaggtgttcgatgaaatgtatgaaccactaattccagagattcgtgaccctgtaccaaggtattggttgcagggagcgttttggctttaacttgttgattcgtaatgcctgttaggttagctctcgtcaatggtgattgagtctgggactaggttagcttgagagtctctgttgcggtggcacttagatttggttaatgaacttgttgtctagggttaatttattgagcatgtcaatcacctgtaaactgaggaaacgaaactactcaattatcccatccttaggaattctttatctgattgattttattgtttactctactactgtttactgcatcctgtcatctgttgtttagtttctgcaattctttactgttactcgacctgatactcgaccacccagttgtctggcaacagactgtgcagtcgagtatccctgtttcattttctgtctgttactcgacctgtcactcgacctcacccagtgctctgcaaagagctgtgttggtcgagtgttttactgtttctgtttgattttctgttttctgcatgttcacttaggactgctggaacacaccaaaacctgttattgcttggcttgacttagtgacttctgatcacatcttgattgttagcatcacacccatttggattgacaacctaaaatactacaatgatatgattggtgttttaggataattgactaaaaacctattatcagttggtacaccttctgctttaatagaggacactatgtcttcgaagacttacaaatgatctaatggtgattcatcgggagctccttgatatagctcaaattatccttaagcttactccctcaaataagagatcgtcgttagtacttaagggtcgaatttcactgagctctcgatgttcacacaatagacttatgatgattaatattaagctagacaaagtagatgaatgtaaaagacagtaaagcaataaaatgagtagtagattcaagtggttaaagcgtcgggtcttaggaattgtctggagagatagataaattgtagatctagctaatattaggattgttattgcaccgttctcgaactcaaactatgattttagagtgactggtggtgttccgcaaaactctctatacttagagctaagataacctgagaagccgagaaatcctatactaaagcatgcattattatcaagtttgattagttcacctagtatctaaaccagagcccttctatgagcctacctgttctttcttaaatgcctaggctcatctatgatagttcaaataacaagtgcctatggtgggcatacctattatctaatatcaagttctaggtgatcaatctagaactagcaataagaataatcaaaatgaagaactctaagaataatcctaaggggttttcgatctaccaattcatctaaatccctattgagactccctaaacccaacaaggtgattactcagacatgataacagaaacacaaatcataatcttaatagtttgcattgatggattagaaatagagtaaaaggagtccagaatcctctctacaagaattggattcttctctccaaaatgtatctcaatctctaaaaaaataaaacttaggtctaacaatgaccaaaatattagagactactttgcaaataaggaaaacttcagggcttttcaaagacttggcagaaaacaggaattctctcaatcgaaataagggtgtcgatcgacaccatcttctgaaaaaagtctttgataatcttcattgctgaaaagctttcaaaatttcttactatgctccatagctcccagatgtgtagtgtacctaaaatgactcaaaacatacgaaaaagactagaaagactctaaaaaccattctgaaactatgttagaaatcaataaaaaaaccaggacatatcaacttccccagagtaagcctttgcttgccctcaagtgataacactgtattttactcatttttggtgtgtgtttatcatcatttagctttgcatttgctcattgtatcatatcattttgcaccattttagcttattttgcacacttaggcatttaggatcatcttgcatacatattgcatgttttggtgtgttttcaggtgcagaaggagcttaaaagcattctactcaatccattcactcgatccaggcagccatagaggaggcagcaattcactcgaccctcttactcgatcaaggcaacctcagaagaagcagcagatcaatctactcgccccttctactcgatcctctactcgatccatttactcgaccaagggtgaccaactctacaagacgtgttgagctatcaaagcgtcttcggatcttcctcattccccactcaaccagacatctgagcatacagataggagaggatgaagcatctactcgacaaattgatcactcggagtatagacacaaagacgtagactttgcaacaccctctttactcgatccccaagatggagtattcgcccaagccgcctcaagtctcttgtcttctagtgaatctagggtttccaacattttagtataaatagatcactttgggatttgtccaaaggatgtatgctttatctttcagtttttctttgtgtttatgaatcttaaaactttaattactcttaatctatttcgtttttgcatttgattttttaagtaaagttgtttagcttgtttagatgtacattttggtatgatttcaataatttctgggtttgtgttcttgagaatgttgcatgagtagtgattagggttcttgtggatggattagattagggtaatctcaaggttagttagggggttagtgtttaggtttatacccttctggattcgcttggcccctatgcggtttacgccggctaatgtggagattcgatcatagacgtccagcatccaaaagacgttcaaatggatgtctgacctacgaaatccagagatttgtagactcgaccaagggattggcttgtctgcctattggctttggtagattgtttcttaaacccttctttgcaatgtttcatcaacgagagttgagattaggaagtggtagagttatgggggtctctgtcacggtagtggattgacccggttttagaatctatcgtcatgggtatctatctttcgcctattagccatttgatgaaccctagagttgcccttatcaatggatccatccttagaacttctattagatttttttgtatcccctgatgattgcacttttatttacctgttatttgtatcccctatttgtatcccctgttgattacatttaagtttcttaattttgtcactagttggttctactcgacccattgattgagtaaggctctaaagttctcatttttacttgtttgaatcctgacttaggattattactagaaacccaccatcattataatctggcttgacttagtagtttatgtacacatcttgattgctagcaatacagtggactggattgacaccccctatagctgcatcgacatgtttgtgttttaggggaattgaatgaatctcacacacattcaacataagtaggcctgaaaaacctgcttatcagcagctagtcggtcgttataaaggatgcctcctcatagcatgtgcacaagacgggaacttccaaatctttccattagcttttggggttgttgacggcgggaccgatgcttcatggatttggttctttgagaacttatcagagattgttccagatactgacgatttgatgattgtctcagacatgcatttttaacatatataaaggcgtcagtgtggtgtacccgaaaacccatcatggagcatgtatagtacacgtggagcgaaacatatcggtgttttacgcaaggtacggtgtgtaaagtttattctttcgcgccgctaaagcatatcggattagagattttgaaaactactttgaagagttaagaggtcggagtcccggatgcgcaaagtatttagaggatgttggatttgagcattggacaagggcatattgcaaaggggagcggtacaataacatgactagcaacaactccgaggcaatgaacaatgtcttaaggaaggcaaaagcttatccaattgtctatatgctacagttcatccgagaggtcatcatgcgaaggtttgcagcaaggcggaaaaaagtgttgaagtgtaactctttggtgaccccggaggtagatgaacgtttcctccaagacttgcctacgttaggaaagttcgcagtcatgatgtctgggccatggagttatcaagttacttcaaagagcgttgagcattttcacgttgtactagatgagtgtacgtgtatttgtcttaggtacacgatgttaagaattccatgcgagcatgctctagctgccgcaatacattttggcacaacccgaag

SEQ ID NO: 37950 - DNA, 7364 bp, Arabidopsis thaliana landsberg
  unsure (1)..(7364): unsure at all n locations
caaggaaagataaatttaggtttatagccttggttgtgcttttagccctaaaactcaattatccacctatcatcttgtgatatttgattccaaaacgcttacaaatattgggcttactttaatttttaaagtatatttgctcctcaacactaaacctaaaaccttaaaacccaagttggaaatggattactagagttccaatatgtaacatgtatgctaatttcgaaataaacatcattatagataagaataacaataaataaatgcaaataatatatagataaattatttaggcatacataatctttcacccacacatgatattcctcgccttttttcacgaagagttctttttcgttcaatcctggatatttaatagaaagaaaatcttcgaacatactacaaagacaaaaacaacatataagggttagttaacaaacatttataattaacttaaaatgggagtatgacctttgttatatacctctcaattacttgaaaataatcacaattccgtataacatnnnnnnnnnnnnnnnnnnagtcttcctctgatagccacttcacgtatttctccacttggacgaccaacagaactaaatatattaggtactccaggaacatgatatacaggaacttcaccctcattgaatcttgttaacctgatccaaaagaggtaattcatggttatttttgcgcatagaaaacttgcttggtgcagatgtttaattaattactattagttacgtaccttgattttgtttgtatatgatcggcaaagtagtgctctgaaaaataagcaatctcgtcattgatatatgactcaacaattgagcctgcagcatatcttttgttctttgcttttcctttcaattttttgaaaaacctctcaaatggatacatccacctatattggacagggccacccaattcagcttcgtatgggagatggataggtagatgttccataacatcgaaaaatgatggtggaaagatcttttccaagttacagatgattaaaactatgttctgtttgagaatttgaacgcgacttgtctgtaaagttctcgaacataggtcccggaaaaatgctccaattcctaaaatatatgtggaagttaaataattacattaaaaaaattcttccataaaaaatagttagaattgtacctgataatgcaaggtggacattccggtcaagaagttcagcaaagataaatggaagtagtcgctccataaaaacatgacaatcatgactcttcatgcctgaaaacttaccattctccaaatctacacaactagccaaatctgaagaataaccatctggaaatttaacatcatgtttcacacattgaaataaactctgtttggcttcttctgtcaatttatacggtggaaaaggagctttacccgtactatcaatatgtaagcctggccgagaacaatatttctcaatatccaatcttgacatgatattgtcttttgatttacccttaacacccaagagagtgttcatgatgttgtcaagaaaatttttctctgtatgcataacatcaatattatgtcgaagattgaggtccttccagtaagacaactcccacaatatgctttctttgtgccaattatgttccttcccatagcctcgcatcttcttttcatgaccgttcccaccaacatccttcgttttgggtggatttacactagccaaccgctcgtaataaacttgctcccctgtcaaagattcgggtggatactcgctagaagcgtctcttcctttgagaaagtcttttttgttcctacgagatggatgaccatgaggaagaaatctacggtgacaatcaaaccaacatgtcttccgtccattgggtagataaaaagactttgtactttccatgcaaactagacaagacaatttaccatgagtagtccatcctgataacatgctatacgcgggaaagtcgctaatcgtccagagtagtacttcttttagattaaaattctgactcaatgaaacatcgtacgcatcgactccagtacaccacaactcttttagctcctcaataagaggttggaggaagacatcaagactagctcgaggatgatttggtccagaattcagaatggtaagaaataagtactctatattcatgcacaaacgagggggtaaattatatggagttaggatcacaggccacaacgaatgattacgagacatgccaaatggattgaacccatcagtacacaacccgagataaacgttacggggttcttcagcaaaccggggatgtaactcttggaaatatctccactctgccgcatctgaaggatgattcatttctccctcctttgattggtgctcagcatgccatcgcatagccgcagctgtcttatggctctgatacagtctcttcaaccggtctgcaataggtagataccacatacgactatatggtactttggttcttcgacggtcgtccttaggcttccatctttgtgcgccacaaaatcgacattgatcttctttttcgtcttctttccaaaataacatacaattgtttttgcaaacatcaatcgtatgatatggaagtcctaaattgcgcatcaacttctcggtctggtaatgtgaagtggtagcctggtttccttctggtaaaaaatctgtaaacatctcgcaaacggagtccaccaacttttcactcatattatactccgctttgttgtgcatgagtcgagatgctaatgataactgcgactgcccttcacgacaaccatcgtacaatggattatttgcactttctaacaagtcgtagaacttatttgaatggttacgtaccggctcttccacattctgataactaccatcatgatgatagttatcatcatgacccacgttatcatcataccccacgttaaaattaaatgcatcgttcaccatatccacatatggatcttctacaacattacccacttcttcatgattctcactaaaatacgtcatatccgtgtaactagttccgatatccatattcaattcttctccatgcttataccaaacataataatcaggcataaatccttgactaaacaaatgactactaactcttctacccgagatgatgtgtttttcattcttgcatacactacaaggacaatgaaatttacctcgacaactctgtactataggctgactattagcgaatgtcatgaattcctcaactcctgcgacgtattcggctgacaaattccccgtcacttcatcgaatctcttgtacatccaatctcgatagaaaccgccactaccgccataattgtagtttcccgccattatagaataaactaaatttctattgttttctttttttttcttttgattgttgttttgatttgtttgcgaaagaagagtgtcgtgaattttgattatatagacgaatttttatgactaatttacgactacaacaaacaaattaggtttacctacttggcaatgcggaaaacgttttccaacaacttaatgcgactattctgcgactcagttgcgactattttacgattacagatatgtgtcgtatgttagtcgccgattgggcgactaacacacgcagtcggaaactgtagtcgtccatttgcgactatgtaacgacaaacgtttttcttctataatataatcgttaaattgtcgttactatacgagtatatgccgactaacatatttagtcgtaaaataacgactaattgactactaatgttcatgttgtcgtatatgcgtcgtaaaacggtcgtgacgtagtcgccaaaaacgacgactacatctgttgtcgctttctgtagtcgttgtttgtctgttttcttgtagtggtagtagtaagataaacaaaaaataaaaagaagtttaaacgatggtccacactccacataccacataccacattctttactaatgcattttgtgcgacgcatcacatgattcacatagtgtttttgtttgtctccagaatgaacaactgaaaaaggtgtataatacatatgtataattgtcccaaaatataataatatgtctaaaaatagtatccaccaatcaccatgttagaatcaacggcttctgcgttgaccattatatttaaatatgtcaacctgtaaatacaagacaagaagcgtctgtagtccaacggttaggataattgccttccaagcaatagacccgggttcgactcccggcagacgcaattatattttttaacattcttttctgaaaatttgaaaagacaacattttgcatacaccaaacatatgtacatatgttgtgttcttgttggactcgatggtttatcaaccccaggtccaataggacaacacgaaattatcatacaaaccacaatgattgattgtccccaaacccttatttctgttaccaactccaccatattgtcacaacttttcccctgttatcaaaacttccaaatcaatgttctatgaattttagtttaaatttttaccaattgtttattaatttatacgaattcaatcaaatgtaaaacaccaaacagaatggatcagtaaatataaaactttgttatcttctccaaaatttacattttcatgtgtgtatagactatagtatggttacgatgaagttgatgatgttggtgaccatggtgtcatatccatggggtaacttcccagcacccttaggaacgacgtgtactcttgaacctccgcaagcgcgttctgtgcacgcggctctgccatcgatgcctcaaaatcaacgtaaaacatgtactcaaagttcttcgacgtaccaaagctcccgtcaccaacaaccctaagcgggcggttatggtgaggccgggactcgatcttggtcaggctaatgtctctgaaagcgaaagccgagaggactttaaagaggacgctagttcctttgtgctcttgcgcagcaaagacgatgctagtcttgaatggccggtccgtgcgtgggattataggctcacgcgccaacattaggaagcgagtgacgttccccgggtcgtcttgaatcccatccgctaatatctggaggttgtaaagttctgcggcgcgtgcactcgctacagccgcggtgtcatgtaggtcgttagctgagatgtactccgcagcagccgctgtgtcatggaatgcctcacgcgctgcatgtggtgtaaggacgtcaagggagtgttccgtctgcgctagggcttgcgggtgagagatcacccgcgaaatacagtcagttcgaactcccggaagtgcgaggaggcaatggtggaccggaatctgaacttctccaacgatatgaagacggtgacggaggaggagatcatagttccgatgaatcgaaccaccgagtgagttctctaccggaagcacagctcgatcagcgatccaaagctccaccgcttgaaaagcaacgtcgaactggtcacaaggaatggcgtcgcaattgggataagcttttccggcagctgcttccgagtacgcaccgggaactccttggtaagctacacgtagactagaaccatgcaacggtgccggagatagatcagtaatagtcaacggctgagcaggagctaactttccgttagttgactcaacggcgacgagaccaagattgactgatccgtttgtgtgaccattaacggcggcgattttgtcggctaaaccaccgggattttcaacagaagcaactttactagataaaatggcacatgagctttgccaatcagatcgactcacggagacaccgttagggaagctaaacgactccgacctataaccgcacgtaacagccacgcgctttggaatcgcgtgggagaaacatttgttcctagacgtcggatctgttgatcggaacttgagatcacacgacgttgcggcttgcatggtttggtaatgatggtaagacaaacaaaaattgagaataaaagctgtattatagatttatagtgttggaaagcttgagttctttcgttgagagagaagctcaagctgagagataaaggagaagagagatggtcttatatacacactaacacacaagaataaattttgttttgtttttgacaaaattagtcttgacgtatgtaattcggtaaaatccttcacctaccaccttccatgtaatttctatactttttttttttctgaaaactataataatagttgtctttattgaaatatatgatattgttggtttacgtgaaagcgatattcttcatttcttcttagttcttaccatggttttgtattgttggtgttacgtccatagatttttctacaaatatcaagatcattggtgtttcttttgagcagtggatggtaaaatttctcttaaaaagtattgaatattctattattatatatacatatgtatatatatatatatatatatagttttttaattgtttgttcttcaattaaaacttagttacctacttcaagaaaaattagatagtttatccgcactatgtgtgggataaatatattataataaattttttattatttgaaatctgaaatttgtttgtgtattatttaatgtaatattttctttttgaaccatctagtttttgcattaaaattattattgcccgtatattgattgttattaaatatgtataaatatattagttattatttttataattttcttattaaattaaattaaaattatatttttagaatcttctgaatatttataatttaattaagtgtaattgatattatttttggaaaaaactttatttataaatgtattggtaatatctgattagaaaaatgaaagtagtactatattaatatttttgttaacatatgatttatgtttctatataaaaacgaaagtagttctatattaagttctgaaagattacttgcttaattattaggttgttttaattaaatttagtttttaattatttattacttttaattggaatttgttgatatttttatgttgttgagatatttatatataatactaatgacaaatttttgtaaataatctaataaatggtggacaattaatcaagtttgttgagaattgttctggttgcgacacgtcatgacatctctataaataacacagtagctaaaggttattctcttaagtgtatttctctattaagatatataggggatttctctattaattctagtttataattttagaagtttatttgattagttaaaatttaaaataatttagctagattcaattgttactatttgaatattaaattatatagctagattccacaaaaaaatcacatataacattagttagattcagaaatttagctaggttcctcaatcctgacttaccatttgaaacttgaatgtgtctctatatc

SEQ ID NO: 37951 - DNA, 2402 bp, Arabidopsis thaliana landsberg
cccttgtgcactacagtgccatagttttcgtcgtgtgtgttaagatctagagctgttcttgtgtgtgtttcaagcttgcaatcttcattattctcgttgaatctttcttctgtatactcactgttgttgctactccttcctctgtgttcatgtaatcccactcctattgacaatcttccaggacttcttcttgaagacgagattctcggttctgcgttgttaaccattgttgaaagatatggcctgttgtgattctctctaaggctttcttcttctgcccatgtgagctccattctatggaagaatggttcttccattatctctttctgctctgaagttgaatctccaatatatgttcttaatcccagtctgttgtcaagcatctttggggctttctgagttccttcacttgaggttaggcaactgtccagggaggagttaggtggatacgttttttgcatctgttgatggtgtagattctgcagttctttcggttcgaggaaactagagtctggatagtctgctgatactttagatactaattctgagagttgagcttttgttgcttcaatcccagctgcacctaggttctgtcttccaagagtctcttgtgctttctccagaatcgattgcaggtactttccttgagcctctatcctgagctgcaaatgtcgctgtacctggctcagttttaaaatatttttaatgaaatcgtaactaaatgctctgttctctgtttctatatagttcttctcgcctctattgatactctatacttatgattttcactgatctatgtgtttctacaattttgagtatagttctgtaaattgttcctatttttttccatgagaattaatgaaaccagactcatcttgattggtcttgttagaacaaatataggaaccgaaaattccaacactgatagctgctttgaacatggtgaatgcacagagtacagtatatgatagatacctcaagttgctcgtgtagccgtctctggacctctatttgcatttgaagggcatcacttatgggtaagttcctgcgtgcacaaatataggtcatttttgttaatctactaaggtagaatatgtaagcaaatgggcatatccttacatgctcggctgtggtccaatgcttaaactctcactgtgactttcgtctacttcaggggggttttcttctaccatggtcatcacacctaaaccaggttgcttttagtttacttgaaggaaaatagtatgaaaaaagaatgaatctttagattaaaatatttttgtatctgagtaatgaataactaagcttacttgtcttgtttaaactgctgttagcttgtccattaagattcttgcttagcctatatttctggtagtcaaatcatgatattaataatctttgtaaaagcaaaaaacagatattacagatttttcatatcttgacatatcgtcatttttgtgctactttaatagttttctaccaatcgaattgatgaacgagtcatgtaagtttagggccttgggcatatgactgtataaagtgttgatggattacctgaagatgactcttgagatggtataaggtaaggcctggaatgcccatgactttcatgattgtcttaggagtagcctctgcgcagacaaaagtatacacattaatacattatgtccaaaaagcctgattgtaaaagatggttcatttgcttataagataacttactatctcctcctccaagctggttgaccgcttcaacaaatctctcgtgaagatctggagtccattttagtcgtggctttgcatcagtggagagaatgagtccagaatctcctgtgccatttcctctgaggaacggatgcctttcagaagaaatgggcattctcgatgaagagaggatgctctttccttggtgctggttgtggtaatacataagtctgtcttcaaaataaaaaggtaagcttatcccacctagcaatactgcattaataatgagtgcaaagaccaaatgtttttcttttacctgacacaatctttagtttttaattgcaacctgctactctcagttcagagatacactatggtttgcaactccaccaacttgggaagatgtctttgctgctttccttatttatgctctttttctcaggccggggtctctcaagagtaaaaagtctttgcaactttgctttatatagaaagttgaatggcaaaaaggcaaattagaggatgataactaaggtatggaatatgaataactggtccaatcgttgctttgttatttgtgttcttatcgtttaaactgtaccttgtgtgcttacattattttttctagtttaaattcctctgaactacaacttttcagtgcaattaaagccttgcattagatacgagaattgatccacaat

SEQ ID NO: 37952 - DNA, 2005 bp, Arabidopsis thaliana landsberg
aggtggaaggggctaaccgaacgattagcttgtggccgattttgaacaaaggtggcagattgatcatgagagtattgattgttcctgaaagcgcctccattagacgattgagattgccaagacccgccatgcatttgggatgcatcgggcgtgtagtggcaaatagagaaatgtgatccgcggtttgagctgtgattcacattatggtagtagccattgggataattcctcgaattcatcctttaaacttcctgaaacaaagaaaaacaaaaacaaaaaatcaaagcaaagtgtcctagagttcactctaatccttggacttgtggaacaaacaatctctccccggaaaaggcgccaaaatgcttgatgcgtattttattttgcctcaagcttttacctgaaagaccacacgactactgcaagtgcacagtatatcggagtagtatttgaggatcgaatccatagggagtgtagctacaaagaagaattcaagttagtttacttggatcaagacaaacaaaagagtgggagttgttttatgcggtagaaataagtaaagaatgcaataaaagtaaaaagcaataaaaggaaactaatgaaaaggcaataaaagtagaaagcaataaagagagcggtgtaaaataagtaaaacaaaacgctaggtcatcaggggttttctccgggcgtcaaggtttaatcaataaggtatagattccaatctagatgatataacatggctaggtttgtttacttccaaattctcggacatacgaaactctatcaagaccagctaacccaaacggttagtaggtgaaagtcagctattatcactaatatcttgcggactcagttgccttatcggttagtaggtgctaacatggtttcaaaatacaagatcaaagcattaagttcaaattcgattctagtccataagttcctatcactcggcgggtgtgcaatagttatagttctttattcagttgagctagttcaagtattcaaacgagattttgccaaaaaatgaaatacctaaggtcaagtaataggtggcgttccggatatacaagcattaagatcaaacaaaaccatagaaaccgccaacctaaatcaaatctaaagtccccatgaataccctttgaaacccccctaaaacctaactagagatctactcacacatactcaaagaacacaacatcatatgaataaaaaatttcataaaagagagtatgagtatagacaagggtttagagatcttctctggaattccaaagctttataaatcttcttcctgttacaagtagagaatacagaattgaagagaaaagagagatctaaagaagaacaagaggaggacgacttttggggcggtgagagccgcaagaggcagcctttttcgtgggtgttttctagggtttcccctaaacttgtattacagggcttcattaggtcaaagggtagaaacgtctttcggttgattagtaagtgatgggccaagttcttgggcttcttgggagggcttgaagtcagcggcaagaggaagagaaggacttgttgtgcgccctagtggtcagtggaaaaatcgaggagacgcccgggttcaagtctccaaggccggtggttttagattgatcatttccaaacagcgattctaggacatgtcttcactcttcgggccataacgtctaaacggcttcttggattgctttgattcgacttcgacgttaatcttgactcctctaggtttccaatgacacccagataccctgatttcgtgatcaggaagatcttcgccggatgccaaacatctaaagcacataaactgtactaaagcggaatttgatcaacttctacttttttgcttgaaaactcaccattcttccttgatgcttaaatacttgaaatatgccttgaagtgtctatttactcttgatttctccatggaaaaactaataaaacatatgttatcaattaattgtgtgcgtagaagcattgtgcgccagacata

SEQ ID NO: 37953 - DNA, 5221 bp, Arabidopsis thaliana landsberg
tttttaggcacaacttaattccttttacaccaacctgtctataacctccatgatcataatcattacatattttctcgtaaggtttgtgtaatttaaacccaccttcgcaacaacttgatcctattgatagtttcgcacttatactggatttagggtccaacccaaaattattattctacaaaatttgaaattacttgtggagtgtatagctaataaaatatgtgtacttgtagtcgatccttcttctttaaacccaaaaatttacttcaattaaggtcttacgattcctaaccaatacgatagagcacaaaactttacgcaaacaacatcaaatcatttataacatcatacaaaaacatatgttttacgactcaccaaagatataaagcagaaacattctgtcgaagagataagtgctaacaatggctaaagtgattaaaaaaaataatagaaagaggcgccattaaaaatagtaaccaacattaactgtaattgacgactcaaaatttataatttaaactaatatgatagaattggatgcattatggtagtttttatattgaaaagatttagggttaatcgaatatattttttgttggaaaataaaaagattatcaaaattaatatagaagtttaatgtattcacatattgtttttcaaaaacttacattttttaatttttatttatagtttttcttattcatatgttgttttccaaaagtttacatttctatgttttacatatatatttttttctttcataaatatcttaatatatataatattataatttaaaaatattaatgaaagtgatggcaaaaatatcaattagtgatacgacttatcgagattggtcacttataagaatatgatagattaatcaaaattgtgagattaatatgaattatgtaatgtattataataactaaatttatatacatcttgcttcaatatattgtcatcatttctcatatttataatgttgttaaaatatcaaactcgtaaattttaccaatattattcaatgagatagttatggcgattgcctatggaaattaaaaataaaataccgataatttaaaaaccctattattaataaaattaatttcaattatttaattaaataaaataaaatttacctaattataccttttatattatttggtaacaaaatatttagaaatattttcatattttcaaatatttttttatttttatatattggttttttctattttacaaaaatttaaagaattataaaataaggataatttcttaaatgttaattagcgagatgactactgataataattttacagtaaataatgtatacttcaattgctgagttacttctattagtacacacacttgcaccatgctactacttagacctagaccttccactgcacctttgccacccacctgtggacacacactccctttaaaaccatcttggaaccctctcgaatcctctcattgtgctcaggcataaaagcctcgaatcgactgatcaatctacccccgacaggattaggtgcagtacccctagctccctggatcttctggaccatttggacagcgcgaaacaagaaactatttgaagatagaaccatctccccaccaaaagctttgaacaaacaatcatacaagctagagaatggagtatcactcaacaaacctcctccaagccatcccctcctacccgagtacaaaccacaaggaaaatcgacacaagttatactcagatttatactgatgcggcttggaaagctgaaactaaagaggcaggattcggatggataattaaaagtcaccttcatgaagccgatctctctaatcaatccttagcaagaaacatcagatcggctctcacggcagaagctctggcgatgcttctagctctccaacaagccaaagatcttggtctcacaccccgttcaattccaacaagaagttaaacctgtgtctcaatattttctttgtttttttgacacattattataaaaagattactgtgattgtcgtaaaaggctaccattaagcaacaatcttgccggacatttgaggtgtttttgccggaagtgaaaaatgataacaaaaaagacatgcatgtaaattagaagagtttcagaagatggaatcatacactctagaaccaaattcttttgtagttacataaatcgaggaggacacaatataatcccttaataaaaacaacaacaggacgatctatcaattaaagagtagcagcaaaaacatgcgttaagtcaaccatttcctcattagttgtaaacacaaggtcgaaccactcacgagtcccccagatctcctcttttttgcgtctttcaatcgtaattaccgcacaccaaatttttgtctcttgatgaagatgtttagcatacaccttctcgagccagaataccgccaattttccaccataattcacgcatttagtaggaacatactgattagtaacgataaacaatttctccaaacccttcaagctattccacaatttgttctcagagtcgtaccactcgaccatatagctccaagaacgatagagcacgttatcgatgacacattgagatgataaactaccacccctactcatcgagtattgtccttctctccatctccctttatgcagctcgtaaagtccatacgtcttcatagattccacgtagacatttccatcataccctatgctttcgcagctagtaaggtccctacaaatttcctcgccaggactcgacacaaactcccaactttcagtctttgtatcgaatacctccatccacatagttgcatttagatttttgcagcctcctgctacatatatttttccatcaagaacgcaagcagatgggctcacacgggggacacacatgccttgggcctcacgccatgtgtgagaacgacagtccatgaccatgacgttatgagatgcattgttgtttattaaaccgccaatgacatagatattagaaccaaccagtacaacatctggcaagaacttgggaatagaatcgggagataaaattgggaccataactttcgtcaagctatttggtctccggcagagagtaaacaaacgtagtgggttagaatcgttgacgattcgtaagcacacgaagagaaaactctcggtgctgcctaagaggtttcgggtttggtaaagctccgttgaagtgaggaaagaacggaatctcttggagactaaggagagaattggatagtacattcttggcacacgagctagacaacttaatactaaatcatcaggaagcatctcaataccaaacgtcatgcttcttctctcttctccgtttgacattaacaaagtcttggatcgttttggcgttgtctccatctcttataattatacctcttccttcaccacttccacgattatatgtatatgtatccactcgtcctattcctaactgattaattctattactttttgttaagtctaatctcattgggtgatacttgtttatcagcgtgtaacaaatattttggatatgtataatatcttatttgtgtttatcaaaaagtatcttatttatctcttagaagaaaaaaagatttacaaccatatccatattggtttacaatttaagagataaaacttaagtctgaatataaaagatttccgataatatctaactattcaaatataagattttctaaaattcattgtctgaaaaaattcaatgaaaaaataaaatcagttttttttttgttagaaggtttcaaattttataaataatgtcaatgggctatttctagaaatagacccatacaaatcccaaaggcccaacccacaaacatcaaaccaaaaaacaacccaaaacctagaaccggctcgggttcactaaccaaactaaaccggccaagagatgaaaccctaatctctgttcaaaaaacatgaacaaaataaaatcagtttattcgtctagttctcttgattcgtctagttttcttgattcgtctacttctcttgttggtaagagtaagagagtcttgcaaagcttgaaatcgaagaaagagttgattatattcttcaacggttccagtttcatctgctagcacttttccacaccaatcacacgacctgcgaattattttaatatccaagttataaacacaaaagttaaacattagaaagattaatggaaaaaagaatttggtaagagaacatacttgacagaaccagcgttcccttcacggcggatcggagttttaacgcagcagtgaccacaccacatcgtttcttcacctgtcgtcgttgcttcttccatcttggttcaacacacaaaacacttaattagataactcaatttatatagagaggccaaatctatctgatttactttttaggttttggaaagttgttttgattaaataaaaggaaatttttattggtagattactagattttttttttttttttttcctctatgattttattggtttttttaagtggattttatataggttttatgtcttggagagcaaggaattttatttgttaattccacggacacgatttgactttaactaatggtcgtatatttggaaatttccttttttctttctccctctgatttagtctgagtcaaaaattttatataaaaattagagataaaaaaggagattttaggtagctttgggtccaagtaatatatagtagtcatcaatacatatttatacacttcaactttgtaatatatagtactaaataattgcaataatggtagaacctaattgagatattttatttattaaaataaatctaaacatatgaaggaaactataagttatgaaatatcgtattttaaaattaaataaaaaattaaagtaaattttaaatcctttcactttcctactagatttcttacaaattttcctacgaatattttttgtagaaaatttcaaccaaatttcctaccaaaattgatttcttacggaacatttgtggtaggaaaatggtagaaaacgtctgtttctgaccatttttttacgtttttagccgtagaaaaacgtgatatttcttgaaggaagaaaaaatactgtgatacaaaaatattagaaaaatgtcattagtgagacaggacaaaaaagtgccatcttactcaaagaaataaaatagattctattctcgtttattggcacaggagaattttgcaagaatatgagcataatgcgattatgt

SEQ ID NO: 37954 - DNA, 2483 bp, Arabidopsis thaliana landsberg
attattgtcgattcttgttgtgttttacattttttttgtaatgtgaagctcatacgtctgttatattttgtttgtgattgattacttcactagagagacgagagtggtaccaagttgtcggcgatgtggctattaccgtacatgatattaggaggcattgcggaagcacttaatacaatagcacagaacgagttcttctactcagaacttcccaaaaccatgtcaagcgtcgccaccacactctccagtctcaacatggccgcagcaagcctcatctcctcctggatcatcaccatcgttgacgttaccacttacgggagctggatcacagataatatagacgagggacacttggactattactactggctcttggtgggattatctttgctgaatgttttgtattttgtgtggtgtaagaaatcttatggtaaatgtagtatataaatataacaagtgttgagaaaattttataattcataaaatttgattacacttcaaaaatccttttgtttttggactttaaaatttttgaggactactagtctggactaataccacaaggttgaatgaaaccaaagtattctaaagcagaaaataatttgcttttagtttattacgttctgttttaacaatatgttttagttattcctctattgaaggggaattcgtgggtgcatttcttccattattccgctcaaaaaggttttacgttagtgtgttgtgctttggtactatctttttttctttttttgggtgtgtaaattgctactaccttttgttttatacaaatgccacaatcaatgaatgaattaggaagtaaaactatatatcaattggaatgccgctgagaaagattgagacaaatggcttcattcctaacacattcacaacattgcaaaaaagaaaagaaaaaggagccttaaatgtttgaacgttaaatgttgtgttcttgacgaatctttgaaaggtttgggaagatcctaaacttcaccaaggaagctgaatgggtttacgcatactacacaaatgctgctccgttccgtacagctaactaaaccaactgatttatgaaagtcaacagtgactacacaacacgaacacatctgtcatatgtgtaataaaatagattaaaaaaaaatgctggttttatttttcagaaatctaacaattttgtttctattttggttgggaataacaattgtattttttattttattttttttgacaagagtgttacttcatatatgagccattacaaaagtttacaaagccacagtaagcaaaaagcctatcaacgggtacaggacaagattactaagacaaagcttgacaatcttttgagtatacctttgcctacttcggccagcagtcatgactcttatacttgggaagtagacaacctctcttccgacaattctcaatgaagttaacttggaactacttcaggtcccgtgaagaggaaaaaccttgggttcctacggtttggtttaagaatgctgttccaaaacatgctttcaccttttggattgctaatctctcttctttgtggattttgtaacactgatgtggaatccagagatcaccttcttcttcattgcaactttgtagaggagatttggcattctatgatgagaagactaggtcaatctccatgtatctttgccgactggtcctctcttatttcttggctgctgtcaacgactcccaatctctcttcaaacttgaagcgaattgctgtacaagcaactatctacttgttatggaaagaaaaaaacataaggtaccatgataatgtctctgttacttctgcgatggtctttacccaattggacaaaagcatcaaagacatacttctagcaagacgtttccgcctcggctgcacaagtgtactctccctatggtattcccatgcttaacaaactcaactagtttcagtttctctgtaacaattatctcaagcttttttatttggatagttttgataatattgttgcgtttcatatacaatattgagaattaagaattcactaaaaatcttaattaactatttcacagacatacaattgtaaattcttaattaaaatagttttgataaatattgtagcgattcatacgtggcatttaattattggctcgatggcaacaaagaaataaaacaaaatattcgcttgttctgcagaagaagaccttaaagcacctcgacgattatcttccacaccaaaagtctctctttcatctccagatctgctgctgaagataaattagtcagcaatcgtcatagctatggcgattagggtttttcttacccttctcctcttcttatcatctgcaatgctatctttctctctttatgaagatcaagcccggctcactggatggtacttcatcctatatcttctgtctctctggaaaaaataaaattagttgacaaaagttcgaatcttactacttttcgatttcgaagtctaactagatgtttc

SEQ ID NO: 37955 - DNA, 4150 bp, Arabidopsis thaliana landsberg
ttatcttacagtcatttgcatctcgcaatgtaacactaaagtagacatcaagaagtcggggagcaatcttaagagtctgcttcatcctctctgaccgaggaccacttgcagcagcctgcagcgctgcattcaatgtaggagaagcgcggtgtctttcctgcagcacaaatttgacaaaatactttcagtttgtctaatatatcagacagtttaaaaaactaccaactttcacataggccctaaatttttactaatagacaattattatataaaactgtttctgttgagtttttggaataaagcaaagccagaggaaggatgcataccgctagaccatcattttcgtccttcagaagctccagaaacagaggatcagctacatctattgtattgttatcttcagattcagagtcatcccctccatccccgatggttgaaccagtatatgcttcatccataagggcaagaagcatctgcattcacaggtatccttgtcattcattgactatctaagaactgtcatatggtttatgtttttatgagatataagacctccggagctgcactcttctgaattgaagcaatgctacctccaacccttgaccccgaccccgagctcctttccaccttttctaatgccacgaccaatactagcaaaaatattaacaagaagatacataattagtacacagtacactcgtaaactcaatcaggctgagagaataaagtccaagcatcaatggagaaataccaaacaagctcaaaacaatggaaaccagtcagcttacaaatacatcttagtacagttggagtcatccaagtggtctccaaattagagtacaaacaaatatatgaagtcgagtagcattttttagacaagcggactcacttggcaagtctacaatggatggaaacagaggaagaaatgacccaggtgatatcagtcctggaaatatcttcaggaaggacttctccaacctgaaattagaacaaagaaaatttatttccttgagataattgttcaaatcacttgtgcatattttcagcttacttctcccaattccaggcaatgagcttaagcaacaacgggaaaaactgcaaatacaatttcttgaattagatagagatataatatatctgttatggcttaattgttcaagcggtggaaatgtaaatggacacaaattaagaaagatgaaagcagaaggaacagctagattgcataaagctataaggacagaaagatacagttctattacatatgttgatgcacacagtaataacacaataaatagaggcactttactaattaagagagtaatcttcttgagactgaaagctaaaagaaagtttaaggatttatatggctagtcattccagttaatacctgagggagtaagtttgggaaagatgctaagagctttctttggttcacaacaaggaattcacaagttgcctctgccacagcggcatctgagaactcactacaaagaaaatcatgatcatatcagcaaaatttatctacataaacgcatagtagcacacatctcagagcacagagccacaacaagacccagtcaagacataaaaggtagtccataccggctaagacatgagcggaagaatgtcctcaaacttgggtcagaatcgtgcagaaccatatccccaaaatcaagaaaaaactgaagaatggcctaaacacacaaacacagaatccttaatacacactagaacccaaaacgtaaaaaaacaaactttcatctgaaattcttcagggagaataatgtactagcaagagaaggcctttggacgcccctgactcggactgagatagtgaagcaaccgaacgatggaagactttattgaattgtggataaattctagccacaagatcatctgatttctccattttacagaacccatgcagcttcttcacctaatccatatacattcaaacaaaacgaaagcaatgtatcacttaataccagtctcaagccaattctcaataaatggacaaaagatgcgtactgattgtagtatagatggatcagaagcaggatccgtagaatcccgcgcgctgttgcttaggattctgaggtaaaaatcccagtctccttcttgatcactcatgttctcaatcaaaaagaagatcactagaaaaaattcatatgatatgatgatggatgaagaagtttcagcttcggcgactccagagtcccggagaaagaggattggaaagaagacgacgtcgtttattcaaagatctatatccttaaactacatgccatctcttcttgtccacatgtcgtttatagtagcataagacggcacacagtttatcaagcaaaccccctagacgggctatggattggctgcggcctttttatagcttgttgcagcgatacgacatcgtttggccagtacgacttcgttcggccggtacgacttgtcttcttcacgttttctaataggattaattaactacgtgtcgcttatagtagcataagacggcacgcattttattcagcaaacctccgtatatcgcaggctctctcactctttccgtcttctgatttctccctccaaaacaaacctcggaagagaaaattggagcgaaggagcgatagatatggcgtcggcgtcctcgtctgacggagttgccggaaggattcagaacgcttctttggttcttgtctccgataacagttccacgcttgctgtgagtattttcgttcaaaccaaattcactcttttttttttttgatgtaaatataggtttctgagaagttcctgaaatctttcctccgagatgttaacagataggagcttcggcttataatgggtttgactagttagaagtgaacaagggatttctaatttgggcaaaatttatagcctagaatctgctttatctcgtatctgtttttacttttatttgcaggatatccgcaaagctgtggcaatgatgaagaacattgcagttcaattggagaaagaaaatctaacggaccaggttggttattattttgtctgatatgagaggaagcgttttcagggataaacgcgcttgtagccgttttacattttttttttttgctacaatgtagagtagtttcattcatctccttgagtttttgtattggctaatcataagtgaccttatcttaaacttgtgggaactgcctagactttcttctaatgtgattgattcttggttaattgcattgctgtaaaacttgttatcacgtatctctttcattctgacattgtattattgtctgctcttgccaacactctttccttgatgtctgtctttgtttttcttaaatgctctttatatatgctcttcatttttatattttgggttccacaggttaaggaccttgaaaattctgtggctgagttattggatttgcatagtgattgtaatcaccgttcgacagcaattcaatccgttgcaaatcggtaccaacccgtggaacaagtactcactttccctctttcatgtgttatctaatttcttattcggttgcatacttttagatgtagcaaattgatttttactctaatgactgcagttaacggactttaaaaagttgcttgatgatgaattcacaaagctcaaggctacaccttcctcagtgccacaaaatgatcatttgatgcgccagttcagggaagcagtttgggtatgtttttaacttaaagttcttggcttgtatctaataggtctatagtccgatttcctttttaagttattgtcaatgttttgctgcagaatgttcatcatgcaggtgaaccaatgcctggtgacgatgatgaggacattgttatgaccagtactcagtgccctcttctaaacatgacatgtcccttgagcgggaagcctgtcactgaattagcagatccagttcgcaggtacaatggatgtttcttgtcttttttcccttaacttggatgtcttgttttgttcggacgatttgcttgtcctctcccatgcctgatgtctatgtaggatgatcctcaaaagccatattcagtcgatactgacttctttctatacatgaccataaagctaaaatatgatttcatctttcgtgtagcagtagaactaatcaaataataatatacaattgtgcggtgaactgat

SEQ ID NO: 37956 - DNA, 4877 bp, Arabidopsis thaliana landsberg
tctcaaagctcttatttaacccgggacccactttcggagcggttttgattttaacttctattttcgatgattttctatcttgcctgtttccgaagcagaatagttcttttttccatttatgagctttgtcattttttggaaaaagaaattggaggaagtcaacccgtaattaagtaaattcccattttcccagttttggagaaaatggaaacattaatgtcttggaaaaggaaaatgagaatttccagatcgcatttaggcaaattcccaattcgatttctatatttgcccctataaatagttctctgttgatcgacaattgtttcatcggcgctttcttccttctattccgactttctcgaacgctgaggtaattgaacgagggatgtcgttctttaataaccttcgagttcttgtcaggcgagctcggaggaaagacgtgaagccgagggtttcttgtcatgcgtcgagtctaggcataaggaataccgcgagatgctaaggtactatgatgaacgaaggtctgacatcgctcgataaatggctatgctggagtcgcatcctcgccattggcttaagaatggttttcaccttctggctccgatgccggacgttcttttgtcgtattgtgaggactgtgatcgagatgctgctgccgtctcaaaggagaagaatccaacaatcagtgctgatgggaacttcattcccaggacgccttctctattctaccttgggccggctcttactgatgctgataccacggagtgtaagaacttcgtcaaccaagtaaggattgctttggtttgtgttttcgatatcgggatgtttttcaagaatttcgttgctttgattactcaggtcggatttctgcatcaggatcaatgccgcgagctgcagtactttcgaaccaagaaacgaagagtggactttcgtctcgaggagctcgaaactctgattgctaagctgaagaagaaaagaagggttgtcactcgtctggatgaggtcgaacaaacgattagggcattggagattcgttcggaggattgggagaaagctggtctgcaactagtgtggcccatgccagatcgccttcttcaggataatcgcattgtttctgacatggcgatctgacgttttatctggccgatagctctcctggatgacagaatgatagaagatgatccttagtggcttttcagatcgtttttccttttgtctttttgttttcgaataaacgcctttgtatggctgcgaccttgtcaattctctaatttattctagataaccgtctttgtaatagctcccgatcttgtttggtcgttgattaatataatacaacttttatgaattggcttgtttcccgtccgacctctgaggtcggcttttgagttctttttggagtaacgcaattttttctgtctaagttcggattagatgttaggtgcgagactgggctcggcttttgagagacaatattcagcgtgtgctggacgcgagacgtctctcggcttatgtccagcaagcctatgcatgttttaaagagggagttctgggctctgtttcaagaataagtgagacggactcaacatattatttggagggcgagatgctgggctcggcttactccccgtaaagcatctgttcggcagatcgcgaaatacagggttcggcttctatttctgtccgaaccagagcttaagtgcgagaaaactggtctcggctatccctattagaaaaattaagtttttaatagggcgtggattatttcaccactgcatccatgtgagacgcgcatcgaacacctggccagggcgccgagagttgacataacagatcttaaagcgaactccgtattgagaatgcaaactttaattttataaagtattatagctgcatccttgcgaatgactgcttacgtacccgatgaagggatcaagccattcgtagtttgtattacataaaggagatcgacagacgatctgcatacatagtatatatatatatatatatatatatttttttattttttttttgtttgagctctacttagctaactcctaccctagtagtagtaccttttgaggtgggctgcattccacagattttccacctctttcagcttcatggtcatcagcagatagactcctggatgaagtaccttggagatcaagtaaggtccttcccatcgagctccgagctttccggcgttcttctcttcggtgttactataaacttcccgaagcacgaggtcgcctacgttgaagcgacgttctcggacgtttcgattatagtatttcgccgctgcgttctggtaattctggatccggatggcggcttgatcgcgaagttcttcggcaaaatcggtgtggtcgcccaaaagctgatcgctcagttcatggtcgtttgacaacatgcatctccgtaaagtcggaactccagcttcgtttggagccattgcctcgatgccgtaagccagggagaaaggggataatgatataggtcgtcgaggcgtagttctgtacgaccagagcacgccatccagctcgtttgccctgttcccctttttaggaccaagtcttttcttaatcccagctatgatcgttttgtttgtggcttcggcttgaccattcccttgtgggtatcttggagtcgagttgctcatgcgaatgttccatttggcgaggaagtttctagtaatgagcgagacaaactgcttcccattatctgtaacgatctcataaggaagaccgtgccggcaaataatgttcttccagatgaatgcgacaacatcgtgtgacttgaccttgtggtacgcctgcgcgtcgacccatttggtgaagtaatcagtcagaactaactgaaatcttttggatccggaaggaggcatcggtcccacgatatccatggcccatcgcatgaatggatatggcgccgtgaccgaacgcagtatctcgggagggacgttcttcatcgggccgtgcctctgacacggctcgcacttcgccgcgtagacctcgcaatccgccagcatagtgggccagtaatgaccatctttttttattttaaggcagagagctcgcccgccaaaatgattaccaccgtctccgtgatgcgtctccttcatgagtgtcagggcttctttttgatccacgcaagtgaggaaagcttttgtcgcacttggtctgtaaagttcgccatctagcatcatgtagttcgccgctttggtttttagtcggcgagcttcctatcgatctgttggaactatgccgtcggcaatgtacattttgatggggagtcgccaatcggatggttccggatcctcttctatacccggcgcgttgattgcgttgtcgtctatgtccatggccgttacggggtctacgatcacgtacgtcgaatttggtggctcgatgctcggtcttgctatgctttcgacagggattattcgccttaaatcggggttggcgcttaaggccagtgcggctagtgcgtctgctgctgagttatcgtttcgaggaattttgaccagggcgaactggtcgaactggctggaaagttcgtggaccagtgagagataaccccacatcctttcgttcttgacttcgaattccccgctgaaagctttgatctgtctagctctgagtcctttagcgagtcgaagtcctgcaagaagtgcttcgtattctgcttcgttattcgatgctttaaactggagccgaagtgactgttcgaggatttctccggttggtgactgaagtagaattccgagaccggagccttgtaatgatgaggagccatccgagtaaagtgtccagttttcgtctggggtaacgtcaatcacatccggggacagttcggtcatgaagtcagctaggacctgagatttgaggctcgggcgaaagcgatattccacgtcgtattcactcagttcgattgcccatttcgcaattcgtccagactggtttgggctgtggagcactgtgcgtagtggctgatcagtgaacactatggaatgtgattggaaataaggtcgaaatttccgagctgccgttatcaccgccaacgccagcttttctaaggtcggatatctggtctcggcgtcattcagggctttactggtatagaagataggtttttcgttgattgtaccccgagaaggcatccatgaaagataaaagctgatttccagacgttgcctcgactaggcgatctatgtgtggcagtggataactgtctttagggcaagccctgtttaggtcggtgtaatccacgcagactctccacttaccattcttctttttgaccacgactgggttggccagccattctggatattgtacttctttaatcaggccggcttttaggagccgctcgacctcgtcttggacggctttggcgcggtctgaccccagccgccttcgcttttggcgaactggtttgaaggttggatccgtattgagcttatgacaggttacctccggggcgattcctgtcatatccttcgtagaccaagcaaaagatgacgacctcgatttcaggaaggcgatcagctcttcctttatctctccttctagctcgcttccgataccgaccgtccgagatggatccgactcgtcgatgttgacctggataatcctgcaacttggcgccttcattgattcgcgagctggtcgctccgacggcgcagctcgctcttcgtcctttaattgctatatccttctttcgctgcttcttctcgatcacgtaacacttctcgtttgttctggggggacggtagtccgattattgcatcgatctgctttgggttggcttcaattcctcgttcggtgactatgtatcccaagaattctcctgacgttactccgaaagtgcacttc

SEQ ID NO: 37957 - DNA, 4804 bp, Arabidopsis thaliana landsberg
gctcagactgggagtccaccgctggatttgaaatttaccttcacgaacgggcatctgctaggtgtgtgatgccttcggttattgaattctctcatcttcaagatgcaataggaacaatcatcagtgacgtgaatttataccccacttggtcacaactcacaagattcaactgcattaagcgaaagaaacttaaaggcaaaaattaaaaacctgctcaagatgttgaacctgaatccactgctccgtaacaacttctgtcatctaaaaatgataaaggaagtaggtcagtgccaaaagagcttgaagcatttggtgacagcaacaatctaaaactcattttcatacaaacatatcagaaacagacagatttcatttgctaccacatcaaagggacaaacaaaaacaagacaaggacaaaaccaaacaaaagtggggtaatttggtactacacataacaaatttagttacatagattaatagatgcttaaatacctaacaacaacaagttttatgccgatttatgttggttctctgagatccaaacatatatattcaaagtttaaaggaatctatcaaaaattttgtagaaattaaactgaagtgaacttagagatgattctgaactaccaagaatagttaataatttctgctttggatagaagattaaaggaatgggtgaagtaagaaaagccaataatcacctgttcaacttccaaagccttagctttaagtttattcttagcttctcttgctttatcctctaaaacgtgtagctcgaagttggttgttctcaaggcagcccatagaagtttcacctaccattgccaaccctgttctttagattagtggagttgaagaataagtagctccagcattggcagaacacaatttgggaaataaaccaatagaaaaaaacattttgagaactagtctaaagaatagaatagccacatgactgaacagacctcttcttctaactcgcttatcctcttttgaaccaaaggtaagccgctctgagatcaaataacaagtgttagcaatgcaactaccatgataaagtgatggcacaatatacatttcagataagaaactagctccaaacagaagaaacaaagaccctacttcaagagcagcaacataatcaaactcagtacaatcttctaagggtttataaactgattcaaatacaactagaagagggataaaacattacgagccgagtacttatcatacaaccaggcaagttttcgtatcaccaatacttagacatcctacaacaaaggtgtggcaactatacagaagtggcagctacaactataatgattaagctcaatagggcattgagttttctcgagtaaacattattcagaaaggcggtatcataggagagcctcagactagcacatacgatctaatgagtgtcctaccacattcattccctcatcagcagaggaaatttttaaagccttttagctaattctacttaacataactaaatgttcaatagattctccttagagaaccaaaccaaccttgtcaatgtatgaagcagactgcaaatcaaggatctgagtttcagcaacttggatcaacttctcacgctctttcaagtaaagggtcttaccatccaacttctgtattgtcgcctcaagaacagcttctacacgatcagagccaatcgattcccagcaaacaaaacaatacaattagcaaaaagaaaaagaaaaaagagaagccttggtggttcaacccaaaaccaccacgaacaaaaagaaacaaactttacccaattgagatattctgagcttagctgagtccagatcattgatcaagttctgattagaaccgatctgctgctggacttgagaggagaaaacgaagagtggtgaaatgatgaaaaacagagcagccaaatgcagccccattctctgttcaccggagttccgacgttcccggcgtcggaaactaagccaacagtttcgtctctcctcttcttcttcagagagatttcgagtcaaagcttcctcgtaaaggttctttcgattcctctgtgattcatttcagggacggcgagtaaaccgggattaaaaaatctgaattgaagtattgaaccggttttaaaaacgacaaggactgtacacttgaaaacaataaagggcaagatgtttactctcaacacaagtggttcctcaaaaaaaaaatctgggggatatgataatcatgcaaccagcctgcggatctgaaagacaacaacacgaacacgagaccaaaagctcgttaaagcccttcaagagttgttgtattaatttagttttaaattaacttgatttaaataataaaaagaaaaaaagctttgataaacacatcaacggcagaaacacacataagcacgcgattcgctgtagaatcctcaagtttcgattttttttttcttttcatttacaacaaaaaaaaacaagattttaattaagaagaaaggcaaaaaaaaagaaaggaatatgaaggaggttgaaattgagatgagtggtactactactactactactagaagccctgttgttgtttttcttcctttttggtttttatcgattttactattattattgtttgttcttcctcttcttcttattcttactcttatatattctacttctttttatttttatttttttacgtttttggatcagggtttgtttgttcaatagaaagccctagtttttgtttttgtgttctttgattcttcttgcggccgtttctgggtttcttcttcttcttctctttccatggagatgggttctgacggtgaagatcagaagatcaggagcgtcgttggtgatgctaatcttaataataagaagaagaagattgataataattcctcctctaaggatggtcgtgtcaagcctaaacgtcagatgaaaactccgtttcagcttgaaaccttggagaaagtttaatcagagaatcttattcatctcaattaatttgattcaatcttcgttctctttgtttttttaagtattgatgttgaatttttgattcagaggagaagtatccgtcggaggcgacgagggctgagttatctgagaaattggatttgtcagatcgacaattacagatgtggttttgtcatagacggttaaaggacaagaaggatggtcagtctaataaaccggtgaaatcatcggttgctgcggttcaatcggcttcggttaacgagttaccggctgctgctggatcggtacctgagcaagattccagatctgattcgggttctgagtcaggttgcagtccttattccaactctaggaggaattttgctagtggtagtagtagttctcgagctgaattggatgaatatgagacaatgggaaagccgagttatgagtcgcggttgtcgacaatggtgggtagagctattgtctgtattgaggctcagttaggtgagccattgagagatgatggacctattcttggcatggagtttgatcctttgcctcctggtgcgtttggaacacctataggtatgcattactttctatgtttgccctgttttatgacttgtgtaaccaatgtcagtgttagtattacacttcttgtgataagtaactctctaactttgttttcattggcatttcagcgatgcagaaacacctagttcatccctatgagagcgatctgtatgagcgacatgatccccgacctcgaagagttagttttctgactaaacagatatgctctatttagtttctttataacgcacctagatatctcaaattgactatttgaagaggttaccataaactgatggtctatgaattatatggtaggagtaatttttagagttctcattacatgaaggctgacattagtcttatggcagtttttagtctctgatcattgttagaaagatgaattccgctctgctgtttctattctctttcttgtccattcatgtattcacagttttataatattttctttttactactttgcttaacatatttgcttttgttgattatagtctcatgctgctgcccgttctttccatgagcaacaatctctggatgatccgtcttcttttacacctaatatgtatgaacgatactctgaaaatcatgcacgtggtatggactatgaagttgcacgttctagaagttcatcatttatgcactcgaatggacctgtaccaaggtcctatgttacccctggacatgcgtctcgtaactgttcgacatctcaacaagacatgccaagccccattgaatcagcgcatcatggtgatagattcctgctggagaaggactcatcagtccttggtacagaagatccatatttgttgcctgatggagtgcgtaagagtagtgatgtgcatagaaagggaaaggtagcttcattgtaccaacttttatttcatccatttttgttgacaagatgtgtctttgttgtaatgtcatttttctatgtttactctcacagattaacgatggtagacttggaagagggagtgaaacccgagagaatcatggaccaaaagatcttgagaagctagaaattcagaggaaaaaggtatttgctctacatttattatcctccttactgattatttggaaaggtgtcttattgtcttttattagtatcactgtaacagatatattgatgagttgatgcttgtgtcctcagaatgaagaacgcatgagaaaagagatggaaaggaacgagcgtgagaggagtaaggaagaagagaggttgatgcgtgaaagaataaaagaagaggaaaggttacagcgtgagcagcgtccga

SEQ ID NO: 37958 - DNA, 3244 bp, Arabidopsis thaliana landsberg
caaattttgttattttatatttaaatattttttatgatgttttcgatccgctaccataaatagcgttgtcaatttttgcaaaaaaattaacatgataatccgatttttacctttccgcaaaagatgaaaatgattcactggtccggtgaaaaaaacaagactattttgacgacgatgattataaatgacttataatgtcattagtttgatagcgacaaaatttttatttgcttaacgggtactatgatctaaaagaatctaatatgtttgtctttaacaacagtaaatgcttcggaaaaaaaaagttctaaatatgaaattagagattgtaacttccaccaaataatctagatacatgtaagagagaataaggttactgttttaattgccaatctacttcttgcacaaatctcttaattttgtatacgagactgtatagtataaccttccaaataattgaacaaagtttaatattgtcccatggtaaatcacctagtcgaagtatttatatctcattattatgagtttttgacaaatctagaagtctagaactaaaagttgagaaactattattgaaaaacgggcaacagttgtaattgtctgcttaaggaccacgtagcttaagtaccgtcgtggtgtttctttcatggagcatatctaattacggtgaagaagaaatagtttgtagtaatattgctgtttcttgtttaaataaaagcattaacatcttgttgtgtatttttacataacatttttggaactcaatacaggtgacacaaacaaatatatatggtggagatagtttgaatcaagatcagctctctgtgaagaaataggaattatatagaacaaggcctcgtcccattcctaacctaagaagatcccgtacataatgttgcttactttttgttttacggacccgattgtactctccccatgttgggcggatatgggtaagatgaattgttcaaggacgagatgtcaccattttgagtctcgttctttgtttctctctggccgtactgattcataccgctatttaagctagcatagtaggatgacatgggactagcatgaacaaacctgggattgactccatttgggtgagtttggttgacaagttgttgattctggtgctgatgttcgttggaagcgtggttaggtccatcagatgagattccaacaccaagattgaggctgatggtgtctgtttcatctggtctgaaccgaggctggatttcgtgattgctgctagactttgaagtgggaacatcatgatcgtgtttgccttcgtatgttgttattacagcttttggatcatgtgatgctctctccacgtgttttctcactgggcatccatgagctgtgcatttgtagtagctcctacaaaaggccgaggaacatcatgaaacataatatctccattgcgcacatgttgagtctgttaagatcactatcttccatattccaaaccaaattcctaaaagaagcaacactttatgcacatgtcaaataactaggtcctgaagacaaggactaaactgttctagctaccattttgaactcgcaagttatgtttatgtatgttcattcgagaaaaaagcaaggaattttttggggtgttaaaagctttaatgctgtacaaacctgggatttgggttcccccttacgactttctgcccatatttgcgccatctataaccatcatccagaatgtcaacctcactcagagtttgaacaacaacccgaggctcccggatgggtttcactagtggagttatttccatcgcaccctccatcctcctacataaagttaaaataaagttttaatcatgtcaaatcacagattcaaatcaagcacctgaatcctttgttaaactctaatacctccgttttgagaatggatcatcttcgtccggctcatctttattcctatttgacgctgccgcttctccaccatcgtcagatgctgagataggaggtacttcagggttaccagtttgttcattggggttagacaagttgtagacgccagatcccttctctgtgtgcagacataagagtagaaggaaaaagttatagatattgccaagggagtaagtgcatatttgtctcaagttttagttatgattaccatctcggccagttgaagaaggatacttgtctagcctttcttcttgtgcagccataccaccagagtttcggcgaccaggttgaggtttaggatggtcatgtgtacccttgtatataatatcggtgatctgcccatcatgagatctttcaaataactttttcacttcacaattaggatgtgtacatttataatagctccggggaaattcactccctttgacatgcttttgaccatattttctccagttataaccatcatcagccaagatggatggagtgcttcctctggagtcattttgggaagtctggattgattcctcttgatcagatccagccggaatatctgagctcgttggtgtcatctgacaaggaggagttggccggcttagctcacttgaggaacctgcagcatcactgatcgaagaaggtgagtgtgaggatccatggccctggccttgaaaatgtactggtggctcacttctaatcttgccaagctctgcatataccttgaaatcaataaagatgtttagacaaagtcatcccccaacaatatacaagtaacttataaactgtgagcttttggatacaaggctccttatgaaacaatttaaggctggcatggtattatatgtatgcaaaggcgaaagattttgagatttacaagcaatccaagcgctgaataaatagaattcgtgcagaaaaattaggtcagccactgttcggggttcatatgtcgtcgactatctgaacagtacattacatgcaaagcataacaaacagcattgttttggacaataccatatttgatgcaggaggtctgaactcaaattcactggacttctgctcagtaaaggtgttctgatggaaccccctgcctgtataagaacttgagctagcagaaatgtgcactggtcgaggcttgaacaaagaaccagtagtaggggaaggttctggctgaaagttaaagaaagtggcatattattaatggcatgaataaaacaatacatatcagattttgtaaaacatgaacctgatctatcaataaacatgatgttttaaaaaaaacagtcttctaaaaacaaaaacaatatcttgttcaatcaaggaaatg

SEQ ID NO: 37959 - DNA, 4251 bp, Arabidopsis thaliana landsberg
tatcccacaaggatcgatatttgtagctgaccggagtaaagctcagctgtaaataaagaccccactagcctctccttagacattaattatttgcacaactcaccactgttatacacttcaaattcacacatatctatgctcgtgatacatatttgagttcaacacatttgagaccatcttaagaagcaatcgaggcttaattttccaaaaaataaactgaaggaatgaagtataaactcttaaaaaagtagacgcaatgcaacaactctattcacattaatgctttaagaaagaaaaaaagaagcagacattagacatcgctgctgaatgctctctttgcttcagcctcccactacaacctcactcgccattatctcagccttcacttggatgttattggagtttggtttctgctcttcaggtttcgcagccacggcagtagccttctcttcttctcctctcttctctgcttcttctttcttcacttcctttttcttttctttggccttcactgatttctcttgagtttcaagctttggctgagactttgttattggtttcttcactgtagatgatgatgagtcttttggttttgtcacgcgaggagcggcttcacctcctgttgcatcactgctactctttctgcgtcctagctttggagacttaggacgagtagttggtatctgcaacattttcatggagcacggtataagaaaaatagtgtagcacaagtttgatcacataggaagagaaagaagcaaaccttcttcaattcaaccttaggtgggggttctttgtagaaactgggcatgggaccagccttgaacgtcaagctcttcctcaaccttttgatctcttcttcctggctctcctaaacaaacacaatccatttaacccaaaaaatgacaaatgtcacagaccaataagagttttctttcattatagaagagtcttatatagcttaccttgatttcgcctgcaaattggtcttctctacttcctttgcatggatcttctcttctagtctcatatagagctgaaaggtacacccgacaaaggagacgcgagctaggaagaatcgaaaacttacttgaaacagttagaatgccaatgttgtaagaatagagaatgagagttagcagcaacctccttccgtttttcagcccgttccagcgtcctgatcgaaaatccagatgccgatgcaccacgtgcttctccgcccacgaggtgtagaagttctgttggtcatccaagcattatatatagagatacatatatcattaataaacatggaagatcatgaagaaactgcatacaaagtggtagttgaacgagtgtcttcgtcgtccttgcttgccatttcagctttcaacgggttagatactttatctgccaccctgtaaaattacagatgcaaacacttttacatatgttttacttctgtaatctacagccacattttcacattaaaaactaacggaaacatgccaaaaacaaggtaaagaaagaacttacacagcggtggttgatccagcctcctcgacatccttccccgcagtttcttctttgatggatttagaaccttcatctcctaatctgaaaatgccgcgggagaacaatttagttgactattcagatcatcactttcacatattttcttagtcgcttatgtcattccacagttacgtatttgaaatgataaatattgtgactcacttggaagtagggcctgaagctgcatccttagaaatggttttcacaggctgacacaacacaaagaagattagtaagttgacaagaaagcttcaaacaactaacaaaacagattcagtagttaccatagtttgctttttgagaggcgcagatactaaactggtgcgctttgcggaaacaccgctgcttgaagatggagtggcttttggtttggatccaccagcaacgacgggtttaagactagtctttgatgttgtggcatcaatgctctttctagtaatatcagtataagctcctttagttggaaatgaagagctctgagacatgaatctcgggctccgagaaaacgtccctgactttctcttaacaggtttattatccttagctgttttactcttcactgaagtaccagactcagggaggtctgcttcctacagagaatgacacagaagagagaatgttaagactaacaaaactcagttcagaaaacgagtcttgtaagaagcattatacctttaccagcttagaagcttcatcttttggaccattctcattggcagtatcagttttctcagtagataagtcaagattctcaggtctattcatgtccttggaattatcaacaataacattctcttcccctttctttgattccgcaacaatattcaaatcctcggacgccattcagggacaacttccaaatccacacaaagcaaatgtatattccgacaaagttgatgaagtaagctcagatccaaatcccttaatcaaactaaaaatggaccttgttgttttgagtagccacccatttgttccatctgatcctaaggactaaacattgtaacatagcaatgtcaacaatcacttttattatttgcaacaaaacgctacgatcatcaacctagtcatcacctatcaccatattcataaaaacaaaccaaccgttttaatgtttaaaattcgaaagctctgattttgaaaacagattgaaccaaaccattgttcctgtagacaacaactaaagcaaacccactagtcaaaatctaaatctgaaacaagacaagtagaatcaaccaaacaagtcgaaactaagacaaagtgaatgaagaaaagcaaaattccagaaaaagtaccttatcagtcgattaagaaagacaaagcgtatatgctttttctctactaaaagcttcgtaagatcacactactggcaagagaaagaaagagagaagaaaaagcgaagagcgacgagtcttgttgtacctctctgtgtgggaatgagagcaaaggaaaaaagatgggctttttcaacgtcaaaggagagaagatgaagacactaaccattaccaaattaccgggaacaccccctcttcttttgttaggtctttgaccttttttttatcactctctcgctcactaatgaactcaaattaattaaaattataagacaactaatcagtagatttcccaccctataatcacagatactcaagatacttaaaagtctaaactcccaatgtttaggttgctaaatttatgttgcaatcaacaaaaaaagggtcaataatgtggtcaaaagagtgagtgataaaggggtataatggtaaatagaaagcaaatgattgaggaagaagtgtttggagaacgtgggagagaagaagagagagaggagagggtctccgttacagcgaaccataagccccacgacatacccgccgcgtgtggaccccattacttcgtccgttaatgctgacgtgtcaagacccgttccacatgattggttttcacgtttgggtcccatgttttcgccgccagccgcgcgtgagctgtctcgaccagaaatgactgttccgtccacgtaggcttgtgtctgaattctccaccgtcagatctttttggacccttctttccaagatttttatgctttccaatgttttcatgcacgttgcaatcattcaggattcgtccaaacattttactatatggttgttttgagataacatgcttaagataatggctactatttctaaattaagtttgtttgggggttacataatcactcttcttattcctaatataaccctcaaggtcaatacacaaaggcaaagtattgagagcatcaacatcacctgagttttattgtgtctccttatcctttctactacaacttctatatacaacaaaacacatctttcattttttttttgctctaacttttataagaacatgataaacaaaacaaaaaaaaacctacacatcaaaatcatttgactttccatctatcaacttatccatcaacttactttcttgaggtctctttgtgtccatcttctccttgttctgcctcctctcttatagtcatttgttgtggctctttttgtagtttcctacagtctaaagtgtaacaagataaagattatatatagattatgttttttgaaatgttgaaatacactagatctttgattaggagacttttataacaacagctctaagagactaaagtgagtgaatgcatcacatttacttacattcgtcata

SEQ ID NO: 37960 - DNA, 7251 bp, Arabidopsis thaliana landsberg
acgatgttcaagatcctattttcttcgattttaatctcgatcttcccgctggatctggttgcctcttggttggtgccaatggatctggtaaaaattattcgaatcatttcgattttgtgtgtgtttctgtttctgtgaatctgaagtagatcgatttgggaccttgacgaatatagaatgtattatgtgatttcgtgtgattctgttttggtagtgttggaattcggtttaattcgtcgaattcgactatacgtatagagtttgagtaagtaagatcgatttttcgactatatgtatcatgttaatactcgaatttgattgattctgctaagaaggtgattgtcgttgcgcgtttcattgacagggaaaactacgttattgaagatctcttgctggaaaacatatggttggaggaaagaatgttgtacaagtgcttgatcgctcagcatttcatgatacagagcttgtttgtagtggtgatttgtcttacctaggaggatcatggagtaaaactgctggttctgctgtgagtactgagatctcaaagttaatacactgcaagagttttgatgtgagaacgttttgtttctaattctttaaaattctttagggtgatattccactccaaggagacttctcagcagaacatatgatatttggaggtgagattctctgatcctagtatgagtttttagtgaattgtttcgttgtgcttatactctgaatatgttttgtgtttagttgaagggattgatcctttcagaagagagaagttgattgatcttcttgatatcaatcttcaatggcgtatgcataaggtttctgatgggcagagacgtcgagtgcaaatatgtatgggtctattacatccgttcaaggtagtattgcattccatcaactattcatcggcgtatgtgtttttgcgttgatcattatctgagacttagattgtaatgatcgcaggtattactactggatgaagctactgttgtcctgttctgttgtcgctagcaatagattgtgttgtatgttctcttaaaccaagaagtgtgatacagtgtaatgccagtgcaactaacgcccgtcctacatccttatgtttgagtgaacatcaaatactgattttcatgttttatatttgagtagagaagagctacaattgtatatgcaactcatattttcgacgggctcgagacatgggctagtcatttggcttacattaatggaggagagctgaaactctcggccaagttagatgagatcaaggatctcaaaacctcaccaaatctgctatctgttgttgaagcttggctccggtctgaaaccaaagttgagaaaaagacgaagaagaaacctgttgttacctctccatttatgtcgtctagacaaatggcatattaccgatgaatcttaacttgtttatgagatcagtaagaataagagcactgcttctacagatgcctttgttttctatggtacttcattgtttagaatccgataacttttatcacacatgaaagaatttctgtaaaaccacgtttttaattaaattactattttgccaatatttaagagcttatattcaaaataggcatttaaaataaagttatttcaaaataggtattttacacagttgaatgtaacagtgtcgatttattgcttcaattgggacaattttgtccttgtcttcttttcctcttcttcttcatcatagttgcagaatctgatcaaatcgatttcttcttaatttttcaagcaaacttaaaatcgtttttaattatacaatactaaaccctaagatagtacatagagaacctaagcaaaaaaaattatagattttattgaattttagttttaatcaaatcaaactctttctctctttcaagttgatgtgtctatgctttggtttcttggaaagataaaggaagaaaaagaagaataggaaagtgcaagttgtaggatttgggatatttttcgtgggagttttctgtgattcaacaattctttggagaagatgatgccaatgactggaggatatagatgacttttcaccagggaagagtacctgtttttgaatgttatgtaagaagtgccttaaagtaaatatataaccaagacaaatgcctattttgcaattaactcataaatatatattagtatattaaaaaaaaaaaaaaaagtttgtctttcttaaattgatatacacaacaaactttttccatgaaattttccaatattttctatcatttcgattatttgaactcttttgtctgtttgtgtttaatcttatgcaaatttatttctttttgttgttatcacatattttgtaaatttgtgattaatttataatcctagaataaaacgaaaaccatgcttttgcttggccacataaatagtcaacggttgacttttgactgtcaaccatagacttggagactttactgatcttctcgtatctagttatgggccttacatggaaaaggcccatttagaaaaactgaatcataatactcataaaaagctcgcaagtccattagggtacatcgtcagctaccaagacattttttcgtcaggtcgcgcgtctcttgctcgatgcagagagagagaaggagaaaagatgaggttgatagtgcacaatatgttgtcttgcaacattaaaggagtggtcaacaagtttcctctgcgaatcgaagcggagaaggtaacagtaaaagaggttgatttcaacccggattttctcaggtacatgtttgccaaaatcgattggaaggctctagtggatggtgcacgttctatggaatacaccgaacttcccgataacgcaccagacacgacgacgctggaatctgacgaaacattcctaaggaaattccaccacgcgttgctcgagcttcaccttgaggaaggctcactcgtctgcccagaaaccggtaggaagttttcggttagcaaaggaattcccaatatgcttctccacgaagatgaagtttaaattaagcattgtgttttagattgattcatcacgcaatgcattgtgtaatggatgattctttaagctctagtactcttccaatatcataatcttgttattctactttaagtactatcttcatacactcgtagacaaagtagcttattgaagccgaaggcaatacctggagatgtgaaacagaacatatcaagcttttggaaacagtagatacacaagttgagtttagtaatgaaacaagtattatgcaaacctggagcaagctaggtaaaagtccagcgtataaagctgggatccctcctctttcaatgatattgaatcccatagctaaagcattgagcttgtttttacccatctgcatctgaagctgtcgtctcactacttcgaaaggataagtggctacttcagtacaagcacctgctatagcaccgtacatgagagttctgatgggtcctaactcgagcctgtctagagcattgagttcttgtccctgctgcttcatgtctatcagtcttttccggccttctggtgtatgcagaaacgatgacttaaggatgtcgtaaacgccatagaaaactgcaccggacagagccatgcttgctatggacggcactagacccttgtagagggagaacaacccttctgtttggatcatataccgaaaagctcctccgattccccccaaggcttctccaccccgagccactagtttggttcgtatctgtgccagtagaagaacacatttcagtcaaattggttacacatgctcataattgtcctgtcgaacactaacactagacttatgtcactctaaagcagagaactttgtcatatttgatctaaaatggtttaaggaatcaaaaacatacagtgtcgagtggcaagcagagcacagtagcagtaatcccagcagcggcaccagcaacgaatctttcaaagttggttgcttcttgattcccagcgattttaagcaattgctttctataggtatcataggcacaaaaattgacggctttgaaaggagcagttcgaagaacattgagcaaattacctttccagaatccagtcaagccctgtgtagttgcaattgacttagcaaccaccaacaagttcctctgttcaccacgaactgtatattcaagctttagtctctcaagtggagctaagaatgttctgccatcatcaacaacaaaaagtgtaatattaataccaatacaaaaaatcatggttttggttcaggcatttcatcaaacaagttatatgcgctctgattcaataatatgtatactttgaaaccatggcagctacagcaccagcccagagatgcttccttgtgttcatggtcccgcgtctcctcacgccaccgataacacttcgttttcgattatccttgccgggaatttcgtcgtttcgcgccaaagccttcttacattgctgctcagatctgtctttactcaagctcacggacaggaacataaagttcttaccggagcggagacgggttttgtttctccagtaaccggggaaatgcagtggctctgagtcggagcatttggaggagatagagtcgaagaaggaagaggaaacgcctggtggttcgagaaacagaccaccggtgctgaagaaagcttcattggatagatcgatagagctggtcgaagaagaagaagaaggatcgtgaggatagatatcgagtcctgacatttggataatgaaaggagcaaaattgatttgaatttgtagagaaaagctaatttgtgggaatcggccaaaattgagtggttggaccggtggaaccgtttttgggctttttatactttaaattctgtggctccaaaagtaaaggtaaggaaagcatgaaattattgattctgaaaaggatataatgctgaggaactatatgttagatggagttttctaagattttaacccctcttaattataggtttagcagcagaagatgcagatatgagatatctgaatcaaagtcccttttctttggcgttttctttgtagcacaaagccaatcacaatgagaaactgaagccaagctcagaatatgaagcctaggaatatgaggcctctgataacaacagtcaggaatgagcatgatgttacaagaagattattgcaataagaattagatctccagaggtcaaagccaagcatgatgaggaactgagaaaagctcagattcaggctgctctgactttgaaaaaataacactcagaaacgagcatgatgttcagttgaaagcattcgagatgatgattgcaagaagaacaagatcttcagagctcaaccagtaagtctctgctaacaacattcaggaacgagcactcatgttttcaattgaaagcattcaagaagatgactggagcaagaattatatatctagaggtcaaagccaagcaagatgatgtactaaaacaagtttcacattcaggaaagagcataatgtattcagttaaaagcatataagaagatgattgcaagaagaactactaaatctccagagctcaaatagttaagtgtttataacaagattcattcattagaagatgcaaacgttaagttttaaaactaatgactgacttctacagttatccgattcttctactgcacaaatctcgacttctaaaatagtttccttactctaataaccataatgttgcataagctgatgattccaaggaaggatcaagtagatccaaggaagaagacaaggaagaaagtggaaagcaacagtaccaaaaagacgagaagaagcagttccatcaatccgcaaagcttaatccgattcatctttatcttcaccatggtaagctttctcctcagatcctctatctctcttcgcgtttctcctttctcctgcttctaaacaaaacaccagagatgagatttcgcatggcaatttcgtaatttaagagtcgattgtagcaaaatcgattccaatcggaagaagaaaggatcgaactaacctcgccggcggaatcgattgtgcgagatgatgcaagtgaatagagaagcatcgtagctctggcgcagcgaatcgcagtgagatctcgggaaaattcgtctttgctcgccatcgtctctctgcttctttctgttttttgattttttgagtttcaaaacttctacgccagattctcaatgaagggttcaatgtgacaggtgtcaatatatgattagttgaatctacccggaaaatgaaaatgtcccacttctattttcgagattttccctccaaagtgttttggggttagttaatttatttaatgtcaatagtacaaataacacaagcatcgtcgcttgctactgaaccattggtagattcaagttaaaccattttacctctggttctattattgatagtgactacactcggaactcaaactctggtatatcttaccttgaataaagctatttagtcagtatccatatatgttttagtgcaatactagttgatattattccgtgtgtacgtgttattccccaagtacaattcaatgcaaaatactgatatgtttagagatctaaagcatgatcgttcatagaagcagagaattaatacaaactttctggtacttttagtatatacataactttgtccatatctagtctcttggcttattatctgccgtacaaattttatagattcagtaaccttgatagagcctagcttagaagcctaagcaaatttgatggtttaaacagttttgtagagctgtgatcgtgtgggtgcatgaacttgcagttgggacaaacaggagttgatgtacacaacataaccagcatgtggcatttcatgcaaactgttgttaccatctcttgccccttgtgatcaacatcgttatcatcaccaccttcaaacgctagccaggatggtgatcgacttagtcctgtcccaattatgctcttcttacttgtgttcgtcaaaactttaatctttgatgatgatactgtttcattgtgaattgaggaggattcatatttcttcgttgtggttcgtgaaggtgaacctgaaggtgaaaggttcagctcaaggtctaggctcatcttaggttgtccaaaaatcactggatctttgggatatgccctatgctcatcagatgttcttgaatatccctgaaaatataagtatcgttgttttagatgcatgtttatgcacatatcataacgcatatctatcttcatattgatacaaatataagatacttcaattcatatatgaatatagataccttagtttgccaatc

SEQ ID NO: 37961 - DNA, 4664 bp, Arabidopsis thaliana landsberg
  unsure (1)..(4664): unsure at all n locations
atgtggagaaacgaggtttgccttctggattgtgtcttggtttctgtagtgttcttgacactgctggggaaggggcaaaatctaagctttatgaggttttggagtctagtgttgtctctggagataagaacaacaatggaactgttgtctgggtaagcctcttacttatttcttgatcatcattgttataatctgtctcagtcttaactgtttatagacttaagagttatagcttaagtttaagtctaactaggatttacagtttattcttttttagtttgggaattgtattttcttatatagatatatatatagagtctaagcccttgttggtgatcatcattcaaaaagttaagagagcttttagtgtaatcggtttcaccgagagaaagagagtttatctcttcgggagcttcgcttgattaaagggtttggattttgaattgtgtttgacctgcaaccaacagtctataagagatgacatcaacagtaactgcgcgaacagagggacgttctgatgcgttagagacgaaccaagaagatactaaaaacacatctgctacattcctagagttaccacttttcactttgggaagctttgatatgccaaacataatagaattcaaaggatcagtggatggacatgaagtcgttattatagtggatagtggagcaagtaagaacttcgtagcttcttggctgagtgataagcttgacagacctattgaagcaacaccccgttttcgtgctcttttagctgatggacgtattgaatctttccaagggaagtactccaacttgcctatcacaattggatcagaaactctctctgttgattgttacttatctccattgggaggaggcgacatcatctttggtggtcaatggttggcttccctcggagatgtgattgcaaattggaaaaccatgttttaaagcttcactcgagatggccgcaatatacgattgaatggtgacacttcgttagcttgctctgaaatctcagctcgtggacctgaaaaattgcatgaagttgatcattttgtgtgagacaacttataaactttaggacgttgatgcagtgtgattcagctgtgtttctttttccatcttcagtaatgagtcggtctttgttttgttttgttttgttttgttttgttttgttttgttttgttttggagttgagcctatatcctaaagagaaaacactagactaaggattgatttggttttttcttttgggttacatttagcagttaaggtcttaggaagtttagggtttgtaagaactccttacttcgaaataaaaatacttgttttcttcttgtgatggtttaaagatctaaaaatacgaaagtttctcttgattctggtgcttgtttagcttcatctcggggtgaatagcggagcgccaaaattcgccattgaaagacaggcagtgaacgaagctcatttccgttgtcctgatgaattgggctggcaaccacaggtaaaccactagtaatttgcttatgaattcactccattatgatccgctagcaatccgagaaatacgctaactgcggctttcttgaacgttttctttacacagcggcttcccatagttgttgaagatggaggcatttcaaaggcaaaagaggtaacatacatataatattacatgcttcaccacaaaacttggatttgaatattttttttttttggttgtcttgaagacttcatgctctacggagtccattttcgagttattaaagaagaaaggcttcgaggttgttcaatcagacgatgctggacgttttgtatgcaactatgtgtactatcactctctaaggttcgcagagcaaaagggacacaagtctctgttcgttcacgttcctctcttctccaaaatcgatgaagatactcaaatgcagtttgtggcatctctcttggaggcaattgcagctacttgctagtgtttataagaattcactaaagccaaatattgtaagtatactatgtatatgatccgtttgtctttctatgaagctctgtgttcttttgttggaaggtttggggatataaaaagacgattgcttttggttctcaaagatcctttgtgattgtctctgactctctgtaataaaagaagtctctctctattcataatgttaaaaaggttggatttttatggtatgtttctcctaatttggttttggtttgaccaaaaaaatatcaattttggttaaactttgatacatttcggttcattttggtaatttcgatttaatttagcatanatttcgataattttgttgaaatattggtaatttcggtttaatctttgtaattgcagattaatttagcgtatatctttttgtaatttcggttcggttactgaatttcgttgcttcctattgccgatcagtttttcggtttagttcggccaattctgttcggtctggatgccaaggctttgtataaaccggtttcttgtgaagacactgtatcagtgatacttgttgggcaaggagcaaaaaaagcattcaatttttgtcttttaagctttgattcaaatgcgaactagggcttggagagagattgctttctttatacttttgtattgtaagcttgattcaaagtgtgagagacatgcgaggggctcaagctttatactttcttcggagaagtacaacgactttagctcaacatttgtgtcctcttgcaccgcttattgcgacgcctcgtatggagtttagttcgtttctggaagaaaaccctagcgacctcgtttatacccataaccgtaaaattgatgaattgattaagtccgggaacttggtatctgcacatgaagtgttcgatgaaatgtctgtgcgagatgttgttacttataatcttcttatttctgggaatagtagaaatgggtgttctttaagagctatagaactctacgcggagatggtctcttgtggtcttagagaaagtgcttccacgtttccttcggttctgagtgtatgtagtaatgaatggttcagtagagaaggaattcaagttcattgtagggtgatctctcttgggtttggatgtaacatgtttgttagatctgcacttgttggtctttatgcgtgtttgcggcttgttgatgttgctttgaagttgtttgatgaaatgcctgagagaaatttagttacttggaacgtgatgttaaatgggtactcaaaagctggacttattgaacaggctgaggaattgtttgatcagattactgagaaagatattgtctcgtggggtacaatgattgatgggtgtctccgaaagaatcagcttgacgaagctcttgtttactacaccgagatgctgcgctgtggaatgaagcctagtgaagttatgatggtggaccttctctcggcttcagctcgatcagttggtagctccaagggtttgcaacttcatggtaccattgtgaaaaggggttttgattgttatgatttcttacaagcaacgatcatacatttctacgctgtctctaatgacataaaactcgctcttcagcagtttgaagcgagtgttaaggaccacattgcgtcgagaaacgcgttgattgcaggatttgtgaagaatggaatggttgagcaggcaagagaagtatttgatcagactcatgataaagacatcttttcatggaacgctatgatatcgggttacgcgcaaagtctatcgcctcagttagctctacatctattccgcgaaatgatcagtagtagccaagtaaaaccagatgcaatcacaatggttagtgttttctctgcaatttcttctctaggatcgttggaagaagggaagagagcacatgattatctaaactttagcacgattcctcccaacgacaatctaaccgctgctataatcgacatgtacgccaaatgtggaagcatcgaaactgctctaaacattttccaccaaacaaagaacatttcttcttctacaatctctccctggaacgccatcatttgcggctcagcgacacatggccatgcaaaactagcgcttgatctctactccgatctccaatctctccccatcaaaccgaacagcatcacttttgtcggtgtcttgagcgcatgctgccatgcagggctagtggagttaggtaaaacgtatttcgaaagcatgaagagcgatcacgggatcgagccagacatcaaacattatggatgtatggttgatttattggggaaagctgggagattagaggaagctaaagaaatgatcaagaagatgcctgtaaaggctgatgtaatgatctgggggatgttattatcagcttcacgaactcacgggaacgtcgagatcgccgaacttgcggctactgagctagcagcgattgatccatctcatggaggatgcaaagttatgctttcgaacgtttatgcagacgcagggagatgggaagatgtagctttggttagagaagagatgcgaacgagagatgttgagtggtcacgtgccttcagtggtgttgtgtgaattgtatttagtctcgtagtgggcttattgtatgggcctattagaaacgagttaggttcgtgtttttattgggtcctaccaaagcagagctggctatttattgcccaaacgaaagcgaatgaatctccataatctttattttctcaacggacttt

SEQ ID NO: 37962 - DNA, 5440 bp, Arabidopsis thaliana landsberg
tagctttgtttggtgtgttgtgatatgcgcctagcctatgcaacagaggatacccaccactgcgttgccaaaagatagaggagagaatcataagtgctagaagtccggaagtggttcatggcaccacacataatatcgggtacagtccgcatcatcaatgggagaaccttctaccacccgacacacttaccgagagggctcggtgggccagaagccaccggagccgccatgaatacagcgttttggaactgtcggggcttaaaagggtccctgctagttcgacgcctcgaagggattaagaaatcttattccccgcacttactctttttgattgagacaaagaatcaggatgacgttgttcgggatgtggcagctcagttggattatgataatgtgaagtgtgtgtcgcctttgggcataggcagtggtttaactttgatgtggaagaagtctgtatcagttaatttcttttcgtttgatgcaagactcattgattgtaagataagtaataaagaaacttctttttatttctcttgtgcctatggccattcgatcagaaagttaagacatattctatgggaaagaattgagagaatcacaatacatagacaagggccttggttaatgtgtggggacttcaatgaaatactcgatgccagtgaaaaaaggggtggtcgtgttcgtcaaaattggagttttgtggattttcgaaatatggttaacacatgcaaagtatcagatcttccattcacaggaaacaatatgacttgggttggcaaaaggaaaactcattatgtggaatgctggcttgatagagcaatggccaatgatcaatggaaagcaagtgtccctgcttctgaggttgagtacttggagatgatagagtcggatcatagaccggctataatcaaaatccgaagaactaccgaacgtggattacgtcctttccaatttgacacacgactctctaaaattgcagagttcgaagacgttgttcaaacaagttggaaccaatttgttgagagttatgatgagtcagtttatggaaggattaagtgttgtcggagggatatctctgagtggaaacgaaatcattgcacaaactctgctataagaataaaaaaactgattcaagctatcgatacggcccactccgacgaccaaacaacaatggctcatatccatggtttacgcaaagatcttttacaagcttacagggatgaagaaaccttttggaaattgaaaagccgaaaccagtggttaaatgaaggtgatcgcaactccaaattcttccatgcggtgacaaagaacagggtggctaggaatagactcacgtcgattcttagaacaaatggggaagtgataagaggtaatgtggagattgcaaaagaagcagtcggatatttcggggatcttttttcaagtacatattcggacccatcgattgttctgaataagatcaacacgatggtgactgaacccatgaatgcagacctattagctgatattaatgaggaggagattcgagcagcacttttttcgatcggttctactcgtgctcccggaccggacgggttcaatgctgccttttaccaacgttattggcatattgtgggacctacaatcattaaagaagtaaagcttttcttcacggccgggaaaatgccagaacaatgcaccccccccaatctatgcctcataccgaagattgcaatcccccaaactatgaaagattttcgaccaatcagcctatgcaacgtcacatataagattatctcaaagatcttatcaaagcggctcaaaaatatactcccacacattatctcggagaatcaggctgcgttcacgcctggacgtctcattactgacaatgtactcatagctcatgaaatacttcactctctacgggttagaaagcggtgtgccaattcatacatggctgtcaaaacagatatcagtaaagcctatgacaggattgaatgggggtttcttgaaggtgtgcttaaaaagaaaggctttgctcaacaatggataacatggatcatggaatgcgtgcgctcggtatccttctcagtccttattaatggtagtccgtatggtcagttcgaggctacgcgaggcctaaggcaaggagacccgttatctccacaattattcatattatgtgccgatgtcttgagctctttgatgacacaagccacacatgagaataaaattagtggcatccgtatcagtaatggcggcccctcagtctcacaccttctttttgcggatgactcgctgtttttccttaaggcggactttaaaaatagcttaaacctcctagctatttttaaggagtatgaatatgcttcgggtcaaatgatcaatttggacaagtcgtctattacttttggtaatcgggtatatcaacagaccagggataatataatgcgcactctgaatattcctaatacaggcgggggagggaagtacctgggcttaccagaacaatttggccgaaaaaagaaagaaatgcttcaatacatccaacagaaagtccaaaagactatagatggatggcaaacgcaaatcttgtcggatgcgggtaaggagacacttatcaaggctgtcgcctatgcaatgccggtatattctatgaactgctttcaatttcccaaagaattatgtcagagattgtagatattgcgagattctggtggggtcaacgaaagaaaaaaagaaaatgtcatggatcgcgtggataaaatggtcataccgaaacgggcggggaggcttgggatttagagatcttcatttgtttaaccaagccttactagccaaccaggtatggaagattctaaaccgaccgcatagtctcatatatcgcatgctaaaagcaagatacttccgggatggaactttcctctctgccactagaggatcgcaaccgtcttacggttggacttctttactcttcggtcgggagctgttgcaacatagactccaaatcagtattggaaacggccagtccacaaatatgggtctagacccatggctcccaacgaatcccccgcgtgccccgatgatgcgacctatgacaggacccatccatgaaggttcaggacttaattgatcctctctccaatcactgggatgagacgaagatacggcaaatgatagaaccagaagatcatcatttgatccacaagatctatttacctcagcttcctaaaccggattctttcatttggagcccaaataaagatggtagatatacagtgaagtcggggtattggactgcactcaatttggccgctgaagatacgtcacctacacctcccctatcaacttctccggatattgcaactgcaatatggaaactcaacataacaccaaagttaaaacattttctctggcgatatgcatctcgggctattggtattgccgaaaatctacgacggcggaacataaacgtggacttgtactgctcctggtgctgcacagagctaaaaacaaatgatcataccttattctcatgctctcaagtcaaaatgatgtggagagttgcaagaattccgacttctcaactttgtgaccaaggaacccccctcgaaaacaatctctgattcctcttccgaattcacaatgacacaatggccgatcaagttacaagactgcccttctgattaatgtggcgaatatggaagagcataaatgatttggtatttaaccgtaaaaggactgacttctccacaacagtggaacttgttctcactaggaatggctggacaatattccactaaaagaacataatcaagggagtcctccatcagctacagattcgtcacatcaaatggggtcgaacagcaagggattagctaaaatgtaactacgatgcatctcatcacttggtagataaagtgtatggatttgaatggattatccgcaattctgaaggaacggttcttgaatgtggtatggggaaatttcaaggtcgaatgacccagagtaggctgaatgttcaacacttacgggaacaattaatacaagccacttgggctttcggttacaccaatgtggagtttgaaggagataacataaacatcaaccgactcatcaacaaagtcttcaactccccgatcacaaagttgtgtccctaactttacgtcaataaagttaactttcaaacacaaggagcaaaacgcatgtgaggatttattagctaagaaggccatcacgtctattactcaatggactatgtttcatacgggtccatatttcctttctcgtcttttacacatggatattacataaagttctaaataaaatttctagatgaaaaataaaataaaaattaagaaataaaaaagagaattgtcatgatgggttgtagagaatatctcagagtttctcaagtgagaaactttctcgaatcttagcatgcgtgcaatctcttttcttttttatgattttaatttttttaattgtaaaaaactcttttagagccttccaatggagatggtctaagtgcaacctagagataataaaatatgaaagtgttggtttaaaaaagttaggttaaatacatacctgcactccttcccatagtttctcactgttcatttgttgcatgctaagatcaaagagtttcttaagatgcaagttagaggggaactcttcaatagatgtcttgtctagaaaaagcactgagatattgtttgagatatcaggaaacatcctcaaacgtgagcatcctctgagatctaggcggtgaagagatttaaggttgataccagctggaagagtctccaaatttatacatccttccatgtttaactttgtcagtttattgagattctgaatagaggaagaaatcttcaccagactcgagcagtacttaagattaagtgtcttgagattggtcgccatagaaagatctggtatttcttttaggtttttagatttctccaaatccatgtctttcaagcatgtaagcgactgaacccacgaaacaaaacaaacaatagagcaaagttaaagtcatacaccaagtgcaaaaagtaatatgagatttgtcactttatttaaaacacttaccccaactccttcccacaacttctcaagctcgctctcttgcattttgagcttaacgaggttttcaggacgaaagctagaaggtagacatctcattgggtatttgtcccaacataatagtttaagcttaggcggcaaatagtcaaagttttcgggtaagtgcaatctgattttttgccctgacatcaatgccttagtgtaaatgtttagaaaacgaagattacgcatcccttgaaatgctttctcatgtacattcagctcatgatcaatctcatctacatctagtgatatacctaacatcttttttgtaccctgagaaacataaatcattaacttcaataccacattaatcaaatcagctagt

SEQ ID NO: 37963 - DNA, 3163 bp, Arabidopsis thaliana landsberg
ctcaagaaatcgttgaaacttgtagtgaatggtaaatcatcatcagaggcgaaaatcagcaacaatggaggatcgttgttaatttagcagcaatgagtattttgtttatatacttgtacatctctgtttctcctagtccattagagaaggtagatgtaaaggtataaaagcccatgtgttattgaaattgggtggatacttacaagactctatatgaataaaaatgatgcaattctttctttggagatggtgtggatgttataacaaaatatgaatcatgtgaaattttttgtcccatctttgttctaaaacaattggaccttttgaaatgaaatcccatggttgcttctagtagatagctttcttctgggaaacaaatttctggtttaataagttgaaccaacgaataactcttcaaacattccccacctacttctcatcaaacctccttataaatagaggattccagcacaagtctcttcatcactcaaaccaacaagaagtagtcaaagcacaatacagcagtagtagtagcaccatggctcctctcaagaactcctttgtaacatctctggtcattgcactaacattcacaagcttcttcaccagcctatccgctcatcgtcaccttctccaatcaacaccagtgactcagcctccagctttgacattcccacctctgcccaaaaccactatgccaccggttccttctctaccaactccaggacaacaaacgttgccacagccacaaccaactctgccacagcccactgggttgccaccgatgccgagcacacagataccatcattgcccaaccaggtgcagcccacaatccctaacattccacagatcaacttccctagcaactttcccttcaactttcctttcaacattcctttccttactccaccaccttcaaagtaagagaagtgaaagctagctcattagctgtcacagatcattatccttctttcctgagacagctttggatcacacactctgctttgtgtcagtttgtatacacatatatgtattcttttgctgttgtttggtgtcatcgtcctctttgttgttgcttccataagtcaagttccttttgtaatatacattctaaagagtgatttcctttccactgcaactcaacagactgaaccagtaggcaatatatatatatatatatatcatcatcatcatcaaacgtaaaataactttgaaacagctcatatagaaaggaaaaaaaagaagctttattctgtaactgattacatgagaatgcttttaccctaagttttgtaaaagacaaggtctcgtctacagtttgatttgatagcatcctctaatttatcaacaaggtcaaactcaaccttgaaagaaaccattgcagtaccatctttaccagtatcatagtcttccttgatgtcttcagcgtgacacgattgctgctatgacacatatatataaatgatccatgagcactcaggaaaatctcaaaaaaaaaatatcacagccagaaagaatctgtcacctgattgtaaagaacacctaaaagatcaaatgtgacctcaactcccatttgaacctgggagaagaaacaaacaggagtaatgaagttgaacaacaaaagagacaataaagaaaaagacatttactttggacttgaccagacaagaaggagcagttttcaagcaatcagatgtaacaccaccatatgctctaacaagacctccagttccaagtttgattcccccaaaatacctatcatcatcatcatcctatgaggagattgtattctcaaaacttgtaaagattcaatatttaagtttcaagactgaagaaagctaacctaatgacaacaaccataactctgtctaatccagaagagagaatagcagactgaatcggcttccctgctgtgccagatggctcaccatcatcgctacatcgatggtgatgatcaccgatcttataagcccagcaattgtgagaagcgcgaggatcacggacctgagagaggaacatttgagctgattgctcggaggagattggtccatcgattgcgatgaacttgctcttctttatctctttctccacagatacggattcttttagtgtcgagaatgaacccgaattcgaagccatcgacctcttgcctgatgcagccactaacaccggtattctgcggccgccgacggtggttactgctgctgctaccggtacgcccacccacatatgattgttgcctttttgccgcctagctagctatatgataatcttctccatttaattgctaaactagattagaaaacatttgatagtaacatttgaaattaaaattgatttttaggttcggtatacattggtattgaaattagaattgatttgtggtttggtttatactggtttagagaagaaaacaaacaaattttcacgcgatgggaattttggagactagtgcgtcgattgaaaaaggcatgatttggaaaggggtacacccacagaaatgctctcacgcgctcaacgctcactttgtgcgagtgggtgtgaaatagagccttctgattggcttagaaactctaaaaaaagtgaaatagtatacatgttgctagctcctattgttattatttagttttttgtttcttctatcaatctgatcaaagttcagttttttttaacatacagttgattctaataaaggttttgggttattttgaaatcatttgtatgtcaccaaaaaacagaaaattttgtgatttgtatgctggcaataattcatcattataaacgattctgttttcatagagtaaaaaacagaggatcaaaaaacatttttttggaaaacgcccttctaggtttatatgtaacatttccagtgactgtgtattcaggttgttgctttagttgttgtatttggtgttagcgaggccgtgacagaagaaatgccgaaactcaggtttgtgcttctatcgacttgtttatgttactgtcgttttgatatgattctaagcctggcttaagtgtacagtatcgttggattgcttattcatccatcaccgttggctgctgtttttttaacgtatttcttatagggacagaaaaaaagaaaaagcgcatttttatgaaatgctcaaatcagctctccccacagttggttatggcattata

SEQ ID NO: 37964 - DNA, 1359 bp, Arabidopsis thaliana landsberg
gtaaggaaaagatatatatctgcagtatatggtatgtaataggcatgcttatatccaatcttttgtaagtaaaatctttatatataaagtatataaaataaaattttatatctaaagtatataaataaaatacttatatcaaaaaaatatattataaaagaataaccaaaatatctttatatttacattatgccaaaaaatatataaccaaaaaatatctttctatgtaataaaaaataaaatcctatataagtatcaaacatatgttataaaaagtgtattatctataaccaaaatatattttctatactacctaagtataaaataagcacaaggagacaaaatcaactaaagaagcaaggcaagaaaacaacgaatgtatgacaacttcacatgtactcaagaccacttctaagcaagtcaaagaatgcgacaagacttcacccctaccaaagctaatcaagagaagaccaaggattcaaacttacttaaacaaaagacaagaaattgaagattactcaacacacttgggagaacacacgtctttgtaaaggacactaatcttttatttctcctttaacactctttgtataaaaagaaaagaaacaagaaagaaggagagcagagtgaatttcagagatcattagaattctctactctcttactttcatgttatcaaactttgcacttgtattttgaatcttgtatcttgtattttcaatccaatcaataaagtaagtttaatcatctaatttttcttactcttttcaatccaatcaataaattaagtttaatgatctaagttttcttactactctactacttacagaatttttatgattttatctttgaattatttataagttttcttactactctactactcaaatagtaggtctggtggagagggtcttggataatatggttttttagattgttgaaagtttcttttaatttgatttatttatatattttcttcatcagtttctgtccgaatattttcatcaatattatttatccccttgcctttgtctaatcgatctaatctacttgagattgattttaaaatttcattttctggaaatttaacatgtttagttaagtactaaagtatatattatgtaagtaaaatatctatatctaaagtatatattatgtaaataaaatacttatatctaatattatgtaagtaaaatatttatatctaaagtatataaaataaaattttatatctaaagtatataaataaaatacttatattaacatatatatattataaaagattaaccaagatatctttatatttacattatgtgcaaaatatataaccaaaaaatatctttctatgtaataaaaata

SEQ ID NO: 37965 - DNA, 1740 bp, Arabidopsis thaliana landsberg
  unsure (1)..(1740): unsure at all n locations
aacattaaactggttgaattgtaagcaagcctacctagcattctcaagtaactgatcaaagcaagcctctcaaatttataatctgcacattaacagaaacaatttgatctgcttctgacagatcatcagttagctgtgcattctcagattcaggttcttctggtttccgttttgactcaaaagcttgaatcagttttgatactgctggcgtggcacctttatggctaaatttactcactgaagaatcggtcaggatctgcttaattgcctcttcaaggttatgaaccattttctcccccttctccagattcttcatcaaggcagaaaactcagaagtatattccctaacctcttccaaatttgtatattgcgtattttcaagaaaagatgcactctgtttactaaccccgatttccgaacttctaccaagtttctcagaaatttcctgattgatcaaccctgacacatctgcgctaccattgtctaccaatcttgctttttctaccatgatgctgctagttaaagatgtattttacttcagccaatttagcaaggcgcggtaaaattctcagaactccgcttctagatgagtccgctcttgtactacagttgacatgtgctcttgaacagtaagaagttcctgtgtaagtttatcattttcctcaaccaaatgttccttttccccttgaaacttcaagagcttattatttaacaaagtatatccctcctttagattggaatactcggataataaataagtctccgagatcagatgtgcactcagttctagatgtgctttctcattttcttctctgagatgtatgccgttctcttcaaacatagcctgctggcgtgtcagtaaagaaagcgtctccttcatgtttgagttttccacctcttgcagggagaccacggtcttacaattcgccaattcttcctgtaacttttcggcctcacccaataaactatatttttcctccacaagatgtatcttctcatctgttaatggaccaatagtgttttcaaattgctcaacttctgcctttagtatggccgccaggttcttgcaattgcataactcacatgaaagatgcttaatctcatagttcttggattctttttctttaaaaaggccctttctctcatcattgatggaagatataaccgcaaccaacggatcattctctacctgaagattaatgaatttttcttttgtctgagatagatccaacagggacttttctaggctaagctgcaactcattcatctnnnnnnnnnnnnnnnnnnnnnnnnnnnctgtagcaagaagctgattttcaaggttcgtgtttgagcttgtagcagcatagagtttagactggcactctgatagttcctccgcaagagaatcatttctctctgtcaccgcactatatgatgcacgaagctgtgatatttcagctacaaattggttatgttgatgatcaaactctatttgtagatgagactgttctgtgagttgcacatggagtatatcttccatggtactcgaaacaaacagttcttctcttagacgctccaacgaacttgttcctggctcagtactagaagcagcctctcttgcgttgcacaaaatttgatattcatcttggccaagtccttttacaatatccataagctgtaagaagctgactgagcggccttcatgaacatgagcagaggtaagttctgcagataaattcaatgtgtcaattttacgag

SEQ ID NO: 37966 - DNA, 1750 bp, Arabidopsis thaliana landsberg
  unsure (1)..(1750): unsure at all n locations
tcttatgcaatcctccgacaggaccgctgactccagaagttgccgtcgggatcttcgccgttgatccaatcagacggtcaagcttgtcgaagaacacccatctgctacggccaccgccgttagcgattctcaccttctcttgtttatacttcttcttcaccgtatcgatcctattcttacactgtatatcagttttgggaattttaccgtaatcctctctgctgctcacaatctcagccacctctttccagtgcttctgcttcagattccctctgctaagctccaagtatctctcaccccacgcatcaatcaacacagccgtagctgcttcgctccaacaatcctccctcccgccgccgccggttggtctcccactgctgttattccctccaccgctggcctgaatcggaagcagcgccagagccaacgcatccggatccttctgcgacgaattacccggaggagtcagagaataagaaggcggacctgccgaagccaccgtaaccgtgattcgtcccgccggcggcgaggaaggcggatcaggtgaatcggaaccctgagatcgaatgtcttcatcgtcctccatggaattcgatatcgccggatctgagtcagaagctcgtgaaagagggagatagggttagggtttgggttaatattctgttcgggaggggtcaacgggaaggagacggcgtcggtgagtagaggggacacgtggaaggacgtgagaagatacgggtagatgacgtggaatgacgtgattggtaggtcagaggtaagattccgtcaccggtaaagttgccggctcggtttaggggtaaaagatgggtttgtatcgtaatttccccatttcttcgtaatccgatgaggaagtgtattgacgaaaaagcccatctagttttactataattactggaactatccccgtgaaccctttttccggtgatgtaccgaaattacccttagcctaaccgtcagtttcaatatcggtccgtagactttttttagtccgtcgatagtttccagttgtcttccttcgttgtcttgcttcattcgttaaatcgattcgaattagtctctcttttaacaataagaacggtgacgtggatgttatttactttgggcatgggtttttattgggctttccatacgctacgttagcatgttatcacttagtatcattttttcttttcaccattgtcaaagatacaactttaaacattccagaaatactatatgtttcaaaaagaccttatataatcttcgtgaattgtgaaacaaacagaaatttaatatttctcaaatctcaaaacaccaaaagcgaccattatgttatgtacacgcaaatatatatatacaaagaaaagtagtttgggatacttcttcttctcgtagaaataccttgtaatatttttcaacggtccaatgcgtttagcacaatcctgcagtattaccggacgttaattagatatggtggtactaatgaaagcgataatgcgttggataaaatgaagtatagtttgagaggaaagaaaagagagggagatcaaaccaatcgcaagcattgagacttgtagcatgtgtttcacttggtgtccagctgcatcaaatgattttggtaacattaatttcaaatccatatcgctcaagctataatgattatggatgcaaaatanaagatagataataaaacagcttatatgctatgacatatgacacttgcaagcnttatttcatgataatgggttta

SEQ ID NO: 37967 - DNA, 2279 bp, Arabidopsis thaliana landsberg
ttttttttttagaagaagaagaaggggctggcgaaagggttgggatctgttttcgagagaagtaaagctagaacagtctacaaaatgtaagagaagtctgaaaagttttgagttaatcaagcaagattcgttgaaactagcttggtcggtgaacgaacagagtccacgtggaaactatctgaacgagattgatcgtgatcggataatcttcttatttctcactgagattgcttcaataatagctcattttattttcccctataatcacataaatttgttccaaacaaacaaaaatacaaactcataatcaaattcttgtaaaaaccaatattaaacagcatagtttctggaaccgtgtaaggagatatgagataattgtctacaatataaatcatcttcataggaacatcggttgtttctagagcctctttgagtacttaataaggttaacaccaaaagcggcgcagaacacctttgatgccccttgaagcctgatgctttgggttaatgccctcaaactctttctcggttcgttctttgcctccgggattgtgagccaacataatgcaatcgacatggactacttgtttggttgagaggcttgagtctggtgtctctggaagtatacactctgctaatatcacttttccatcctctggaagtgactcgtagcagttcttcaagaatttcacgcaatgttcgtcactccagtcatgacatatccactgttacaacaatgagaaaatgtttgagatacattccttgatgaattacgtataatgtcaagaattttcttaattagtcttgaatttggtctaaaatacttgattaattactaaccttcatgaatatggcatcacctttagggacacttacaaacatatctcctccaacatgctcaatacctacattaatttagtcataagatgacataatcttccaaggaaatctcattttgcgaaatgttaggaaaatgttaatataccaggatgagaaggagcatcttcgatgacatgtgggagatcaaagttgatgcctttaagattagggtacttggagacaatcattttgagtgtagcaccaatgccaccaccaacatcaaccaaagaagtcaatccttcaaaacccttataggtctcaagaatcttcttcatggtgattgtggaatggttagacattccattgttaaagaccttgttgaatctagggtcagtcccgtggtactcgaacgcgctcattccataagccttgttgaatggaatcccaccatcaagaattgcatccttcaaatggtacctaaaacatgactctttggcattagtttaagaaaacacatatacactcttttagcttaacttaaaccctcaactttcttttgttttttcaaattcgataccatcaacttttgattaccactaactataataaagtttttgaattcgaccacaagattgaactacatccacggcaagttgattgtatagtttgataaagagcagccggtttgcatagagaaccagccggttcgattgaagaaaaccaaaaccagatttgaagttttctagatcatgaaaagaacaattctcttcctaatcatgttgctattctatctccttattttggtactcaataataggaagaacgattacagcttctctatttaaagccatgaactaaaacatagaaacaaagagtgttttttctgcaaaaaaaatagagtgtttcttttgattggaccaactaacataaatgtttctgaagtttctccttattatttgtataatcttggcacaacaacaaaattcatttaagtagctcgttataaccactaactaaaagaattgcatataatatagttttctagtggagagagcaggtttagactatacgtgtcgtattgtctgtatttgtctgattgtctttgacactttgtgcctctctctcacctttacctttgcacaatttcatttttaatccattaaccaagatccataacttatgaaacaacattatcaaaaaagaatttgtcttgtctagcttgatttaccataacgatctataaaagtcagaactcatacgagtaatatgaagaaaactcaccagctttccatgagaaccttgtcttggttcataagacaaagagcagcaatggaaacaccatcttcgttcttggtcaaatacttgcaaaccggaccaagcccgtacacccgttcaacgccatcaccggaaagtttaaaattggagcaggttaagacggagtaagacgtaagaagacggag

SEQ ID NO: 37968 - DNA, 4558 bp, Arabidopsis thaliana landsberg
aaagacgctccaacaaatacaactaatttgtttttgaataattctggattgctttttttcctcgttttcatcaactccaaagctgcatcaacatgctaaacacaacaaaaataaaaattatcatattagaaaacccctttaaaaacgattgtaaaaaatgcaaaccctttttgaaataccttgtaaatcattctacgccacatacttatgctttttaacgattgtaaatcaagttaaacacttttaaaagcttttaaaatcccttgtaaatcattctatgccactaagttctgcttctaaaacgattgttaatcaattaaaccctttttaatagcttttaaaatcccttgtaaatcaatccttaccactttctaatccgttaaaaacgattgcaagtcatgtaaatcctttttaaaataccttgtaaatcattctttaccactttctaatcttttaaaattgtttataaaccatgtaaccctttttaaaatccctttgtaaataacttaatgatgctttaaaaactatatataattcatgggttaccaattttacaaggatttttagacataccgttgctgttattgctttccctggcgtctctaggattgtaaaccactttgtatctacaatatttcccgcgattgatagtggcctacaacaacaaaacagtcaacaatgatgcttcttccattattaaaaaaaactcactatcttactaacaaaactcacttgtttttccttgacttcttccattcagccaatttctcaagtcttgtggcatcaactttcgcaaatggatgcaaaattggatgcttcttcttctcagctgtgaaatgtgcttgggtatgaatggaaggaaccgtaccccgcttactctttctttgcggagcgggctgaaaatcatcattgtcgccatcattatcagcgttatcaccatcattgccaataattttccttttcttactctgtgcctatcaaaaagaataaaaaaaacagatgtttaaaataccttataaacaaaattttcaaaatcataataaattagatactaacctctttccttgttggaacatcaacatcagcactatcaacttgtttctgcctctttctcggcacctagaatagtaaaaaacaccaattaaaagtatttttaaaatcccttgtaaatatcataacaagacaattgacaaattttaaaaacagtactgttgcaaatactaacctgttttcttgttttaagattatcctcagcatgaacacttggtttaactctcttgttctgaagttgcatgaaagataaacttttaaagatttgaaaaaaatattataaacacttggttagataatacaaatttttttaaatgctaacctcatttcttcctctgctaactctcttcttatccttttgaacatccagactttcttcagacaaaatattgaaatttggtgtagaggatcgtggagtaggagacttatccttgaaaagataacagaatgtaaaattataaaaaggatactaatcatttttgtaagacttttagagatataaattactgtacttttgatgattcttcagctaattcatcaccaacatcacgttgggtgttttcatcatcacccggatagctcccatactgtgtgtttggctctcggattgaatcttcaaatgattcattgtcattttgtaacaaaaataaaaacaataagtcaatcattaatataattagtagacctttaaaatagcttgtaaagattttcaattacctctgcttttctttctagtcctccttcttcttcagcctgcgaaaaaaaagagtacattgtaaaggtttactacgtatttaacctttaaaatacattgtaaaacatttcctttcaaatagcttttaaagaaacatttacaattacctctggttgtctttctactccttcatcttcttgttttctttcttcatcttcctcagatctctgattattcttttcctccattctaatgtccaaaatcctctcaatcagctcgactctcttgttaagatcttcaaggattgtcaaaatcctgtcaagcttctcgctatcagatattttgttattaattttgttttgacctacttcttcaagggcagcacaaacatcaacgcatcttgtattccattcagttttcttcaatctgtaggccatcttaacaagttccaaaaccttttggaattctatgtcgtctgtgtggaaatcaggaactaaagacttgaagtcttctgggtttccaataattgtattcacctcaatctgcgaagatacaataacattacaaatcttgagaaagcagaacttcaaatctcaaaaccatttaaagaattctgtaaatagacaaaagcttacctcagaaacatcatttacaaggtttacgatcttgaaaaactctggagtagtagtgcttttccacttcaatatcaatggatattcagattggaattcgttatctttaactccatatgctgcaccaaatgctggaactgcgctcaacacccatatggttagcgcgagtccaaattctctcagatcatatttctcttttgcccaagttttctcgttcattctcagaagtgaatttgatggaacattgaatgcttctttaccccacggttgggctatgtacatctcaaaatcgaaagcatgttgcaatcttaacaaaggtatcttctcttttacaaatggtgtgaatagaattccttaagtcaacaatactgcagcaagacacagcttttcttcatcttcaacagcaggttcaccttccttaggttttgaaaacaatcaatcttctagatcaccaagagtatatactccttcacttgcccaaaagtatggttcttttacagaatctttcccctttcgtcgaagttccctattaacaggttcacattgaattcctgtaagaacaaaagacaatgtagacactattattacatgtttatagtaaatactttagaaacgattgtaaatcatgtttaacactttaaaaagcttttaaaatcccttgtaaatcattcaatgccacttacttatgctttaaaacaattggaaaccatgcaaacacttttaaaatcccttgtaaatcattctatgacactaacttatgctttaaaaacgattataaatcatgttttacccttttataagcttttaaaatcccttgtaaatcattcaatgcttcttacttatgcttaaaaattcttgtaaatcttttaaaatcattgtaaaaggttttaaaatgtaaaacaaaggttttaaaatgggtttttaagtatttacatatatatttaaaaactttataaagattttaataggttttaagatgatttacaagggtttttaacaaatttacaaagcttttaaaacactttataaggatttttaaaagagtttttaaaaatttacacggttctttaaaaaagttttaaaaaatttacaaggatttttaaaagcatttttttggctgggaaaaaaatttttacgagaaaaaattttggcgggaaatttgtttttggcgggatttttttttttggcgggaaaaaaaggtttggaggtgttcttcaatgaataggggtgcttgatgaggcttgtattaaatggtagaagtccatggagaaatcgaagtgttcaaaatcggaggtgttcttcaatggaagctttactatggaaatgttttgtttcgttaaagatgaagaagaagaactttaagcatatataagtatctgtgtttgtatagaatgacagagaaatctttgcaggtagagtggtcaaatgacctttgatttttctcaaatgatagggggtcgaatcccaggtctgtcatttctttttaaagaaaaacgaaaacgacatcgtttagaatggttaacggaggtgttaacgggagttgaataatctattaacgactattttttttggcctggtcaacgaaatattcatggtttaaatggtggtcaacgataacatcatgtttaaaatgaccatatataaagttccgtgaagataacgtccaagttgatgaatgatttatattttcgccaaacagattttccatcaccaaaaagtaaggtgtcatttcgataggtttgcttgggtatatgtttctcaagactgtagacggagacatgtttggtaagagattttctgaatctcagctacaatgatgagaatcagagaatactcaacttgcgggacgaacatgtacagcttggagagaagttgcggctcttgaaaaggaatatatgcctcattgtgcatgatatctgggggagaaagatgcttggaattctcggacataggttttcttgtgtgttaagcaaaacctttcctctggtctatctgaaccaataagtataaacctgagagagaagaaagagaggaaataaagttctatttctatcaaaacgccatattcaacacaccaacgcatcaaaagctttctaccaatgaaaaacttctggtaattgaattaccgtaattccctacacaagtcacatgtgtagaagcaacaactcgatcagacaaagct

SEQ ID NO: 37969 - DNA, 5849 bp, Arabidopsis thaliana landsberg
caaaacgcgattcgtgaaattctaaaagatagtataactaagaaagtgtaatctattcaaaataatttttaatttctaacgcttacaaataaaatatagtagattgttgagtcatctttataagaaacatgaaaacataagatgattgttgtgaataataatagacaaagaaatcaaatcaagcttttggaaaaggtgaatatgtatttactgtaaagcttgattaataaaacaatgaaatacgactaagaaaggtgtcggacaaagagagtgtctttggtttttgattcgatagatcttttacctaattcaaaattaacttagtggcaaagcctccattgttgggtttttcttattttattgttacatacttttgttttcttttttgggagaattactgtaatagaatacaaattaagtgttattatcagaacagacagaacttttttttatttctattatattttcgtcctttttttattacccagcgtgtccttactaaacgttaccggaaaaaacgtaattataaggaatgccactgccacgtcagaaattgctgacgtggattaaatgaactcagccgtaacgcgatacagcggcagtcacgactgagttacggtatgttgcggctgacttacgacaaaaatatatgagtcataccaaaacgacgaagtatgagtataactcagccagacgttacggctgatatataaaatgttgtctgagttatatgataactcaggcaacggtatgactgagttaaggaatgttgtccgagttataagaacttatagcataacccagacaatgttatggctgagttatgagaaaacggctgacttatttcctcgacacggctgagttatgtttttggacggcttagttatgggatgatgtgacggctgagttatgatcgagtgttataaatcagccgtaaagagcatgattactaaataactcagccttgtgacgactgacttatgtgcaaaagattaattactataatatcatgcagttatggccgagttgtttaactttacggttgagttagttgagttacgacataccacggctgaattaactttgttttttttcctgttttaattactgtaatagtattcatgttatgactgacttaaagatttgcttcatggctgtattatgaactgttcgtttggtggctgacttgccacgtcatcacttcaaaacggcgtcggctgtaataatccatgtcatcattccatgtcagcatcctcgacggaaatacgaaaagtcccttgcttctttaaatcgttttcccagactgtgtccaccgcctgaacgttacaacatcaccggaactttcttttcttcattcatcttctcatacatcttcaatttctttcatctttctcttgatatggctggtcccgctacggtcatagttgttttcggttcatgggtaaagaaacagagattcgtatttaaccccgacgaaagagggtgtagagttgtgcagctagaagcggaaagagcagtttacgatagtcttttgaagacggtgatcgatgattacggagtgaatcagtcgacccatcagttacggctgagttacatgttctccaacaagactctgaaaactatgcccttcgatactccaccagtttatatctccaatgatcgacagttgcaatgttatctaggtttgacgaaattcgagcagctacgtctctgtgtggagtttatggtgaaagattcaagtgatattagtcagaaggacggatcaagaggaaggggttcgaaacgccctattgaatctgactcaagagcagaatctagattcgaagttccgggtcgggggtttgaaggtgtctgttacgattatcaagacgatgaagcaggggacgatgaagcaggggacgatgaatcaggtgtcgatgaagcatctgacaaagaagcaagtgacgaagaagcagatgatgaattttctagccggtttgattttttcgacgactccgatggtgcctcatatgatgatgaagactttgctgtatacggcgagcctaataataatgacgaagattcaccaaaaccttctccttcgaagagaactcagaccatggaattgatcggatctgctgggagcctgactgatttaaagttggagttgtctacgctaacactcgcggtaggccaacaataccgtagcaaattcaagttggagtatcgactcaaacttcttgcgataagggatggatttaattttgatgtaccaacttctaataagactacaatatcttacgagtgcttgtggatatatgtctttggagggttcgtgcatctagacaaggaaatgatcctaattttcatgtttatatatacgattcggaacacacatgttttgtaacggaatgttttggtcgatcccgacaagcaacacctgatgttctgggagttctttacagggactatcttggtgacgttggtccggatgttaaaccaaaatcagtcggaataatcatcactaagcattttcgagtaaaggtaattacaatgtttcggctgacttactatttatctgttggctgacttatagatattttacggttgacttattgatatagtatggctgacatataattacattccggttgagttatgactttaaaggctgacttaagatcacttggtggctgagttgtggtatagtttgactgcgttgtaaatatattatggttgacttatctattaatatgtttgtgttaacagatgggttattggaagtcatacaagacgctgaggtttgcaagggagctcactctgggaacccctaacagtagttttgaagaactaccttcttacctatacatgatacgacggacaaatctgggtacagtcgcgtgtcttcaaattgatgagagtggaagattcaactatatgttcattgcttttggtgccaatatcgctgggattcattacatgcgcaaagttgttgatgtcgacggtacgtttctccatggtagttacaaagggacgctcctgatagccatagctcacgatggtaattttcagatttttccgttagctttcggtgtagttgacactgaaaatgatgaatcttggcgttggttttttacgcaactcaaagttgttattcatgacgcaacggacctggcgataatctcggacagacatcagtcaatagggaaaacaattggtgaagtgtatccgttggctgctcgtgggatttgtacttaccatttgtataagaacattttgctaaaattcaaaggaaaacatttgttctctctggtgaaaaaagcggcaaggtgttataggcggactgattttgatgacgcgttcaacgagattgaagagcgtgatcctcaactacatgcatacctcgaaagagctggtgttgaaatgtgggcgcgtgttcattttcccagtgatatatacaatttaatgactatgaatatagcagaatcaatgaaaagagcactgtcaaaagccagaaatcttcccatagcttgactgttagaagcgataagacagatgatgacaagatggtttgttgaacggagagttgatgcgagcacgcagcatactcagctcacacgtagtgttgataaactgttacatataactcagctataactagtgcataactcagtcctcaaataatgataaactggtcataatgagaataactcagccataacgtattttttttttttcatctcactaataggaacgtgtcacaacgtcaagacttatggatgtacaaacgattgatgctttccgcgtacaagtaacttatggaacatctttgcatgttgtaaatgtggatgcaaaaaaatgcacattccatcttttcgagaaagaaaaattaccatgcatccattcaatcgcagctgcagagcatatgggtgtgtctcgtatatcccagtgcagtgcttactatacgagcaattattttgtcaatgcgtacgctggtgcaatcatgccttcagatacaaaagtccatgtccctctaattgtaattgaccaaccgtgcttgcctccaattgttgtgaaccagccaggcaggcccaagaaactaagtatgaaatcagcactagaagtcgctgttgagaataaacgtcctaggaaggaacacggatgttctcgatgaatagaagttgggcacaatgttaaaacttgtcgtgcatagtattgtttgcacgaattgtatgtgttgtgtcttctttcccttgtttggtaaccgctatatgtattcgtgacattgtagactctaagcaccgtaatatttgcaatttctttaacgtcccagctgagttatttgcaataatgtcttgtcgttttacatgttgcggctgagttatttaaatatggaagtcaaaatgttcggtcattttacatgttacggctgagttatataaatagggaagtcaaaaggtttggtcattttacatgttacggctgagttatataaatagggaagttgaaaggttcggtcattttacatgttacggctgagttatgtggttttacgactaactgagttatgtggttttacttttgagttatatctaaccaatgttacttacgactgagctatgtgggtggctcaacgactaagttatatctaaattatgttactttacgactgagttatgtgggtttacggttgagttatatctgaattatgttactaagcggctgagttattctattatacggttgagttatgatatatctcgaaaatgaacattttgaaggcaaagacaatatgaaattcccataaatatttgtttgaaggatacaaaggaggaaaataaaagtaaacaatattttacttgaagcatcatgacccgattccttccatcttgcattaatcgaggaccatttttatctcttgcatttcttcgatattgggttcgacagtcacatctgatatggtcgaataattttggatcttcacgtgtttggggccagtatgatacctaacgatcttccaccaagtgagtgcaataacaataatgtcattgcgaaaagatcgaaacctgctatccaagtcaaccgccatttggccaactgataacactatattttactcattttaggtgtgtgtttatcatcatttagctttgcattttctcattgtatcatatcattttgcaccattttgtcttattttgcacacttaggcatttaggataatcttgcatacgcattgcatggtgtgttttcaggtgcagaaggagcttaaatggactctactcgaccctctactctatccaaccaggagggaagcagtagagcattctactcaatcctctactcgacccatttactcgaccaagggtgaccaactctacaagacttgttgatctatcaaagcgactttggatcctcctcattccccactcaaccagacatctgagcatacagataggagaggaagaagcatctactcgaccaattgatcactcggagcatacacacaaaggcgtagactttgcagcaccctccttactcgatccccaaaatcgagcacttgctcaaaccgcctcaagtctcttgtcttctagtgaatctagggttttcaacatttcactataaatagatcactatgggatttttccaaaggatttaccttttatcctttagttttgtttatgttcttgaatcttcaaaacttaattactcttaatctatttcgtttttgcacttagttctttaagtaaagttgttaagcttgtttagatctacattttgttatgatttcagtcatttgttgggttttgggttctagttatgccgcttgagcggcgatgggcgttcttgaggatggattcacatcaggg

SEQ ID NO: 37970 - DNA, 5626 bp, Arabidopsis thaliana landsberg
ccccgcattctattggggtgctcaccggatttgagtcatttatttttaacttgttaagtacctccttagcgtggcctggttgagatggagattccattatcttcttttttttacttcaattgcaaactagtaagacatcaatccaatatccgtatctcatactcatctctttcttgaattcttcgaacatgctctagttattaatagtgatatcaagtcatctacatataagcatgcgataaatttatcatattttggaactcggtatagaatgcatgctcatatgaacactttatgtagtatttctccttgaagtacttctcaatttgagtatttcaagctcttgaaacttatttgataaagcgccttcgctggcctcaagactttgtcttcatctcctttgaatatgttgccttgtggttgttcaatgtaaacttcttcttcaaggtctccatttaataaaggcgacttgacatcatctgatgtatctaccacttgttttgatacgcttatgaaatattagtctaatcgtttcaagaagagcagcgttagcaaatacctcgtcataatcgatttcaactctttggctataaacttttgccaacaatcatgttttgttttgcttcacttcttttttagaattttcttttgctttgtacatccactttaagccgattgccttgtgcccatggagaagtgaacttaacttcatctagatttagaaaggtattatatatatatataatatgtacacattataggataagtttaactgcaattaataattttgttatctttgttcacgtagaggcacaaatttacaacaacaaaaaaaaaaaaactcaattaatcaatattatttttctcaattttaaaactacatatattaaacgggacaaatagatagcatttttcttagatttttttcaaacccaaaataattagaagcaagcaatagcgcttcaaacgagcaaaataccaaaacacaaaagactatatacattttacagttttagtatttactaataataaaaatatcaaaacgttattaaattattatttcaatttttgtattctttttcttatgtgtattttatacaatttatgttcctaagaatgatgttttggatttttcttacaaaattaagatttttttttttagttttctattaattttttgttaattgaataataaaaataagaataatattgatctaaaatattaatatttgtgaaaaaaataaaactcaaaatatcaaacttcattaaaacagagaatattatttttaattattcttatgttgcttatcgaaattaaattatgctaaaacagttatagtgctgtatacaatcaaacagaataataatttagggttatattaattcatatgcttagaagattggtaaattaaggaactatgcataaaaactcagaaataaaatctcactcctctgcgacaaacgattctgccgaaattacccctaccaaatcaaaatagcgtagcctctgataacactttagagagtaaacgcggctgcatttaatgcccaaaatataaccgaagattttctcagctaaccttggaaacaaaaaatatattcatcatcatgtcggatatttatggggttgcgagatatcacttatacacgttggtgtatttattagcagtatactctcttccttgcatcaaaaaaaaaactatcagactaaagaccttagtctccgacaaaattaatgcgaaaggagctaaacacccagagaattcgagactgaaaggtaaaagtaaaatctctgagtcatacgtatattattgttaagttccgtaagagtgatttttactttagggtttcatataaattgaaacaaacggatactaacaagtttgttactgcggatattggccaagcaggtgtaaatggagttcgtggtcagactagtacctggggaatggaaaaaagatgagaacggctatttcaaaaacgtttcgcatgccgatggatttgcgttaggagtccgattgcgagagcaggatgggtttgctaaagttgttatggcggtaaaggaaaagttagcgctgggtgccgaagacgatatcgagttaacatatcaatggccacagtggatgatgggtcctgactggagacgcgctaacccgatcgatatattggacgataaggatatgacagtgtttatggcaatacgggcagatctagatgaagtgcatccacgggtgaagataatacgaggagggaatagtcgaaacgttaatagttatcggagtaacctggatataggcggtctgacttcggaagaaatttcggataagtactggaatagcgcggaaacaagagctgtttggggtaccgcgttaacaagaatgttgctgcgaaacatatcaggtgaaaaccaaaacctatgttgtttgctatattgtagtaaatttatctgttaatatataaatcggataactttgcttatatcagggttgatttacagatcatatacttagtccgataacttatttatttggtatcatatatcttatctaggtgacggtgatggactggcagccatgggaaaggacaacagcatgggcgtacagaagcccaatgaccaacgaaacgcttatggggggtttatcataagagacaacgtcgagattacagctgggacaagcggtgtgccactaatagacacacaaccagactccattccaatctctaaaggaaaagagaaagttactgatgatgatgagagagaacgagatcgtttgtttgagatgtggcgaactcaacaacaggaagaaatatggcgagagatgtgtgcaacacaaatgaccctaggagcaactcaaattgacgcaacaaacgtgggcgacactggtaaaactgctagagctcttaacttcggaagtggcgacatttccaagggcaatccacgttaggacttgcaactcactctagcaagagcataaacacaagaagtttgcacccaagtggtggcactgtcatcaagcaattcaacctttggaacgccaacctcgctttccacaagcgtatctttctctagcgatgacctaatggacgtcactgactcatccaacaacaacagctaatcgcgcataggttggttatctgatatttaatatgttatcgtcaacactaacataatactattaccattcgtttacggtttctgacttttgactgtaggtggcgaaacactgtcacacttttattctgaacctgatggcccactcattatggccccacagcccgtcggaataacggagaaaggaaaaggtatcatgatagacgaaggaataaccactaaggagataggtacgggttcagccaatacaagagtatcagaggtaatgaggaatgagttgatggtgaaagatacaccggttccgacggtgttgtacgatagagatgccccaccatattttgacgacccaggggaagaaggtaaagcatacctatatagcaattttgatataaaaaaaactagttagctctgtattatatatagctaatcatgttcgataagtaattgtttaactcgataactaaacatcttcgctaaaagtattaacagctatgttttctcttcctcgcagatgctcttcatcgtgccctaaaatatgctgataatgagggagatgatatctacattggtcggatttttaaaagcaaagaggactgcgccacgaaactagcaatccacgcaattcaccggaagttccatttcatctacacgaaatcaggaccgaacatcgtggcggttgtctgcgtcagcgacacatgtccatggcgggtttatgctactaagctgccagatagcgactggttcgaggtcaggagcaccacccaaacccatacatgtagcgtggatgcaagaggagacttccacaagcaggcgtcgacggtagttattggcaagttgatgcgtactaagtatattggagtaggacgggggcctcgcgccaatgagctgagaagaatgctacgccaagagttcagcctcaacgtttcctattggaaagcatggcgggcacgggaaattgccatggacaatgctttagggtcagccatgggaagttacgccctaatccaaccttacttcaagtgttttttagagacaaatccaaattctttggttgcaatggagaccgaaaaagataactctggcgttgagaggttcaaatacttgttctttgcgcttgatgcttgtgttcaagggtatgcttacatgaggaaagtcattgtaattgatgggactcacttacgaggacgatatggcggatacttagttgcagctagtgcacaagatgcaaatttccaggtcttccccattgcatttggaatagtaaacatcgagaacgatgaggcgtggaattggttcattataagctataccggatcatcctgagttggtgtttgtgtctgacagacactcctttatttatgccaacatctgcaaggtaatagagtaacataaactttaccacatacaaatgaacttaacggaaaatctttttatctgctaaattaaacagtaacgcctttggtcattgtgcagctttgctcaatgtcatctcatgttgcttgcatcgtccatctgaaaaggaacattgaggtttacttttaatctgatcacctaagtgccttggtatcaagtgcagcaagagctcatcgcctaagtgacttcaacatgatatttgctaaaatttaggctacacatggaccgtgcgctgaatacctagcaggtattggattcggacattggacgaggtcacattttgttgagaatagatataacttcatgacaagtaatattgcggaaccgctaaaaaaagtgctaaccatgacctgagattatccggtaatctcaatattagagtctatccgcacaactctcgtaacatggtttgcgcttcggaggcaagctgcccagcttgaggacaatatccttctgccaaaggtgcacgatattgtgatcaaaaattacgagaaggtaggaggatgtactgtaataaagattggggatgggctatatgaaattagggaaagaggaggtgcaacatttacggttaatctatgggagagaacatgtacatgtagggagtttcagctgctaacaatcctttgctctcatgccataggactccgagtggatacaatggttgggatccatcacaccacccctcagcttagattgtcttaccaagcactaatgataccggtaccggacacagagacgctgactccttcaccaaatgatattgagggtgggaaactggctccaccgtatgttcggcgaccgagaaaacgaagattattctcaataagtgagttcaaggtaacaatcgatagacaatattagataaatgataataatttctcataagctaacgctttaaggtgataataattttttatatttgtagcaaacttcaaggaaaagatgctcgcggtgcaagtcgttaggtcataacagggtaacctgcaatgggccaataacggtaatagataaattaacgatttataaataaataaattatggaatgtttaatgtagtctctttggaatgcaaggaccatagaagcaagggagaaagaac

SEQ ID NO: 37971 - DNA, 5428 bp, Arabidopsis thaliana landsberg
  unsure (1)..(5428): unsure at all n locations
gggtgaacgatgcatttcattataacgtggggtttggtgataactatcatcaagacggtactaatcagatatgtggaggaaccggtaaccattctaaaaaattctacgacttgttagaaggtgctgaaaatccattgtacgatggttgtcgtgaaggccagtctcaattatagttagcagctagagtcatgcagaacaaggcggatcataatatgagtgaaagatgtgtggattcggtatatcaaatgttgacagattttttaccagaaggaaaccaagctactgattcgcattacaagacagaaaaattgatgcgcaatttaggccttgcttattatacaattgatgtttgtattaacaattgtatgattttctggaaggaagacgaaaaggaagataaatatcggttttgtagtgctcaaagatggaagcctatggatgactaccgtcgaagaaccaaagtgccatatagttgtatgtggtatctacccattggtgaccgattgaagagaatgtatcagagccacaagactacagctgcaatgcgttggcatgccgaacaccaatcaaaagaagaagaaatgaatcatccttctgatgcggcgaagtggagatatttccaagagctacatcccatgtttgccgaagaaccccgtaacgtttatctcggattatgtaccgatggattcaatccatttggcatgtcgcgaaatcattctttgtggcatgtataatttaccaccgggtatgtgcatgaatacatagaacttgtttcttacaattctgagttctgggccaaatcacccccgaggtagtctcgatgtcttcctcctacttcttattgaggagctaaaagagttatggtctactggaatcgatgcatatgatgtgtctttaaatcaaaattttaatctaaaattagtgttgcttggacgataagcgactttccgtcgtacagcatgtcatcaggatggacaacccacggtaaactatcgtgtccaatttgcatggaaagtactaactctttttatctacctaatggaaggaagacgtgctggtttgattgtcaccaaagatttctttttcatggtcatccattacggaagaacaaaaaagacttccgaaaaggaaaagacgcttctaccaagtatccacctgagtctttaactggtgagcaaatttattatgagcggttgtctagtgtaaatccaccaagaaccaaggatgttggtggcaacggtcacgaaaagaagatgccaggctatgggaaggaacataactggcacaagaaaagcatattatgggagctttcatattggaaagacgtgaatctccgacattgtattgatgtgatgcatatagcgaagaattttttggataacataatgaatactcttatgagcatgaaggataacatcatgtaaagaatggatatagaacgattatgttctcggcctgacttacatattgatagtaagggaaaagctcaatttccttcttatacattgacaaatgaagccaaaagagtttattgcaatgtgtgaaacatgcaatcaaatttccagatggttattcgtctaatttgggtagttgtgttgatatggagaatgggaagttgtcaggtatgaagagtcacgattgccacgtttttatggagcggttacttccatttatctttgcaaaacttctcgaccggaacgttcaccttgcattatctggtaaaataagaatatataatttactctttataatatatatatatatatatatattaacctgagatgatgcaatttatattaacctaagatgatgcaatttctatttttttacaggggttggcgtattttttagggacttatgttcgagaactatgcagaaaagtcgcgttcaaattcttaagcttaacattattttgatcatatgccccttagagaagatctttccgccatcattttttgatgttatggagcacatgcctatacatctcccctacgaagcagaaatgggcggtcctgtccaatataggtggatgtatccttttgcgaggtctttcaaaaagttgaaaggaaaagcaaaaaataaaagatatgcggccgaatcaattgttgagtcatatatcaatgacgagatttcttatttctcagagcactactttgccgataatatacaaacaaaatcaaggtacgtaactaatactaattaattaaacatctgcaccaagcaagttttttatgcgcaaaaataaccatgaattacctcttttggatcaggttaacaagattcaatgagggtgaagttcctgtatatcatgttcctggattacctaatatatttagttctgttggtcattcaagtggagaaatacgtgaaatggctatcacaggaagactatcaatgcgcacaaggatatgttatacggaattgtgattattttcaagtaattgagaggtatataacaaagtcatactcccattttaatttatatatataattgtttgtttactaacccttatatgttgtttttttctttatatagtatgttcgaagattttctttctattaaatatccatgattgaacgtaaaagaactcttcgtgaaaagaaacgaggaatatcatgtgtgggtgaaagattatgtatgtctaaatagttataaaatatatatgattagcatttatttattattcttcatatctataatgatgtttatttctaaatttgcatacaggttacatattggaacacgagtaatccattttcatcttgggttcaagagatagtacatggatctttgcacaaagtcaaaacctggccaatgtattttacaaaaggctatttgtttcatacgcagggtcatggaactggacgtaagacttgtaactatggtgtatgtgtgaaaggtgaaaattttgcggatgcatctgacgccgcagatttttacgaaaacttaaatgatatcatggaacttgaatatgagggggtggtcagtttgaaaataacactttttaaatgttcgtggtatgaccctaagcttagaagaggcactcggaggagcaatagtggtgttgtcgatgttctttcatcgagaagatacaacaaatacgagccatttattttaggtacatacactatatatatatggtcatttagtttttcttgatcatatacaattatgtaattatccaaacatggtgcatttacaaacaacatctcaagcggaacaagtctgttttataccttatctatacacgaagaaatcaaagcggaagtggctcaacgttttaaaagtaaatccaaggggaaacatattagaagaatatgaaaagaaagacgagactctattgcaaacagaaaatgatgatgctgttttaatgactacaatagaagatcttgtactcgacaatttgacagaagattgatacccaataaatcttgattacgatgtcagagacaccgatccaaaagatcgattcctatgtaatttatcgtcttctgatgatgacgaacaagaagacgtagaacagtattagttttgtgtttatgatatgtacttaagttatttctattaattttgatatgtacttaagttattttcaaaagttatgcaaacaattttaaattattttgaaaaactatattgactaagtatgttatgtttaattatatttatatatataattactatttctgaatatttaaggcccaaaaaaacacaaggtccaaatccaattattaaaaattaaacaaagtgactaattcctgacattttagcgactataaccattctattgggccaaaataactcgaggctcaaataaggcgacttattgctgacattttagcgagtataacaatattattgggccaaaattttcgaggcccaaaattggtgactactttgtgataatttaccgactaatattcnnnnnnnnnnnnnnnnnnnnnnnnnnnnnnnnnnnnnnnnnaccattcacttgttctgcgaaaaccctaacaaatctctttctctcttcgaaacatccgcagtcttcttcttcaatttctctcttcgatttcctcttcgaaaccctaccaaatcgaagattcctcttcgttttcctcctaaatctcttcttcttcttcgatttcttcgatttgaacctctgtctcatctagatctctccttcacacgatgtttgggcgaggaaaaaagaagcgaaccagtcctaaccttgctcagagagcctccacatccacggctggtcgacgacctcgttctcttccgtctcagtacgatttcacgccggcagcagaacggtctcctcagctacagacgcctgtaacagaagccaccgttcctcctttacagtcaacagcagctcatgtttggaactatccaccgcctctacagttgttccagcactctgcagtcgacaacctgaagtgcaaaggactgcctccgtagaagtgcagaacaatccagcgactcaagccgcgactactcagcaggttcctccgactcctcaacaagaccctccgccttgggagcaatttctctacgccttttccagttcaagagtctcgggctcacagccacccatcctttcaaggcaacaacttcgaagaatatccacctctgtcgccggatctctaggaggacacactttaatcactaaatgatctacttatgttgccgaagagggataagttcatcaccgtcctctctcccattcctcgactgaatacgacatggtatgatcttcttcttctcttgtttgtgatcccatgttgtgttcaatgtcggtttagctgagtaatgagctttgtgagattgattcgattgagaaaatgtctgaattgtttctttgctgtgtctcgtgttgtgttggtctgaaagtctgaaagtctttgataatatagatgttacagatgcatctgacaatcgattctgttgtttgaagagtcttgttgtgttggtcttattttgttgtttgcgagaacaagtagtttaagttatgtgttttgttcttagagtttagttgggtaatgagctttgtgagattgattagattgagaaaatgtcacttttgtttattttttttgtctcgtgttgtgttggtctgaaagtctgaaagtctttgatattatagatgttactttgcagccacaatctattctgttgtttgaagagtcttgttgtgttggtcttatattgttgtttgcgagaacgagtagtttaagttgtgttttgatcttagggtttagttgggtaatgagctttgtgagattgattagattgagaaaatgtttgaattgtttctcgtttttgtctcgtgttgtgttggtctttggtctttgatatttagatgttactttgcagccacaatctattgcaatgtgtttgaagagtcgtgtcccgttcgtctctacttgttgtttgcgagaaata

SEQ ID NO: 37972 - DNA, 2276 bp, Arabidopsis thaliana landsberg
taacgaagaacaaattctgatatgcaaatctcaaatgatcattgacaattcaaagacaaagtactttcttctttactttacatactataaaacattgagtacaaatgagggaatccatcaaagcaaatctcacaatcacaccatttccaggttttctaaaaatcaaatctccatgaaattatgacacttttttcttcttttgtatagcagggaaatggtcatgccagtaaccaagaacataaaaagagtctaattcgcggtagtagaccaaatgaatgcttccaataagaaataaaagagaaggaaagggtatacacgagcggaacccgaaactgaccagtgatgatgatgatgatgatgaacacgataggagaactctgtagtagcttctacttcagaggatgagatttgaacttatcctacaaagcctatcggtttaatgtaagaagataaatggtctaactttcctctctcattttcctcttcgtgttttctgttatcatcatcatagcctgtttcttttgctttcaagcattgatccgactttaagagcagcgtgtgcttcgttctcttgtcctagagctgatagagctacagcttgaagataggatgcgatatgccaagccggagatatcacttgggcttgcattgcatcattcagcgcctcttggggcatctcattcattaggtaacacagacttcttcttgcataaacagtcggggaaaccattgtcccaccctcaatgaactgttgcaaacacattcttagattagaatttaccctttctctggaaacttaaaccccaaagacaaataaacaatggcagtagaaaagatctaacctgagaatagcagccgatggcatttgcaaattctttatgtcggaaagcaacatcacccttcttcttgaagttcagcgagtcctgcatctgattggtccacatctggaacgaaagctgaaatttttgcacagaaaaaagcaggcggaaaaagtaatcagattacaataagaaacaaggtagcccaatcccaaatacacaatgagacaattgtgagagtatggttaagaaagaaacctctgttgctgcaccctcgtcatctttatagctaagcttttcaagaatctcatgtatggcagttagatcaagtcgtgaacaagcgtcaccaagaggggtaagcgaagttgtttcctttggagaagcagctccatgtggaatccccattaaaacatgagacggaatctgaagaaaacaacagagatgtagaataagacgaggagctagaatacttgaatggttgatacatgaaaggaaggtgatttagtgagtgcatacatcagtttctttctgaagaggagcgagtgaggacacgagagatttcacatttggcctttcacgagcttcatactgcaaacaacgggaagctaaacgaaccaaatcggttccatcatcgtttgagaaatggccatctagacacgagtccatcagcatcaggaaattcttcccacgaatcagatcaagcgcctgcagaacaatggtagagcatacagaactttatcaacattttctgggataaggagaagaagctaaaagatcaagaacttcctcccaagagaagttgagccatgtttggtgcacttacatggcttggtggtatgtgtttgccgctgagaagatctagcaacagcgttccgaagctgtagaccacactctccggaatcactctcccttaagagattaataaacgcacatccatatatcagatcaatatcataactttgtcaaacagcaaacacataacttgacgccattgcatctcaaatcagtaactgacctgttcttaggtattcaggaggtgtgaaagccaaatttgtactgtaactcttcccatccctactattcttcataagaccaaagcaagataatctcgggttaccatcctgtaatcaagttttccagaaaaacattagaagaatcccagaacagtaacttatacgaaaagtgaaacataaatccaatcaagagcaagaaagagataagagagttaatagtaagctcgagatggacctggtcaaacaagatcctgtaagcattaagatcgtggtacaaggcgcgacctttgctgctacaatactcaagtgcttgtgcaagatacaaagccactctcaacctcatagaccacttcattggctgactatcccctacatatccccacaaattattaagttccaccaaaaatttaaatttaaagtgttaatcttttgttcaacaagatag

SEQ ID NO: 37973 - DNA, 4030 bp, Arabidopsis thaliana landsberg
ccataacttagatttgcgaatgggcttccatctcccaaacgagtctaacatgtacaagtacggacaataacttattttcaatattttccaaaaaccccccaattatctatatatattctaattttggacaaaaactattcaaattagtcatttttttcaagctacatctttttccttctgacaatccaaaaatcacacaaaaaaaaagtagtcaaaaaactttttaactagtcacagagcaaggagagagagaacctttttttcctctataaaaagctgagccacttcctctgtttcccacaaagcagcttctgcaatctattcgttggttggttaatagaagctctctttctctgtctgtctttctctctcagagaaatggctcttcttctagtttgttcttcctcctcctatgccctcagagtcaccattttcttgtctttcttcttctttctctgcaatggcttctcttaccctactacttcttctcttttcaacacccatcaccatcgtcaccacttggccaagcacaactacaaagatgctctcactaaatcaatcctcttctttgaaggccaaaggtcagggaaacttccttctaaccagagaatgagttggagaagagactctggtctctctgatggctctgctcttcatgtaattcacctcaactcttcctcactctcttcttctctttttatgaaatatatgaaatgggtttggttggttaatgagagatctcaacaatgtaggttaagtgttgtatcaatatcgccaaaagattcaacctttttacataactctactgcatcaaaaaaaaaacagaggataaaattagggtttttgttttgtcccccttttttctacaatccctaattttaacaaaatgggcttgcttagaaagttatagatctcaagattctcaacaatgtaggttaaattctgtatcaatatcgtcaaaagatcaaatctttattagttgttttctttcccctctttccaaaaaaatctctaatttgtgtgttttgttgattaggtggatttggttggagggtactatgatgcaggagacaatatcaaatttggattcccaatggcattcacaaccacaatgctttcatggagtgtaattgaattcggtggactcatgaaatctgagttacaaaacgctaaaatagcgattcgttgggctactgattatctcctcaaagccacttcacaacctgacacaatctatgttcaagttggtgatgctaataaagaccattcttgttgggaaagacctgaagacatggatactgtaagaagtgtgtttaaagttgacaagaacactcctggttctgatgtcgccgctgaaaccgccgctgctctagccgccgccgccattgtattcagaaaatctgatccttcttactccaaagtcctcctcaaacgagccatcagtgtataacatttttttgtcatactttaataattttgtgacataaaaaatttcttcaactgattttttttttgtgtttttaaggtttttgcatttgcggacaaatacagaggaacttatagtgcaggattaaaacctgatgtttgtccattttattgctcttactctggttatcaggtaaataagtaaatgagttattatttacatataatgatcagattttggaaatttgtgaaatttataggaagatttgttattttatgatattttttggtacataggatgaattgttgtggggagctgcttggttacaaaaagcgacaaagaatttaaaatatttgaattacataaaaatcaatggacaaatccttggagctgctgaatatgataacacttttggttgggataacaagcacgctggtgccagaatccttcttacaaaggtaaaatctaaatttaaaaagttttgttatatcaagtccctaattaattttgttgtgtttttgtttgtgtgaaggcatttttggttcagaatgtgaagacacttcatgaatacaaaggtcatgctgataatttcatctgctctgttattcctggagctcctttctcttctactcagtatacaccaggttcttacatttttaatctttcactaattttcacttcatttacatgttatggtaattattttgtggagttttttacattatgaactttttctgttttggtgtttttttagataacctattttagagaagatatttatttgactgaataaatttgctctttatgaatattaaaacatttatatacatatgttatgtaggtggattattgtttaaaatggcagacgccaacatgcaatacgtgacgtcaacatcgttcttgctcttaacctatgccaaatacttaacctccgccaaaaccgtcgtccattgcggtggctccgtctacactcccggtcgtcttcgctccatcgccaaaagacaggtccagtgttaaaaatctctcaatctttagattttagattattttgttaaatataaaatttataacattttcgtaattcttttttgatatataggtggattatctacttggagacaacccattaagaatgtcttacatggttggttacggtccaaaattcccacggagaatccaccaccgtggctcctcattaccttgtgttgcaagccacccggccaagatccaatgccaccaagggtttgcaatcatgaactctcaatctccaaaccctaacttccttgttggtgcagtcgttggtggtcccgaccagcatgatcgcttcccagacgaacggtctgattacgagcagtccgagccggctacttacatcaattcaccactcgttggagctcttgcctacttcgctcacgcctatggtcaactctagtttagtaacgacgagtgtgttagtttaagtaaaaataaaaatgaaggaagttttttctttatttttacttttatttgttagtaatgtagtggaccgaaaatcggatcacaagaggacattggtccgagggatggtttatttggttcgttataatataacgtcaagtgtaatcttattgtggttattaatgttatcatcctattaattactatatccatgtcgttaatttttgatatgtttatatgatttttcatatttttgggagagtggatagaatctccagctgtttagcgttataatacacgagtgatgattttgggatttcttgattggttcccactttcttggagtgttgaaaaccttacaacattgtaaatatgttaataataggtaaaatactctttaacatttgtgtgttgatctcttaaaacaaacttacaaaaaaagtaggagaattgacatagaataaagcaaaataaatgatgtagcgtatagaagatttgcaacaatttaatttaacaagtcaagtggaatatcgagttccgggattattggtttcattaaacaatctcaccaagttgaaacatcgagattctaaaatgtagtattaacaaaggtgactatgagaataaaagtttcaactaaagaaatattattgtaatacgtctgacaaagattttaggtttcacataccttctcataaatatattctgtgtaaatgtattttatgacgagaaaatgtagaataaatttctttcaccggtcaagaaatttatatgaagagaataataaaacatagaaataaatagagaaaaaaaaagaaaaagaatgatgattgcataggaagaatcattttccacgacacgggaagcgagcaattgaccagagagagagagaagtgtcctttctggatttgattcattggtcaattaaagctgcttttgtcactcttctcttctgtcaggtttttatttttatttatatttttatacattatttcaatttcgctgttattattattattactcacgcatcaattgtgtatctcgatattcatcaataaatgtgaaaagaaatcttaaaaaaaaaattaagacccataatgtctcgttttcgctttatgttttagttaaatccagtcatatctttaaccagcatttttatattcacaa

SEQ ID NO: 37974 - DNA, 3091 bp, Arabidopsis thaliana landsberg
tgttctcttagcgcatacaatcaaactatgcaatcttgctaagtttcggtgatgactcattcagaaaaaacagattgggagaaaggaagtaagcgcatcaatttggcctagaagcatcagatctatcacgatcctccgattccttgccgagcagcatcccctattcagcccatccgtttaaccagccgattcatgccgagtatgaacatgcttatgcccgatgatggaaaacagattgtaacccgcccaaacaagtctatctcgacctattaactaatcaccctatcagaattaacattctgatggttgacgagtttccggccaacgaggttcctctgaaagccggggatctcttttaagtagtttcctctccaagacgccctagagagtttttagttttttccccgtgtttttctctatcccaaatcgcatccaagacccttctatttatagggattcgagtggtaactgttcccacccgaaaaggcaccttctggcccataaccgttcctgggtgacttttggtgaagaggggtaacagtttgaccgcctaaccgcccaaccgcacaaccgtccaaccgtccaactgtccaactgcctggccaaccgttggcccaacttcctcactcccttcctagcttggtcgagctggcggagctgactgacactccctcgagctggtcgagcttcccctcgagctggctgagctaaccttgagctggccgagcttctctataactggtcgagcttatattgagctgtagtaaagcccaattttggacttgcccgaggttccaccttctccctcggaccaagtctcatccgacgatcctatcgaggatcgcggacgctacaagtctccccccttgaataggattcgtcccagaatccgacccaagttcctttttacccatctctttgaaccactccgggaaatctgccctcatcttgttttcagtttcccaagtatcttcttctctatctccgcaatttcacacatctgttaccattttcacgattttcttccgagtccctttctccaatctatccacgattccaataggttttgctttcatcgtcaagtttccttctaattcggcgggaaaatcttccaccgggtaatctcgttcgcttaggcacttcttaagttgcgatacgtgaaaaaccttatgaaacgcctctaactttggtggtagatctagcttgtaggccactgccccaatccgttcgagcaccttgtatggccccacgtatcttggactaagctttttcctcttaaaaaagcgtttgttccctttgtaagtcaccgcctttagatacaccagatctcctactccaaattctaactctttccgacgtttatccgtataacttttatgtcggtcctgagcttccttttaacttgaccttaagaaacttcatcttttcattcgtctcgtccacaatccctggaccgaatcacattcgttcgcccatggacgtccaacataagggcgttgatatggtataaattacctagaactactctctcaaataagagatcaattgcagtattttatgctcgaagtcatggagttcttttgttcaaacactgagttaatactcgagattaagctagcagggtatgagtgaaaataaaagagaacaaagtgaaaaagacaacagattgattgtattgtaaacgatttaataaagagctaggaacagggtattctcatgaaactattggttagtagatctaatcaaagcaaggttgctatcgaaccattcttaaactcaaactctaattatggaataaccggtgggcgtgccgcgagactctgtatatctatagctactaataacctgagaaaccgagaaactatcaacctaaatatgcattcttaacgagttcaattgttcatcttagtagataggccgattcttattacacacctataaaccagactcatcaaataattgatccaactacagatacctatggcaggcatatctattgtctggattcaaaatctagttaattactcttgatctagcattaggcataattaaagatgaagaattttacagataacctaacaaagggggcaatatactacccatataaatccctaatgagaaaccctattcctaacaagcagactactcagacatattggatgaagcaaacaacatgattaagtgtgaaagcataaacgcagtaaatagagaaggggaaagaagggatctcgggaggggattaagatctgaatgaaactctgaaaacaatcgatgaatagcttatgtctctcagtaacatggttttgcaaaagcttgataaaagacttgataaaagaaacttaggtctaaaaacaatatatatagaccctaaaaacgtccacggactaataatgcaaatagtgaaatcttctagggcaaacttgagctcttgtaaactcgaaagcgtctagggtttttgctgggccgaaactggtgtcgatcgacaccaagagtgtgtcgatcgacactcctcgctaattccagaaccaaaatcgtccttatcttccttttccttagcttttgctccaaaatgtctccttatctccattgttgtcccattgcataaaatacctgaaaagaaactaaaaagactcgagaaataacaccaaaactcaaaatcctatacctaaaacatagataaaatcagtaaaaatcgggttatatcagtatacttgctacaaaacaaagtcaatatattaacacaagaaaacataatcacatcatcttgacacaacagccaaatacaaaacaaaacagttaagtcaataaattaacactagaaaacaagacatattgcacttaccgcaaacgtttcaaaccaacgagtgatcactggttgcggtgtcattgtccaattagcatgtggttctttgaaatctctttcaaagatgttgcggacagtgccagcaacagaagggtctttcgttaaacctaaaaaaaagattcaattggactaattagtataatcatctaaaaccaaaacacaataatagattgttatgctaaaccaaacaatacatctacacaactaaccctaaaaccagaatagaaa

SEQ ID NO: 37975 - DNA, 4183 bp, Arabidopsis thaliana landsberg
acagaaaataaaactgaagcaaaaactcaatgtcgaccggatgtttttggacagaaccctaagacatctatttatgcagaacgaaataaaatgatcgtagacgggccaataacctaatcgcccggcccatagagtgataatgggccgagatgggcttcgtgatccgatggagctccaagccgcttccaaacacttcttcttctcctcttttcttcattgtgctcagctttaccctttaccctttcttctaatcttagcacatagggtgttttacccttttctttgaatcacaatgcctaacttctttgaattccaaaccttttactagacttaacagttttgtatcccccttagaactctaaagtcttactctctttttttctttcttttctgtcattctcattctcattcccattcattccatacacattcccaatcccaaatacaagtctccacctagtcctagctaacccaaaaagcgtgggcgaggtctacatgaaagactgctcttgtcggctcattcctaacacgttataccaagctcaatcaaaaaagacctcacactcacacataaatgatctttggcttgaaataaggctaggctaagggtatgggaaactgctctaaaaatgagagacagctacttggattaacagagggtggtgaagtgaataagataatccaagtatgtatatggtagccatgagttcacaaacaatgcatagacatgataattgtaaattcagttacggttctaatagatagggaatggcatcagataagcgagtttcgaatcaaagtagtatagtcaagttacaaattcaaagcagggtgtagtcttacttcagagatacaatcggttatgcaacatagaactaacagggcattgaacttacttcattgaatcaaaacatgcttatcggtttgaaatcatcactatcccctatgcaaatgagcaatcctaaatgcaagcacactatatacaatcctaaaatgatatgcaatctacatgacactctgtttttgtgaaatcattttctgattttttttcaaatttaaatggtttttctatgccttagatgaatgcagactcaaaaatatatacaatgcaacacacacttcctgagccctcccccgaacttaaatcacacagtccactgtgcgaataaacttggaagagagtactcaagacaaatccaatcacagaaacaaaaaatgaagaaacaaatcacaacagatgatataatacaatggtgaagtgaggcgcttacctcagtcgaagaatgaacgtagttgctcgtcaatggctgcctgtgattgctcccaggccatagacgaaccaccttgttctgtatcagctctagcaggggggtactcgacctcatcaactctatggcggccagcaccgctctgaggaaactcgacctctctccttctgctgcggccagcaccgcggtcgcgttaactacgagacttcagaagtcgtccgctcctacactagatcgagtgggtgtggtcctcctcttcctccctgattcacgaggctcgaatgatgaatgcctcgtagggacatgcggaatctcctgctctcaaggctcaggcctgcgccgacttggctcgggcgcgtcatatctcctcgaaggcatgtcgtcagggaggtgtccctgcggaatagctgtagtggaagaggagcagctgagcttgttcttcataaacttgatagccctgaggcacttggcgagtaacttgtcctgtttcatgcaccacttctgcagcttgctgttgttcctgtgagcttcgcttaaactcctgctttccctcgcaggaggtatatgctcactgaaatgatacatgctcgtgtcaaactccgcctcatctatatcattcgtctcatcaatatcttctgttgtagctccttcggtatgactgatctcctcagttggcggacaaccctcgaaataaagttcttcaagcgcaggcttgaagtcaatgttcctgccctcgagaatcctagtagcgtcaatgcaggggagaagaatgttggcgattttaatcgatgaatgctcgaacctgtagcggtgaaagtcgccagccatgtcaaactccaaaaactcacatcggcgcaaatgatccaagtccatcatcctcggtgctaaccctggttccttgagcggtactccacaggcttgcagaattggcgtcacaacgccacccacgcatagtgctcctctcaccttcttctttccgttcgtcaacgcccacttcctgtatccacacagatggatcaacagaggcattactggtggtgcgttgttgagatcgccgctcaagacattctttcccttcgtccggcggagaatccctgtaagcgcataatctatcatctccatgtccgtgttagacacggtgcctgtagactccctggagtaaaagacgttggcaaccgatctctaaaagtagcggatcacaggactccagatttggttgctcttggaccgcgccgagtttagcggtagattgttccctatagtggcccataaatccttaagctcttctctgccaaatctgggttttgttccctttcaactagggaaaccaaatagttcttccaacttcttgatcgatagctgatatcgctgttcattcactgagaacgtcaagaagcctaaccccatggtatccagctcaaagtttgtgagtgcctcatacatctccacttgcagcgtggaaagaaactcgattgtctcccccttataggcagggtaagggtaagacatgagtgtctccagatgacacttctcgaacagatgctgtacgtcctccagtaaccccagctgggctaaagtctcataacacggatacctcgttctccagaagtcattcatctcaaagaacctgatatactccttcactttaacctcgtcgggtttgttcagcagcttcgtctccctgcgccatgactctggctcatactcagtctcgatatcctcatcaatcagctcatatctacttgacatcaccctctttcctctggcgatttcagctcttctctgattctctgttcactagaaaaatcttcaggaaatcctgcaatcttctgtaaacttgatgaactctttgtaacattccgtagcttctgttggtcgagtaaaatgatgatttaaaattttttacgtttttaaacatcactcaaacacgaccaatatactcgatctctaggacatcagtagagtaaaagttttgaattttaactctaccttcactttactcctttcttcctgagaaccacaaacacaaccaaaacaaatcaaaaataacaagaaagtaaaaattatttacaaggatagtcatggaacttcctcccaagtgagcttgttttaagtctctagcttgactcctcacacttatcaagaagaaaatgaactgtagagagggtcagcataatcctctccgataccatcatcatactcagcgtcctccctggagaggtctgcagcagaatactcaattcccctttcttcaaaataggcttccttctctttctggagggtaatctgcatcttgagaccatcttgaagtgaattcttttctcgcgatagtgttaatcccgcctttaggttgagcttccttctgcatctgattcagcttactcctaagttcctcaatggtgtgggctagcttctctatagtttcatcttgcttatcagatctctttctaagttctttcactctttcagtctcatatccttctcctgagatcggtctatcgtttccagaggtttttccatcttcggttgacccttgtggagttttgttgatgccaaactgcaacttgatatgctttccaaggttgagacttattttcccttccctgacatctatcacaactcccactgacgctaaaaagggtcttcccagtattaaggggtccttatgctctacttccatatccagcaccacgaagtctgtaggcacttctacgccattaatcatgactggtaggtctttcagcatgccgaacggttttctagaagacctatccgcaaggatcaaagtcaggtcacaaggtttatattgaatgaactctaaccttcttgctacagagagtggcatcaagctaacagaggctccgagatcgcacagacattcgctgaaagcaaatccccaatgaacatgtagagtg

SEQ ID NO: 37976 - DNA, 15021 bp, Arabidopsis thaliana landsberg
  unsure (1)..(15021): unsure at all n locations
gagaagatcaaaaccccagaaatagtcaaatcccgactaagtctgtacccgatcttagtcaagttccgactagatccaaatttcattgatatcggtccacctccgaatatatcaacctacttttccgtcatgtttaagttttgactacaaggataatatcttggtttccgatcgtgagttggataactatttccttttccaaacacatcgatccctcaacttccttatccgccaaactcttactatgacatcccgagcacctatccatcctaggatcaagcatgctctgataccaacttgtgagaccccgtcccggacgtctcggcgtccgggacgttgtactcaagttcgcgcctcttcccggccgaacctcttaatttttcgcgattcaacatagaattgcctttacgaggcttaattctataatcgctctcttattacacagcggaagtctttctaaccttggtttagttctaaccaactcttgtaccggtttcaccgtctttgtcccttagacttagatcgatcctttactcggtcaagacatgcatatgttcgctaaccattctaagccaaacaatcgcatattcctttatcctactttcacggtcagttaccaaacgtctatcttaactaataagctagatcgttacataccttggccaatatgcggatttgattccttagcccgtttatcgccttactccattcgttcaacgactcgtatcggatcgtgaattgataaaccaatccctatcgttacttagccatacaaccaaccaaccccactggtctaagtacaacaatagagattggggatcgtacgattcccttggttcacgatggccgaatcaagctcttggcctattggtccattcgttctccaaacgtacgcccctccggctacatggtggacgattgagccctcggcttatcgaaccatccatgtttccgttccggtcgtttaacactacgaccgcccacggtttactaactgtttacccgtccggtccatggtggttgataaagctttcggcttaatgatccatccatgcggtccgaacgatatccttatcacacccaagggtccgtggattcatccactggatcatcgtaggctagcccatgaaatctttcttccgtcggccttaggtttgctcgcgggtccaacatccgttttgtccatcggttcccaccgtggactttcccgttggttatccgtcgagtcaccctttggtcttaccgatctctgatcggtttcaccatggctgagcagatagatacatgaaggcggccgcgatgttgatcctatatggtgaatcacgttccttacccattcttggtgctttctccctttatcggtaagattgcatccatgggcgacccttgggtgtgttcggatgcacttatccttgtgcttcctcgaacacttttctcgatccatcccatccgacgatcggtctgtccgacccgttccgtcagacgatcggcctgtcccatccgacccgtccgacgatcggtctgtccgatccgtctggccgatccgatccgtctgacgatcggtctggccgatccgatccaacgatcggtctaccagatccgattcgtctctaagacgaacggtctaccctctccatcctctacactccatcgaaccgttggaccgggaggtagcatgcgcatcagttcggtcgagttatactcgccgagccgcaccccctttccgaccaacaactctaggatgtgttgggactcctttaagaatgttttatggtgtttggatgttgtgagatgatttgagattattgtgagattgtgagatgatgtgagatgccttgggcgtcctcccttatatagggggcgaatggatgcttcccgaagcatcacatccgttccttgcacccctccgaaaggtcccatccgttccttgcatcctttcgaaaggtcacatctgttccttgcatcctttgggcgatgcaaccgttcgttggtacccgctcgaccttacaccttttggccgagacacctcttcacccgtgagctacgaaagtccaccagctcgagtgtcagctgaccggaccacccagctaggtcagtacttgatcagctcaccgagctcagtcgagctgtcggtcagctgacctagctgagctagctagtcttccagctggtttagctcacatagcttacctagctagttcatacagcttgtccagctcacctagctggtttggcttatactttctcgttcttcctacttagtattttggtccgttcctcgaccatgatctagttttctcctaaaacaaacctgcctctttatgaacgcgggtcgcggtcgttacaagtgtacccccccttaaactgaattcgtcctcaaattcggcgggtgtaagatcttggttactccctaactcgggacacgggcgttacaagtctacccccttaaactgaattcgtcctcgaattcagcgggtttaagatcttgtttactccttaatctttagtctttccgagactttagatatcacatttgatcaaatctctatttccgagtttgatcaagtttcccgatctttgtctcttacgacactcgatcaaattcctgatcctggtcctctcccggactcgatcattatttcccgatctttgtcttttcctggacttgatcaatattttccgatctttgtcctttcttggacttgatcaacgttttccaatctttgtcctttcctggacttgatcaacgttttctgatctttgtctcttccgacattcgatcaaatttttgatcctggtcctttcccggactcgatcattatttcccgatctttgtcctttcctggacttgatcaatgttttccgatctttgtctcttccgacattcgatcaaatttctgatcctggtcctttctcggactcgatcatattctcgacttaagtctttttccgactttgtcaatatttccaaccttggtccccaaaggactcggtcaatatttccgacataggtctctttccgaccttgtcgtttttccatgatcttggtcaatttccgataagatcaaaaccccagaaatagtcaaatcccgactaagtctgtacccgatcttagtcaagttccgactagatccaaattccattgatatcggtccatctccgaatatatcaactcacttttccgtcatgtttaagttttgactacaaggataatatcttggttcgtgatcgtgagttgggtaactatttccgtttccaaacacatcgatccctcaacttccttatccgccaaaaccttactataacgttttctcgagcacctatccatcctaggatcaagcatgctctgataccaacttgtgagaccccgtcccggacgtctcggcgtccggcgacgttgtactcaagttcgcgcctcttcccggccgaacctcttaatttttcgcgattcaacatagaattgcctttacgaggctaaattctataatcgctctcttattacacagcggaagtctttctaaccttggtttaattctaaccaattcttgtaccggtttcatcgtctttgttccttagacttagatcgatcctttactcggtcaagacatgcatatgttcgctaaccattctaagccaaacaatcgcatattcctttatcctactttcacggtcaattaccaaacgtctatcttaactaataagctagatcgttacataccttggtcaatatgcggatttgattccttagcccgtttgtcgccttactccattcgttcaacgactcgtcatcggtcgtgaattgatgaaccaatccctatcgttacttagccatacaaccaaccaaccccactggtctaagtacaacgatagagattggggatcgtacgattcccttggttcacgatggccgaatcaagctcttggcttattggtccattcgttctccaaacgtacgcccctccggctacatggtggacgattgagccctcggcttatcgaaccatccatgtttccgttccggtcgtttaacactacgaccgcccacggtttactaaccgtttacccgtccggtccatggtggtcgataaagctttcggcttaatgatccatccatgcggtccgaacgatatccttatcacacccaagggtccgtggattcatccactggatcatcgtaggctagcccatgaaatctttcttccgtcggccttaggtttgctcgcgggtccaacatccgttttgtccatcggttcccaccgtggactttcctgttggttatccgtcgagtcaccctttggtcttaccgatctctaatcggtttcaccatggctgaagagatagatacatgaaggcggccacgatgttgatcctatatggtgaatcacgttccttacccattcttggtgctttctccctttatcggtaagattgcatccatgggcgacccttgggtgtgttcggatgcacttatccttgtgcttcctcgaacacttttctcgatccatcccatccgacgatcggtctgtccgacccgttccgtcagacgatcggcctgtcccatccgacccgtccgacgatcggtctgtccgatccgtctggccgatccgatccgtctgacgatcggtctggccgatccgatccaaggatcggtctaccagatccgattcgtctctaagacgaacggtctaccctctccatcctctacactccatcgaaccgttggaccgggaggtagcatgcgcatcagttcggtcgagttatactcgccgagccgcaccccctttccgaccaacaactctaggatgtgttgggactcctttaagaatgttttatggtgttttggatgttgtgagatgatgtgagattccttgggcgtcctcccttatatagggggcgaatggatgcttcctgaagcatcacatccgttctttgcacccctccgaaaggtcacatccgttccttgcatcctttcgaaaggtcacatctgttccttgcatcctttggacgatgcaaccgttcgttggtacccgctcgaccttacactttttggccgagacacctcttcacccgtgagctacgacagtccaccagctcgagtgtcagctgaccggaccacccagctgggtcagtacttgatcagctcactgagctcagtcgagctgtcggtcagctcacctagctgagctagctagtcttccagctagtttagctcacatagcttacctagctagttcatacagcttgtccagctcacctagctggtttagcttatactttctcgttcttcctacttagtattttggtccgttcctcgaccatgatctagttttctcctaaaacaaacctgcctctttatgaacgcgggacgcggtcgttacaagtctaccccccttaaactgaattcgtcctcgaattcggcgtgtgtaagatcttggttactccctaactcgggacacgggcgttacaagtctaccccccttaaactgaattcgtcctcgaattcagcgggtttaagatcttgtttactccttaatctttagtctttccgagactttagatatcacatttgatcaaatctctatttccgagtttgatcaagtttcccgatctttgtctcttacgacactcgatcaaattcctgatcctggtcctctcccggactcgatcattatttcccgatctttgtcttttcctggacttgatcaatattttccgatctttgtcctttcttggacttgatcaacgttttccaatctttgtcctttcctggacttgatcaacgttttctgatctttgtctcttccgacattcgatcaaatttttgatcctggtcctttcccggactcgatcattatttcccgatctttgtcctttcctggacttgatcaatgttttccgatctttgtctcttccgacattcgatcaaatttctgatcctggtcctttctcggactcgatcatattctcgacttaagtctttttccgactttgtcaatatttccaaccttggtccccaaaggactcggtcaatatttccgacataggtctctttccgaccttgtcgtttttccatgatcttggtcaatttccgataagatcaaaaccccagaaatagtcaaatcccgactaagtctgtacccgatcttagtcaagttccgactagatccaaattccattgatatcggtccatctccgaatatatcaactcacttttccgtcatgtttaagttttgactacaaggataatatcttggttcgtgatcgtgagttgggtaactatttccggttccaaacacatcgatccctcaacttccttatccgccaaaaccttactataacgttttctcgagcacctatccatcctaggatcaagcatgctctgataccaacttgtgagaccccgtcccggacgtctcggtgtccggcgacgttgcactcaagttcgcgcctcttcccggccgaacctcttaatttttcgcgattcaacatagaattgcctttacgaggctaaattctataatcgctctcttattacacagcggaagtctttctaaccttgggttagttctaaccaactcttgtaccggtttcatcgtctttgtcccttagaattagatcgatcctttactcggtcaagacatgtatattgttcgctaaccattctaggcctaacaatcgcatattcctttatcctatttttacggtcaattccctaacgtctaccttaactaataagttagatcgttacataccttggccaatatgcggatttgacaccttagcccatttgtcgccttattccatttgttcaacgattctgatccgatcgtgtattgatggaccaatctctatcgttacttagccatacaaccaaccaaccccactggtctaagcaaaacaatagagatcggggatcgtacgattcccttggttcacgatggccgaatcaagctcttggcttattggtccattcgttctccaaacgtacgcccctccggctacatggtggacgattgagccctcggcttatcgaaccatccatgtttccgttccggtcgtttaacactacgaccgcccacggtttactaaccgtttacccgtccggtccatggtggtcgataaagctttcggcttaatgatccatccatgcggtccgaacgatatccttatcacacccaagggtccgtggattcatccactggatcatcgtaggctagcccatgaaatctttcttccgtcggccttaggtttgctcgcgggtccaacatccgttttgtccatcggttcccaccgtggactttcctgttggttatccgtcgagtcaccctttggtcttaccgatctctgatcggtttcaccatggctgaagagatagatacatgaaggcggccacgatgttgatcctatatggtgaatcacgttccttacccattcttggtgctttctccctttatcggtaagattgcatccatgggcgacccttgggtgtgttcggatgcacttatccttgcgcttcctcgaacacttttctcgatccatcccatccgacgatcggtctgtccgacccgttccgtcagacgatcggcctgtcccatccgacccatccgacgatcggtctgtccgatccgtctggccgatccgatccgtctgacgatcggtctggccgatccgatccaacgatcggtctaccagatccgattcgtctctaagacgaacggtctaccctctccatcctctacactccatcgaaccgttggaccgggaggtagcatgcgcatcagttcggtcgagttatactcgccgagccgcaccccctttccgaccaacaactcgaggatgtgttgggactcctttaagaatgttttatggtgttttggatgttgtgagatgatgtgagagatgattccaaaggccttgggcgtcctcccttatatagggggcgaatggatgcttcccgaagcatcacattcgttccttgcacccttcccaaaggtcacatccgttccttgcatccttccaaaaggtcacatccgttccttgcatctattaggcgatgcaaccgttcgttggtacccgctcgaccttacaccttttggccgagacacctcttcacccgtgagctaccacagtccaccagctcgagtgtcagctgaccggaccacccagctgggtcagtacacgatcagctcaccgagctcagtcgagctgtcggtcagttcacctagctgagctagctagtcttccagctggtttagctcacctagcttagctagctagttcatcctagcttgtccagctcacctagcttgtccagctcacctagttggttcagcttgaactttctcgttccgtttctcgaccatggtctagttttcccctaaaacaaaccggcctctttatgaacgcgggacgcggtcgttacaagtctaccccccttaaactgaattcgtcctcgaattcggctggtgtaagatcttggttactccctaactcgggacacgggcgttacaagtctaccccccttaaactgaatttgtcctcgaattcagcgggtgtaagatcttgcttacttcctaactcgggacacgggcgttacaagtctaccccccttaaactgaattcgtcctcgaattcagcgggtgtaagatctttgtttactccttaacgctttcccatctttagtctctccgagactttagatatcacatttgatcaaatctctatttccgagtttgaacaagtttcccgatctttgtctcttacgacactcgatcaaattcctgatcctggtcctctcccggactcgatcattattcccgatctttgtcctttcctggacttaatcaatgttttccgatctttgtcctttcttggacttgatcaacgttttccaatcattgtcctttcctggacttgatcaacgttttctgatctttgtgtcttccgacattcgatcaaatttttgatcctggtcctttcccggactcgatcattattccagatctttgtcctttcctggacttgatcaatgttttccgatctttgtcctttcttggacttgatcaacgttttccaatctttgccctttcctggacttgatcaacattttctgatctttgtctcttccgacattcgatcaaatttccgatcctggtcctttcccgaactcgatcattatttcccgatctttgtcctttcctggacttgatcaacgttttctgatctttgtctctttcgacattcgatcaaatttccgatcctggtcctttcctgaactagatcattatttcccgatctttgtcctttcctggacttgatcaacgttttccgatctgtgtcctttcctggacttgatcaacgttttctgatctttgactcttccgacattcgatcaagtttctgatcctggtcctttccaggactcgatcattattctagacttaggtctctttccgaccttgtcgttttttccatgatcttggtcaatctccgataagatcaaaaccccagaaatagtcaaatcccgactaagtctgtacccgatcttagttaagttccgactagatccaaatttcgttgatatcggtccatctccgaatatatcaaccaacttcccgtcatgttaaaagctttgactaaaaggataatatcttggttcccgatcatgagttgggtaacaatttccatttccaaacacatcgatccctcaacttccttatccgccaaactcttactatgacgttttctcgagcacctatccatcctaggatcaagcatgctctgataccaacttgtgagaccccgtcccggacgtctcagtgtccggcgacgttgtactcaagttcgcgcctcttcccggccgaacctcttaatttttcgcgattcaacatagaattgcctttacgaggctaaattctataatcgctctcttattacacagcggaagtctttctaaccttggtttaattctaaccaactcttgtaccggtttcatcgtctttgttccttagacttagatcgatcctttactcggtcaagacatgcatatgttcgctaaccattctaagccaaacaatcgcatattcctttatcctactttcacggtcaattaccaaacgtctatcttaactaataagctagatcgttacataccttggtcaatatgcggatttgattccttagcccgtttgtcgccttactccattcgttcaacgactcgtcatcggtcgtgaattgatgaaccaatccctatcgttacttagccatacaaccaaccaaccccactggtctaagtacaacgatagagattggggatcgtacgattcccttggttcacgatggccgaatcaagctcttggcttattggtccattcgttctccaaacgtacgcccctccggctacatggtggacgattgagccctcggcttatcgaaccatccatgtttccgctctggtcgtttaacactacgaccgcccacggtttactaaccgtttacccgtccggtccatggtggtcgataaagctttcggcttaatgatccatccatgcggtccgaacgatatccttatcacacccaagggtccgtggattcatccactggatcatcgtaggctagcccatgaaatctttcttccgtcggccttaggtttgctcgcgggtccaacatccgttttgtccatcggttcccaccgtggactttcccgttggttatccgtcgagtcaccctttggtcttaccgatctctgattggtttcaccatggctgaggagatagatacatgaaggcgaccgcgatgttgatcctatatggtgaatcacgttccttacccattcttggtgctttctccctttatcggtaagattgcatccatgggcgacccttgggtgtgttcagatgcacttatccttgtgcttcctcgaacactttactcgatccatcccatccgacgatcggtctgtccgacccgttccgtcagacgatcggcctgtcccatccgacccgtccgacgatcggtctgtccgatccaatccgtgtggatgatccgatccgtacgatgatcggtcatgccgacccgatccgacgatcggtctgtccgatccgatccgtctctaagacgaacggtctaccctctccatcctctacactccatcgaaccgttggaccgggaggtagtatgcgcatcagttcggtcgagttatactcgccaagccgcaccccctttccgaccaacaacttcgggatgtgttgggactcttttaagaatgttttgtggtgtgtggatgattgtgagataattgtgagattattgtgagattatcccaaaggccttgggcgtcctcccttatatagggggcgaatggatgcttcccgaagcatcacatccgttccttgcacccttccgaaaggtcacatccgttccttgcatccttccaaaaggtcacatccgttccttgcatctattgggcgatgcaaccgttcgttggtacctgctcgaccttacaccttttggccgagacacctcttcacccgtgagctaccacagtccaccagctcgagtgtcagctgaccggaccacccagctgggtcagtacacgatcagctcactgagctcagtcgagctgtcggtcagctcacctagctgagctagctagtcttccagctggtttagctcacctagcttagctagctagttcatcatagtttgtccagctcacctagctggttaagcttgaactttctcgttcttccgactaagtattttagtccgtttcttgaccatggtctagttttctcctaaaacaacctggcctctttatgaacgcgggacgcggtcgttacaccacccatttgctcaagggggtggatatgaccgtggtggatgttccaacccgtccactggaggtggtggcggataccgcaacataggcagtaatgaataagaagtatgtggtgccggaaatggagcaagcggtggtggttacgagaagacatagcagaggttacatatctggtggaggttgtggtggaaaaggatacggtggtggtggccgtgagggatgtggctaaggaggaggtggcgctggaagttactgaggaggcgtagtggggtttggtaatcaaagatagtgtagtttattgtgactgttagattgttgagagatatggaagatgatgataaagcctataagatttaaatttgaattttgaatattgaggttgtcctctaatatttgattttgattctggaaaaagagagagaggaagaagagaagtaagagatggtgaagaacaaaataaatattgctaaagagaaacagaaaataagattaagggcaaattggaccatttaacaagccaaagtgacttctcctttgaaaatgctcaaaacgacaaatatttttgtaaaagtgtccgacagtgtaatattctgtaaacggataccatgaatggactctttgccatgagtcaatcagttatttcgcttattactgatgacgacttcgagaaagttacaaaacattatagtagaaatataagtttgcatgtagattttgtcaaaagataggcatttgaataacacacaaaagatgagattggagttattactccgttaatcgttaccttcatcaaatttaccaagtctctcttatgtggagcaaattatcatgttcccttgatgcgtcttgctagtctgggaagcaaacattcaatacgtacattatttgttagctttaattctatttctctgtcataaataaataagaaatatatatcacagaaacattctgattctaaattacacatatatcataattcaagtaccataatttactaatcaaaagggatcatcattagaaaactactatgtaagtatttattttatttctgatgtagatgactattagggatgggggctctatatccttgtacggtcaaagggaaatcgaatctaagaacactcaatcatatataccaaaacaaaaccattgttataaaaaatactaattggcgtctaatccttgaaaatcccttttaaattcatatgtgagtaccttttcatggtatcagagcttatggaaaggagatccatggaactttacagtgttccgcaactcaacattttcaactgtgttacagtcactctcacgcagcaaaattacattctttggaccaactcctacgtttcctattccggatatcaatggcgtcactactgagagaccaaatccggagtttgatgtttggttcaaaacagacaaggtggttaagtcttggcttcttgggtcttttgctgaggatatattgagtgttgttgttaactgtgtcactgctcatgaggtatggattactctcgccaaccactttaatagagcttcttcttctaggttgtttgaacttcaacgacgtttacaaactctagaaaagaaggataagcctatgcaaatttatcttaaggaattacagactatttgtgatcagttagcttctattggtagtgcggttccagagaaaatgaagatctttgctgctttgaatggttcaggtagagaatatgaacctatcaaaacaagtattgaaggctctattgatattccacctacacctaagcttgatgaaatcatatcgtgtctcactggttatgatgacagactttagggttacgcaacaagttccgatgttagtccgcatcttgccttcaacacggttcaagcaaactctgtcttttactcgactcgtggtagaggacaaggaaatcgtggatcttgtgggtctcgtggttcaaactccttctcaactcaaggccgtggcttccatcaacaactctcttacaatggttcctacaactcttcttccaaacgccctacttgtcaaatctgtggcgagcgtggtcataatgctctcacctgttggcatcggtttaataatagctaccaacctgatgatctaccacaagctctaacggcgatgcaaatcacagacatcacggatcactcaggcagcgaatgggtcaccgacagtgccgccactgctcacataacaaattcaccacgccacctgcaacaaaccaagtcttatgctgggtctgattcagttatggttggtaatgggaactttctccctattactcacactggctcaacaagtcttgtctctacttcaggtaagcttcatcttaaggatgttntggtatgccctctcattactaaatcgttgatttctgtgtcaaaagttacaaaagattatccctacatttttgagtttgattgtgatgaagttcgtgtgcgtgataagggacccaagaagcttcttcttcagggaagtaacagagatgggctgtatgtgttggatgaaccaaagcttcaggtgttctactcttctcgtcaagttgcagcctcagatgaagtttggcacagacgattaggacatccaaattctcatgttctctagcagttatcttcttttaagtctattcatatgagtaaacatagtaaagctatttgtgaagcttgtcagtccggtaaaagctcaagactgtcattctctgcatcttcttttgttgcaactagacccctagagagaattcactgtgctctctggggtccctctcctattatgtcagttcaaggattcagatattatgtcatatttattaataactactatagacactgttggttctatcctctcaagttaaagtctgaatttctacttgatctttttaaagtttcaagctttggttcagaatcaactacaaagtaaaatctctatctttcaatgtaatggtgggggtgaattcaccagcaagatcttcctcaaccatcttcaagaacatgggattcaacaatacatatcatgtccttatactcctcaacaaaatgaacttgcagagaggaaacacatgcacatatctggactgggtctctctatgttatttcagagcaaagttcaacaaaaacattgggtagaagcatttcatactgcaaattttctcagtaatctgtttcctcatattgcattg

SEQ ID NO: 37977 - DNA, 3730 bp, Arabidopsis thaliana landsberg
  unsure (1)..(3730): unsure at all n locations
aaccctggatccttaggttctttttcataagataagactacaaagtctgtaggaatcatgctcttcccaatcatcacaggaacttcgctaagaatcccatctggaattcgggtacaacgatctgccaacacaagagtgataaaggtaggctcaagattggaataccaagacgtatagcaactgaacaaggcttcagattcacactagaaccgagattgcataaggctcttgggaagtaattgtggttgatggtgacacttgtacaaaagttccaggatcaggtagcttttttggaatttgttcttgaatgttgtcgctgccctgctctgtaatcatcataacactacattctttcgtcaaattcttaatgaccattgtcttaacataccttctgattgtgggagatagatgaatagcttcaactagaggcatctcaacaatcagcttatcaatcatagccttgcatctgacatcatataaggcttgtcttgactttctaggactcttggggaagggaattcgccgatttgctgacttggttgcagctagaatttgcacattgtctgaacgaactgggtgtcgatcgacaccatcaggaatagtttcctcctcctccgcgaaattgtcgattccactcgacaaagggaaaacagagtcctcaagagttataggtgtcgatcgacaccctggtgtatcgatcgacactgattcgttttctacaattgggaaagatgaaggctgagctgatcgttcgcgctgaagtattgggttgagctgctttccgctgcgtagtgggactgcattgatagaagctgatgtaggtgagagattggagaattgagagcgtagattgtcaatcttgctattgatatctgtggagagagaatcatacttgctatcaagctttgtggagagagattcagatttactgtcaagctttgtgaggcctgcaagaagctgcgtaaacatagactatattctggttttttgtgaggcctgcaagaagctgcgtaaacatagactccattctggtttctgatgagggacgagggggggggggcttgggaaggagcagaaattgttgaaaaaagagtctctttgcttgcggtgtcaaattcatgtgtcgaaagactagttaaagcattggtaatgaagagtaatgcttcactagtagttcttgtcatgaagttacagtagcttgctgcatcaagttgagtctggtatggcatgattatccctctttagaagatattgatgagttaggggggggggcttgggaaggagcagaaattgctgntcctagagaggctttgcaagcagtgtcaaattcatgtgtcgaaagactagttaaagcattggtgatgaggagtaatgcttcactagtagttcttgtcatgaagttacattagcttgctgcattaagttgattcttgtatggctttgctatccctctctagaatagattgatgagttgactctcttggaagccatgttggggacattctctctgataagatctgaagcggagccaagctgctagaagggactcggctggagcttgagtgaccgaagaaatttgcaaacaaagtgccactatcacggattcatcaaagaattaattcatgaatgcattctttaaatcagtccagttggttattgaaccttgttctagttgacgcagccatgatgttcctctactttcgagagagtgtgggaagagtttgcaaagaaggtaatcagctggtacacctgctgctttgattaaggacactaagtcttcgaagacttccagatgatctagtggtgattcattagaatgtcctcgaaactctcctcgtgaaacaagagtatagtaggcatggtgaatagcaaagtcttctcttgcaaaaggaggtaggcggatcgctgatagattggagtagaaaagatcaactctgttgaagtcacctatggtagctggtctgttctgtagatggtgaatagcaaagtcttctcttgcaaaaggaggtagctggatcgctgatagattggagtagaaaagatcagctctgttgaagtcgcctatggtagctggtttgttctgcagatggtgtcgatcgacacctagttggtgtcggtcgacactatcgtcgaaatttgccagcagtttgttacgttccatcttgtagttcccttgtcacaagaaaaagaagcaagaaaacgcgtgagtaacaaaataaagaaaataaacacttaggctaaattctacacttagtctaatggtgaatcacagagaacttcggcaacggcgatataagtcaaattaatcctaagaccactctctcaaataaagaggtcagttgcagcacttagggataaaattcacaaagttctcagatcacgcagtaaactaatgactatcgaattaagctaagtaaaatagtaataaaaataaaaagaaacaaaaagtaagcaatagcagattttaaggttgtacgacaagataataaaagcgttaggcttatggtattctcatgaaacaaatgattagtagatcgattaatagctaggtttttatcgcaccaatctcgaactcaaactatgatattagaaaaacaagtggtgttccgcgaaactcttggcctagagctaaaaattaccggagaagccgagaatccttaagttcacctacgtaactaaaccagagcccttctatgagcctacctattctttcttaaatccttaagttcatctatgatagttctgataacatgtacctatggcaggtatacctattgtctaatatcaagttcgagttagttactctaaaactagcattaagaacattcaacatgaagaatcctacagataaccttgcaagggagcaatctactaaatcatctaaatccataatgagaaaccctaaccctaacaagaaaactactctaacatgatcaaaggaacacaaatcatagtctaaataagatttcaataatgaaaagaacaagagaaagagtaagaaagatcttctctaaagggagtctccataaggttttgctccaagtacaaaagagaaaaaggagatcagcctttccaagcttgggtctaaacaatgacctctaaaactatatatatgacctaaaaaacgtttaaggactaataatgcaaatagggaagtcttctggggtatatttctcacttctgtagacttaaaagcatcatggacttctctgggccgcaactggtgttgatcgacaccaagagtgtgttgatcggtactctggactggatttgaaagtgaattcgtccttaagcttcttttcttcatctttcgctccaaaatgtcttctcatcttcattgttgtccctctcaatagaatacctgaaaagactctagaaataacaaaaagactcaaaaacctatatctaaaacatagttaaaacagtaaaaatagggttatctcaactccccagacttagcttttgcttgccctcaaacaaaacacaaaagccgaacccgtggaagaggttctaaaaacaaagaaacccccaacatagtctattgccatgatcattctaaccaaattcatatgcctagtaattctaatcaaatcctaaccaacatgtacttctctacaagtttacacaacattctagattccatacctaagttccacaactatatccaccttgctttcatcgctgagtctcatcaagcangctaatattcaagaaccttctagactcattc

SEQ ID NO: 37978 - DNA, 2102 bp, Arabidopsis thaliana landsberg
caaatcacaagattatagcagacttttaataacataggatttggtaaaacggtaattaattattgattgaataacatgtgattagaagttatgttgggggagttttaagtatttatatttacaagattctacacaagtcaattgggtttttgttgctctctctctcttctcaccttgatatttttcagagagggagagatgatttccgatcgttgctatgccgtccggatttcttcgtcaaggccgtccggtttgttaaccggcttcagcccgacatccatatgcctcttgtgatgtggttggtcggttactttcccggaatcatctggctcctttagcaaaattgtccggtgtcgccgtcctccatcggttggttcctctaccaacggtggttggctcttgtctagcttctccgtcgtccctctccggcggtttaggctagcttttggccggatttcttttccggttttgttttatgttctcgttttctatagatccagtttgattttgctcctttgtgttctaactcttagagggctcaattccttgaacctcctttgtttaaagggctcaatttgtttttcaagcttatcgatttcaattatataagaacaaattagagttgtggattggggttttctctaatgcctttgagttgggttttatgcaattgagtcaattgtcatattggtttttggaaacgagtgtttttattttacttttaggtgttcatggaagtttcattggcttaagttctacgctgatgtcgtttgaagatgatgatatgactacccaggggagattttcctttgcgaattcgaagatgaagaagattgatgggattctctgaattttgtgttgctccatcggacaagcttgaagtcttggtggttcctggtggttttggagttccctgcaatgactaaccaaatcggcggtggccgtgataacaaatgtttcttctgcccacgtgcttcaacctcgcttgataacttacatgtggttttgcggtggactacatcaattacttcctaaaagggtttcttgcttcaactgggctttaatttagttggacttttatctttattttgtttttgtctggagactgaaagcggaggtttccactcttttgtaatctttacaatctttggtttaaataagagacaacacttatgagcaaaaaaaaaaaaaagtagacatacaaaagtcaacaggcagttaccataaattaccaaacagattaacaaaggaacttcggagttatggtcaaacaaagaaagtaaatgaaaaacatatcagtgtatgtgaggcaggcgtgtgatggatcatactactgcagttctttctccagttcatcgaattcccatccatcaacctcatctgcagagtaatcacgagccaccttaccaaattcagattccagctcggctagttcggcttcagggttaaactcttgactggaaccagctgcaggattgggtgcctgaggagaattgctcagctctggcttttgggtctgagtagattcagttgaagcattcatgctactactgctaggcttgggagatttgggtgatgtagcactgcttttaggggatgtaacactgcttctaggtgatggaatctctatctctaacgttggcctcgctatggattcaaattgctgcctcattttctccatgtcatcaaacagctctttcacacgccggtcgtcctttctggtataatgtaggatttcagaactttagtacaataaatctataccgattactgaaaggtcacataattatgtttccactcacttatccagtttgctttggagaacctggaattgctctttcacgttgtccacaatgctgaatgtggtaatgatctaagtttttgataaaaccaaataagtgacgaggaagaatagtaaccagaaaaagaaaaaaaatcaacgaaccagagcacgaccatgcagagtcatatttggtctcaataaaaataatcaatcgtaacctactaagcagcaattcttaccttggtctcatagtctatatactcctcctgcagaattttgctcgggtttgataccttgatggctccctgatctgcatttg

SEQ ID NO: 37979 - DNA, 2369 bp, Arabidopsis thaliana landsberg
  unsure (1)..(2369): unsure at all n locations
atgggtttctcgttactctgattgattgatttgcttatattggagtatatgtgatcggctctgttccgggtttttcttttcttctatatgttatagttttatgaaatagattcagaaacttgactctttatttattctctgtgcacaagcaggagacgaaatggctcgggttttctgggnnttcttcccnggcngggtgngggtcttggcttttttttggttctttgctcgcgggttgcgttctttttgtggttnttttcttgggcnttttgcagcttattctccctttcctggagctggatatcaaatactttgatcttggactgcctaaccgcgatttcactgatgatacggttgctatagagagtgctgaagctactttaaagtatgtcgtctttacattttatacttagatatcatattctccatgctttctgcttctagtgttgaggttgttctgtgaataaagcttgttcatggctattggtttcagaatatattgtctgccttaaagtttttttcttttcttttcttgtgtgaaggtataatgtggctattaagtgtgcgacgattactccgggtatgtattcttaaacctttgcaatttttaatttaaaagtgtgcttctttcacttactaacaacagtttttgctttcaacgacagatgaagctcgtgttagggagttcagcttaaagaaaatgtggaggagtcctaatggaactataaggaacattttaaacggtcagtttcttcgccaaaaaagggggcaattccttcttcaattcctaagctctaagatcatgttgttatttttatgcaggcacagttttcagggaacctatcatttgcagaaacatccctcgtcttgttccaggtttgtcaatggctgctctttttgtatgagttagccattttctgtacctttaacatgtagagcaaaacaaatccctctgatttcatttcctcaggatggacgaagccaatctgtattggaaggcatgcttttggtgatcagtatagagccactgatctcattgccaatgaaccaggaaaactgaaactagtttttggtaatctcctcctcccgttctggatctgtctaacccttcaattaaattgttcattatacagaataatgggggatcattgtcattgaattcacctacctgtggaagtttatttatacacgttaaaaatcatatcttacatatgcagagccaagtggatcttctcagaaaacagaattcgaagtcttcaatttcaccggtggaggtgttgctttagccatgtataacactgatgaggtagatattattgaaatagtcctctccttcatgtctgcactatctgaatacacttacagagtatctattgatatggtggtccgatttcatttttgaacagtctattcgtgcatttgctgagtcctcgatgtacacagcttaccagaaaaagtggccactttacctctccacaaaaaacaccatcctcaaaatatatgatggaaggtgtgaattcactggcctttatactttcttgttagagtctcaccgaaatcatttcaccatctagtcatactgccctgatattaccttttcatcttgttttcagattcaaggatatattccaagaagtttatgaagctaactggagatccaagtatgaagcagcagggatatggtgagatgtgcatgttattagcgacattctattacagtacaccatgcaaacttgtaaacaaagttaatgaaatccaggtatgagcatcgtttgatagatgatatggttgcatatgccatgaaaagtgaagggggttacgtctgggcatgcaagaattacgatggagatgtacagagcgatttcttagcccaaggtttttcctcttaaatttgagatctgtctagggactgaaaccttaattctgccaaatgcattttggtcttgtatcatggttctttgttctttacttgtgatctaaatggggacagaaacttcaattttatttctccttatgaaacaaagtttctgctctccgctgcaggatatggatctctgggaatgatgacttcggtgttggtatgaaatgacgcgggcctcagccaaagtttttggtctttatcatgataacatgtttcctgcgcatcattatattttatgtattaaatttgagatatattacaggtttgtccagatggaaagaccattgaagcagaagcagctcatggcacagttacacgccactacagagttcaccagaaaggtggtgaaacaagcaccaacagcatagcctctatttttgcttggtccagaggccttgcccacaggtaacgcatttccactgtctttaaacattttcatacttggtaa

SEQ ID NO: 37980 - DNA, 6547 bp, Arabidopsis thaliana landsberg
  unsure (1)..(6547): unsure at all n locations
tgggtcaatccataactcatttcatttgatgagttgagttgttaaatagattatcctatttacgtaataatttaattaattattattataaaacaataataaataataattattattaataattattaatttattatcatcaaatttaggatattttcggattccacattttacggagtttacgtttttggcgggaaaatcatagatttatgtttttggcagaaaaattacagatttacgtttttgtcgggaaaatcacgagtttacttttttggcgggaaaattacgggtttacgtttttagcaggaaaatcacgggtttaagtgttttggccggtaaattacgggtttacgtttttggcgggaaaattacgggtttacgttttttgcgagaaaatcacaggtttatgttttttgcgagaaaattaggggtttacgtttttggcgggaaaatcacgggtttacttttttgcgggaaaattacgggtttacgttttttggcgggaaaatctcgggtttacatttttggcgagaaaattacgagtttacgtttttttggcgggaaaatcacgggtttatgttttaacggaaaattgcaagtttacgtttttgacaagaaaattacgggttactttttctcaatttcatcgcttgtatatttaagaaatttggaaaaatattaattttattaaattggtttagatgtgttggttaaacttaaattggcattggtttagagattttagttggtttaattcaattttacaaaatttgatgggttaattgggtaaaccattgaaaccattaaccattacaatccaactcattttactaatcaaaccaattgactcatcaactcatttgactcatcaactcatttgagtcaaaaaatttaactcattagggttcacgggttgagttgagttgagttgacccatgaattttgactcatttttacaaccccctaactcaaagcatggatggtatgggtatgacccgtaagattatacattgagaacaatcaaattctgcagttcatattatataattagagaagtcacaaagatttaaagagatgcctagattaattatgttaacgaatttatagtccataaattaatcaaaagtgttgtgaattgtgatcaaccatctatatatacatttttgcagccattttgtgaaataaatcctggagttgggatttatttacaacctaatgccattagcatttattatttagttaaaaaaaataaaaaagattttaccaaactatatcttgcntaattgtttctaaaaaatctctacacaatcttttcatatatctttaaaaaacaaaatggattttacttcacaaaatatgcatagatccgatttatagcaaatatttatatcaacattttgcatagcaataaaaatactaatttataataattaaaatattcacataaaaaatcatatacagatacaggaaaaaaaactatatttatcatcatttaaaccgttcttttatttaaattaaaagcacaaaacttgaaatcatatactttatatgataaatttaaaatctatattagtaatagaaattttaaatcattcaaggaacggtataccacgggtgagatcctaaattattggaattagaacaataataatttatttttttggattttataacactaataatttagctaacgagataatatagacggatttatatgggatgacgggttttgatcaatattaataaagaaaggtatatcacggatgaaatcataaaattaacaatcaaaatacaatcatacaaccttaaacacaaaaacatacaatattaacaaaacaaatataacttaaaatttaaaaaaaatagctataaaaaattgacatgcggtatactgcagacaaaatattcaaaattttaaaatctaccatacattgttacttaaaaaaatatatgttttcatatctatacttcaaaatttgaaacctaaataatagtaatcatatactaaataatacaaggatagatatctatattttaaaatacaaattaatatgatatatcttcagttaatcttttaaaaaataaatttacattttttaaaacgcgggttaaattctagttttattgataatagtaaacgcaagttcatatgatgattgttaggccgaacatgtaccgttttctcgttatagaatagaaccaactaaccaaggtgtatcaggcttcatgtatgaggatgtctagggaatttttgtgacacaaccatactcgtgtcctaatgataaattcaaacatcaatgtttcctcatagctgaagctacaaaagttatttctatataaaaaaaagggaattattaataagcttttttttttgcatgtctgctcaataatatgatattatgtattaatatcgataggttccaaaaggacaaacatcttcccggtgttgaaaatcacaatgaaggatataactatatttctacacttctaaagcagttcaacacttgatttactacccaaaaaattaccccctcaactagaaaattcgtaaaccaaacaatttccgttacctattaccccaaatttccacagataactgtcataataacatcattaaacctgaagcagaaccctccaaccgaaccgccaacttcaaaatcaagaaagaatagaggtgtcatcacctgacatgagagtgagggagagacagatgcgtgcgtctttgagaaaaatgcatcaacgtcatgatgctttgtcattatgagaatttaggcatgaataatccatatcagtcgacatctccgctgtttgtgtctctgtttcacttctcactcttcggtagaaaagaacatatgcagctgagtttctgatttcagattcatttacagatgacacatgactgtcgtcgaaatggtaccatttgttgtcatcaatcaaatgcatgaaaaatgacacataatgatcaaataaagaactcacagaagaactagtagcaagcacaatgggacaactgtcgagtctgtaatatgatgcatttatgcatatgaagaggtaaaaataaaccaaaatagatagtgagaccaaatgtttagtcagcaaaccttagcgtaggcagtgtagtggccaccaccaagtccaccataatgattactaacggcatacagttcatatagatatgactggtcattcttgtttttcacatacttgctcaagtctagatcatgaactgggaaattcacaaacgtatcaatcttattcttgagatatctgctgtaagtgaacctttttaaatgaaacacaagaatatctggtaacttccacaggtctagctttttgttcgcttgtctgtgttctttgcagctcggacaaaacctgattcagaaccgtaagaaagagggtcaaagctaaatcttaaaatgagtatctcagttcatgtgattttaagttcaggctacgagctataccacatgtcatctggtcccagaggttcttctgctaaaaacgcctccaaacacgaaaacagggatatcgattcttgccttgtcttctttgcagagaaacttgttttatgaacctctggaagatcactcaagtagctggaatcatatctttcatgctcaccctcattccactcgactaaaactcttgtaacggtacccgggcttatagaagattcagactgcagtggtttaatgttcaaaccacgttcatctgtcaagaatatcctgaaggataacactctatcagatgcatcgtctatctcggtatctggggatgataaaattccggatgcttcgtcaacagtagcatcaggaaggtggccattttcacttccgttatgaatcttagatggggcatggaccttgtgcagaggcgacaaaaatccagagataactgcatcaatgtcagttccacttagtggttctgtgttgacataagtcacaaaaggagttccaaaaagcttcacgtcgctgcctctaagactatccagaacagccctgtggaacccaataattaagattcataaagcttaacaagaagactgaagaagagttcttgagtaacaaataaaaccaaagcatggttacctttcctgccctccatgaagaatttcgagttttgcttttcttgatcctttcggaatctgattcaaccgatacgccacaatatgctcgtcatcttttatcgcactcagtgaatccaggggaatctcaaaatatctaaagatcttgtgatcatatacctgagaggacaattacacacaatcttcagggatttcagccccaaaaaaaggatggaggaaaaatattaatacaagaaaggaacaagccaaaaatcatacctctgcaagtaaaagactctcatcttcagctaaacaacaagcagtacctaatgcggtaatgagatctctaatagatccctgtttaggtactattactgtgtatggcatcggaagatgacttccatcgcaataaaacaccgtaattgtcatggatcgcgtaagtgttgatggcaaaggtacagacaagtacatgaaaggatcaaaagtgattgatatttttccgcaagctggacaaaccagagttgacttgtattggccctgaaagaaattgaacacctcataagaactggtcgggaaaataaaataaagaaacttgtagtacttgtatgaaaaactacaaccagatgaacattcaatggaagaagcgattaggaagcggtaaccgatacttacttgacagacgtcaactattacagaatcatttcgggccttatgataattccaaagctcttcagcaacttcatcatccggacgactgtcagaatctttaagttcgatgtaaggttttcgtttgaccttattcagatcttcatgcagcccatccaataagaaagcaagcagttcctgagacaacaatataatactgtcaaagaggatagcatagaacaacaacaatgtcaggaacaaagaccttaattatgcaccatcatacagattagaggaaatgactaacttgagaatcatgctgattgtaaccactaaactgtggagcaaatctagccaattttgtcttaaatgcgcgtggtgcaactgagttccttcctgatgaccataatttcttcaacaaatcaccaaacgcgatagcaagctcaccctggaaaattaagagttagaattatattcaaaatgcatgtgagtaccatcacatgagtaaatagaagatttaagtagcaagcacttacacacattcccaaaggattatctctatttatgtcgtcactgcaatcttgcaagaagtattcaacaattggaggtgtgtgggccaaacactgaagagcgctattcataaagcaggtatttcccaaattactcaatcctgctaatcctccattttctccctttccaagaatactcaaagaattgctgccgtcatcttcagaagttattctcggaaagagactaaagttggacgtagtggaatgaccatttgatagggtaggccccccagcaattgtaacaatcgaccttgaaggttccagaggtaccagagctaactcatttcctgtcgagctcatagcagattgagaggaagacgacccatcaacttcaagtagaatctgcatgggatgtaccagtcaatgtcaaacaaagagacgaacattgatatcatgtgagttaaatgggattcgggttgtgtcgataaaagaactcaagaggcatgcattatgacaaactgaagtccaagtgacaaaggtgattcatcaagatttgtcaatatacatatcacagacagttctctagatacttacatcttggtccatatgaaggcttgactcttccaggctcttgtaagataaagaatccaagagtccgtttttcctcttatcgaagtaatcccagatatgagcctgcttataaaaaaaaatatcaatgtgaggcaaagctgcaaagtcttcataacgaaacaatgcgtccttcatcagcaaaaactaaaaatagaaatgaaacatctcgaaacacacaccttttcttgtggtacccctgtcaaagcacaaaccttctcataaagttcccttatagaggcctgaaacacggacaacccatgtaagaaagggacctaagtggggcctaacagtttaaacacaaagagtctttggctatgcataagcaccataagtaggtcgcagcaaaacaaagagcctgagtagtatgatgggggcacctaatacctgttttcccaaccgtattacagttctactttcatctcgtccggccgtcaacataaggcagagtggataaacctcggcactataactcgtagtataaaagccgccacagatcaacttcctttcgatcggaggacctgcgctacacgtgcaagagacataagaccaggtatataatcgtcggaagctaaatgaagcgatccgaaagaaccaaaagctcgccattcaacaagttttttccaaacttgtttaggaactaaaacgtagtcctccccttccaccagcaatctacgaagttgtggatcattaatgtcgctat

SEQ ID NO: 37981 - DNA, 2388 bp, Arabidopsis thaliana landsberg
  unsure (1)..(2388): unsure at all n locations
ggagttctgacactgaatctcagtaggaacctcaatattcaactcttgtaaagctcccataacttcttcacttaaacccaattcctgaaaattctcaactaacttcttactcttcttcctaatactactctcttcctctacaccaacaacactacttggtctctgttgtggtggtttcgctgattctttcaaatgtcgaagcctaagcctctctagtaagatcgtatgtttcaattgatccggatctgtaacattagtctccgtcgtcggagaagaagttgttgcggcggcggagtaaagaggacgaaacgcgtggtggaatctgggtttgtggaggcggagaaatggaaaaacgtgagggattttggagaaggtgaagagggaagaagatagagatagggataggattgttcttgaagctcctaccatagctttcgcgcgtgtttttcttactgtagtgtgaggaggaagagggttgtgaggtttatcggaaggttttgtgaagcgttgtttgttgttcagcgaagaagaagaagaagataggtttttgcaagtggagtgtaatagtaacagatccaaagccttttaaggcccatatgttggcccattaaggtaaaacttatgtttgaatttggatataccggtcgatcttttaaactaatttttaaattttaattttttgtttagtatttaagatcgtataactgtatttcgattgttaattcaacaattttatctctagtatatcgtggtgtattaatatcgatcgaaacccgttctaccatataaccatgtctcgtaaaatgacattttttttttaataatacttttatttaaaaaaacatataatacactacatgaatgatacactgcatgattaactaataatacttctatttaaaagacatataaaatataaaatatattttatgaattaagttttatcacaatttatggaaagatttgggtcaaacttaaaagaaaaaactgaccaataggcaataaccatttttttttttttatggtcatatacatatacttgagtgaacaatagtacaatacccaatagtacaatacccaccaacatgaccaataggcaataaccacttaggctatagcaaaagaaaagcaaggacaatgatatctctcttagttcttcaaagctgtaatgattgcattgaaagtataattgcagattcactgagtccaccaccttcttctgcacggatgtagcctccaggttggagatagtacactgtatcagctagaatcagatcacgtccgggtaataatacagcctgagaactaaagaaaatagacgaccatgctatatcctctctgaattggttaagacaatctctgtttaggttttgtcacctgaatagctattcgagtgtattacattcacaaaggtttttaaaatatcacatgatctaggttaaagtttgacttcaaagttttacaatattttatgaaaaaaactatacatgcaaaatgaacatatggtctaactatagatgtagtaacatatccgacagttgagtcaaaccaaactgaaatagtgtagcatgcaactttatatcgccatagggattaagagcaataatggttcttcttacaaaaataaaatttgtatccagcagaatcgattgatcatacacagacttctccaatcaattaatatatgatggaatgacaaaaaattgcttctacaagcttatcgttctgcaactcaagagtacaccaaccttcaaatgaatgcatcaaaaaaacgaatgtcattgaatcctcaaatctgtggttcagcaagcgcaaccaccgccttttggctcgttttcagtcactgcatctggtatgccttggaagtatctgcaattaacccaagccattgtgtatgaggtacatactgtataagtattcagcggttatttttaatgcattcttagttttcaattcggatcacacaagagtttggaattcacaagtagcccaatcgcagatagacatgtaagaaagtcacataatttaagctacactatctgccttctacatttaaacgtcatattcagattaagattgagattctacactattcagtctctccggtttaaccattaaaaaggtcccagctttcctttattagaggttaacccaaaagaaaacttacatatccctgttcatgttcgttagcaagggcggttttggcaatggttaagaatgcctcatccacattgaagtcatcttttgctgatgtctcgaaatagggtatgttaccatttgaagcacaccagtcagctgctttcttatcagagncctgtagataagaggaaatcntcaagnctgagtaaaagagttaaagcacgatggaagacatatcttatcatcctc

SEQ ID NO: 37982 - DNA, 2144 bp, Arabidopsis thaliana landsberg
accacaagctatcgattccatagcgaacatccaatttgttcaatataggaaaatgccgtgcaagaacagtttccaagacaacgttgttggcaatcctcttcattgatcaaacttagatattcataaaagtctggaggcttcacatttgcaactatgtcgaagatgtctccattattggcttgtgctgttgcagaagagttcacatcacaagataaatttgttcttctcatacaaccaccagtccaattccttttattccactcctcatctgattttggtacaaagcctttcaagcattcacactttgggggattagatcttatacacaagccaaaaggtccacatgtattataaacatcacatgagcttacaggggcctccaagtcagtaacccaaccagagccattattccaaatgatctttaacgatcccgctgatgtgagcgtagtgtacgacaggttcgaatttcttcgttcgaatgaataagtcaaagatcctgtgccggctgcaacatcttgggaaatgtcgaatttgcttacatgtgatccatccatttctggtatgccggtgaaccttacccttgcccatggaccacctctccagtaaggcctggatcctctcattataaagccttgcggaggtacttgtgtcgtaagctcagctacgaattctccaggtgaaggatcggtgggatttttccaagaagataaaacacgtttcttgttattcggaacatcatacatcacagatgattcaagtaacatagtatcaccaagatgctcgaaactttcccataagtttctttctgaaactccatcaatgagtacaagatttccgttttctaatagctcagcacgaagctcgttagaagagaaagtttctcctattgaccaaacaacattttgttctctctcaaccaagataaggctcccattgctgttgatagtgagattcgctgcgttgtttgtaactggcttatctctgttagccacccagacaacaacccgaggggtgatgttcttgaaccagatcccaacatactgattccgagagttgtttggactgaagaaccctaactcataagttccattaggggagctcagagtttgtcctattgacaaaggacttgctctggtgatagaggcagaggcccagcttgggacatataatcagcatgaagagccgttaagcaaagccgtcaacaccaatctttcccatacgatatgcaagagctcgtttaaggatctgaatgtatgactctttgtgaagtcaatgcaataacagaacaaataaaatatgaatcctcccggatggtagatctatggacactcttttcttatatgattgtaatagatagtacagccatagtggccgcaacataagaaagcacagaaaaatgataggcctcgttgaccactagagtcacatcgttccattcacggaatcactcggtgactccagattacaagtcaaccaactagatgttatactagtcttatattccatgttgctttagaagataactttgtatattcccatctctgggccttaaccataaataaagccaacacattttctaggaaagtaacagaaagacaaaagcaaaacattttacttgcagctaaaactttctccattttctagaaagtaacagagcacaagaacgtttttgcaacattttacttgcagctaaaagttctatttcctctgtagattaatcaaatttggggaataaataccaacacaagaacttttcaattcattgggaaagaatgttaccctgatatgaaatcgaaagcaacagactttggatttaggagaagcttacctgaagaagagtgcagagttctagctccgatttcctatagtggaggtatgacttttcatgggcggcttcaaacattgggcccccactgcccaaaactttgaattttaaattctcgttcacgcatttcatcgaacacattcagtgcataacccaaacgttccaaagttcgaagcaacatggtttttaattacaaagaaacaaagtatagcggagaaatccaaatctaaccacctgggcatcgacgcttgtaaccaaagtcgaaaacttaccatcaacatgatcttataaaatgcagagaagagaatgcgagaggagt

SEQ ID NO: 37983 - DNA, 3647 bp, Arabidopsis thaliana landsberg
cctcatatttggtctactatcacttttaatagctgaccctttttggtcaatgatatatcttataatcaaattgtttcattataataaagaaagaacttatcttagtcttctacaataatgagtccaatatattcactaaacaaacagttctttcttaacaacaactagagaaaacaatttcaaggaaaaattttacttagaaaaaatcaactagacacgattttttcttcagcattttatacatgaattgttatatttttttggatataactttatcttagaagaaaatatacttataccattgtaaaaataagggaatttggtcaaaaattccaaaaaaaaacttatactattgtaaaaataaaaataaatgacatcgaaataattaataaaaacatctggtccccatgaaactcgtatattaatacttcagatccaaaatttatgaaaaaatatcaagctcaatgtattaaattaaaaaatataaatcattaaaagctagattttattcttgtttggtacaaccaataataataagtggggaaaagtattaattagagtttgcttcacgtttgagtttcacaaaaagtgtaacgacgccaggagaattttatcgggtcgcaagagacaccttagaggattgtgtcttccctgcaacttttgaccttttcgcactcagcgaatcagatcgctatagtacggtgcaccctaccgtctctgatcatccccactgtcttaattagatccgacccgaaacgtatccttctctgaaacttcgattgagattcgcattcctctgttcttccaccatttaacaattattctcttttgtcttcgccaacttcttccgtttcttcatacttctccaggtacttcgtcgagttcctcgtgctttagattgtttttgcttttttcgaagatacgtgagagaagtgtttctcctgctctgtctcttctttgatcttatatcacgtgggatctgattttttagttgcggtattcacaagtctttcccaatttgaggatgttttgtctccgtgatttctgtgtttttgttttggaatattgatgattatagattcgaaattatgcagctttagatactaactaaatgacgaatcttttctcattattcgcttgttgaatcttccactgagctcatagataaggaattctctgttcattgttgcttttagagcttaattcatgttcctgagattcaaatttgcaacctttttcccacttatgtaagaaaaaatggcttttttatatattcttcattcatggctgtgttgattaggaatctctaatctctatgtctactgttagattaattgtttggtattgatactcaaattgcatatatttaggttcttgcattggttttttatagtatcttttctgcaactgagtctttgtatttaccaaaaaaagaaaaaaactcaatctttgtggggaacttaaaggtggcactgagtaatatttgaatctcaatgctgcaagtttgtcttgaggtttatctggaaaaaagatggaagtttgcggggatctgaaatctgataacttacagaaccgcccctgactccgcttaggattctgaggggcttgatgatcctgctggtgtttctgtctactgcttttatgtttctgctgtactttgcaccaatagctgctctaggtctacggcttctgagtgtgcaacaatctagaaaagttgtttcgttaatctttggtctctggttagctttgtggccttacctgtttgaaacggttaacgggacaactgtggtgttctctggagacatcattccggttgagaaacgtgttttgcttattgcaaatcacaggacggaggtggattggatgtatctgtggaatattgccttgagaaaaggctgtcttggctacatcaaatacgtgctcaagagcagcttgatgaaattacctatttttggttggggctttcatgttttggaatttatcccggtggagaggaagcgggaggtcgacgaacctgttttgcttcaaatgctttcatcttttaaggatcctcaagaacccttatggcttgctctattccctgaaggaaccgatttcacgtactatatgctccctatctgatttaactgctctagatatattagctaatacattattaatctgaatcttcgaagatatctttcagtttctctttggtaggatatttaacaccatgcgcatctgtcttgcaaatatcttaaaccagtcaccctcatttacaataatttgcctgctattgcatgaatgtttgaaatgctgctcttagtatatcttctttctattactgagaccttccttatttgatatgcagtgaagagaaatgcaagagaagccaaaagtttgcagctgaagttggtcttccagcactatcaaacgtacttctaccaaaaacaaggggttttggcgtttgcttagaagttcttcataactctttggatgcaggtatggttcatgaaattttgttacaaatgttggtgtacatatagtagtatctcaagccacatgttatgcaaacacttatgtgttttgacgacattatgatggcgtgcatatcttctatttttccaatgacccatgtgggacctcatgaccacaattaactgaacaaggcatttccttttattgcaatgcagtatatgatttgactatcgcatataaacctcgctgcccatctttcatggacaatgtattcgggacggatccttcagaagtacatatccacgttcggcgagttctactaaaggagattccagcaaacgaggcaaaatcttctgcttggttaatggattcatttaagttgaaggacaaactgctatccgatttcaatgctcaggggaaattccccaatcaaagaccagaagaagaactctctgttctcaagtgcattgcaacatttgcaggggtaatatctttgacagtagtgttcatatatctgaccttgtattcacatagctgtttcaaagtatatgcttgtctaagcggcacatatttaacttttgctacatattacaagttccaaccctcacctagctgttttagagaagattcttgtaaagttaaaaaccattaactttgttgtaaatacaattctttctttgtatacaaagaaataatattacaggcagaaaatatctctgggatgcctttttcattgtaagttctttgatcttcagttagttaaaattgtattccatgttgttctcttgaaagttgaaactcacatagatagtttgtgtagtctttagtcacattttggttatgtcaaattgtttgagtcttgcaagtgccactgttagcacttttcattcaaaactgtcacggagcaaacagaatttggaaggaaaagttgatatgttggaactgtagaactcttgtgtttattgagttagaaacaacaacaggtcactaaaccatcttgtcaaaaggtgttcttacttctgaatcagtcaagtaaaggaagtttccatctgagcaaaactttgtcggtgatcgacaaagcatagtagaacccactttgtcccaaaagaatgttaccttctttttgcaggtgatgaaaaagagagtaagaaggccgttgctcagcaccctttcactgatacattggatca

SEQ ID NO: 37984 - DNA, 6502 bp, Arabidopsis thaliana landsberg
taaaagaagcatgccgagccaacaaagagacttggcagaagaggacacccgactcactctgctctcaaaccacagcacgctgatcggcaagggtaagataggattattttgtgttttagtagtgatgattcttttgcatgattgattgtttgtgacaattgtgtgtagtagaaaatctgaaatttctaccaactcattctttaagaagttgctataatatagtttccttgatactggttaaactactaaatagatctctactttacatcaaaccgcaactattccatctgctgctgcatttcacattagcgacaggaggctctgctgctttgccattacaaggagtatcgttaatcttgggcggtggttaagcagcagtagcaggagcctcaacattaccacaagcacctgaaccaccaccgccattgctattcttagggtcagaggacggtggtgcgattggagatagtgagtcccgtgagtggtagcccctgggatcatcatgtgactccttaaacgttatactgatgaccctcttgtcggtaatctttcatgtgtttgatcccactagcgtttttgtcaagcaagtcctgtaggtgtacggtctggtcaaaggtgctgacatggacctgacgtcggcaagttgatggcatggcgagcggagttgccatagaaatgtcatcaggagactctggttcaggttcccacaaaagctcggctcttttgccggttaatatcagtgttcacttctatcgtcccttcgtttgcattaaccttgatggaatgcactcctaatcataaatccaccattgctaattatatatatcagaaacggtagtaaatatatgcataatcaatcaccttcaacgtttagcatggctcgtttcacctttctcgcacattcggcacaagtacaacatttgggttccagtttaagaacacgagtctgctgtatacagaaatcaaaacgagacaaaaacagatttaccatatataaacaaaatatttgtgatcggtgtaaaaacatctcttggtcatcatgtaaaataagaaaccaactcgatggaatggggaatgacttgaaggaggatgacacaaaaatattttgtattaagtttgacacaaacgtaataatattatgtttttacataaaacaaaaatatactgatcgtgtgcttaaatcctaaaggcgcaggcttggttttaattttgaatgttaaaagaaatctattttcgaaaaccaaaaaaatttacttggaaaaaatggaataaaaagaaaaacatttaggtggttggttagttattaaggttttggtttttctggattcactaatctacttacctttgtagaaaatgcttgtttatatgaatagagacgttcgaagtaggcatgaagttttttgtttgcttaaaatttttaatttgagtgagataaaaccgttaaaagtttatcctaaaatttgatagctacgctaattttccatatgcaaattctattttgtcgttatacataactctttacttgcaatatacaacagcttccgaaaacaaaaacaaaatcaatgaatggccaaatcccaaacgattactgaaagagagggataaaaagaaagttaatgcgcaaaggaataggcgtgactgccttattggtcgtattatttaccttttttttttcatcacacgatcgattataatatatatatcttcaaacgtgggtgttgggttaacatcaatcaatcattaagcttcttatcccaatttattttattttcttcgtatctatcatgaacactttataaattaaataagtgaaaaagtttttgccaagagttcaagcgaacgctagttatacaatattcgtcttcatattaatcttcaaaatagagtttgaaataaacatttatctaacccatatatatcctttccaactctataatagaaatctctatttctctatttggagatttggattttcaatttatatctttatttttaacttcaaaatatagtagatttaggaagaaaaaaactcaactcctaaataaagatattttagagagaaaatacagatttggaaatgctctaagtatgtcacctaaatttgtaattgaaatttattgttagatggaaacaagcgagggaatatatctaagggttttcttttgatttagtatgtaaaaggtttaatatgcaaatttaaatgattaaagtataacaataagtcaataacgattatattaatgtagaaggttttattttatttttgatttaagctgtaccattttattgattttaggttgatgtattcattctttatttggagctgtgtgatataacttgagtaatcgaatgacactttcttttctaaaaatataaagaaaatttctgaaattgtactaatcaactgataagacaagaaaaaagctagatttaacaagaaacgcataagctagttggccggtttagtccaccaatttgattaaaacttatcgcaattaaataattcactcagacaaatatcttggtataccgtatacaagtttatgcaaagtgcagagtggctaaaatttaatcagagctagctttagaaaaaaattatagttgaaaataccagatgtgtaaagttctgtaaattaaatcttgactctctggggatatatacatgtatgatgtatatgtgaggttccgtattatttttagtacataggaatggaggaatcagatacgtacatggacgtgtaggagcatgcacagtacgttaccaagctcgcaagccaaattacattccaatagctatgacttgtcgctgtaagaataatctttttaaaggccctttctcggaccattatatttcttatctcatgtgaataattataatgtaataaaaaacaaaagttttctttgtgttttttttcgtcttcagatttatatgtaagtggggagagtaataagagacgttcccgggggtctttggccattgcaggtcgacaaacaattttgcctctccgtttcattaatggacggtccaatagaacctttatattattctacaaatataaacaactctatgataatatcaaaatatgagatagaatcacatctgcataactttttcttatgaaattagggaatacagaatatctatatacatataatatttgatagaccgatcatgaggaggaagcatcataacctaatttcttaaatgtttttagttaaataatgtcaatccatccaaggtaattgccgagtttttcattgcgactgctctaataacatgataaaatctattaaaaacaaatatactatgagcttagacaataacccatcaaaaaaaaataacccatatatatttttattaaaaagaagagaaatgcttcttaaaactttctgcctcgcatataatcgttattttcctagaaaaaaaatcgtatcttaacttcacatcaaacgtaatagaagtttacgtttgattgtgacattatcaatatatatcatctgcattgcacgcggatcaaatatttggccagtctaaatagaattagaggagaataaagtaaaataaaacaacaggtttgaccaattaattaaaaaaggggcgagccaacttgtcgtatatcattcgtacagtggccatttactaagtgtgtgaccctatatatataaatcatatccttcatgcaaagtcacctgaacatttcatatataagaagatatacaagcctaccaaacataacaaaacatatttaaaacaccagcaagtttatattgcaaagcgtttcatcatgatcatgaagatatctatggctatgtgcaaacaaccattgcctccttcgccgactttagacttccctccagcgagatttggtcccaatatgctaactctaaacccatacggtccaaaggacaaagttgtggtcatcatgggtgctaccgggacaggcaagtcacgactctccgtggatatagccacacgttttcgggctgagatcataaactcagacaagatacaagtccaccaaggtctagacattgtaaccaacaagatcacgagcgaggagagctgcggggtaccgcaccatctcctcggcgtcttgccgcctgaagccgacttaaccgccgcgaattactgtcacatggcgaatctctccattgaatccgtcctaaaccgtggaaagcttccaatcatcgttggaggttccaactcttacgtggaggctctagtggatgacaaagaaaacaagttcaggtcgagatacgactgttgttttctatgggtggacgtggcacttcccgttttgcacgggttcgtgtctgagagagttgacaagatggtggagagtggaatggttgaggaagtcagagaatttttcgacttttcgaactctgattactcaagagggatcaagaaagcaatcggatttccggagtttgacaggtttttcaggaacgagcagttcttgaatgtggaagacagagaagaactgttaagtaaagtgttggaagaaataaagaggaatacatttgagttagcttgtaggcagagagaaaagatcgaacggttgagaaaagtgaagaagtggtctattcagagagtggatgcgactccagtctttacaaagcgaaggtccaagatggatgctaacgtggcctgggagaggctcgtggctggaccaagcacagatactgtgtcgcggtttctgctggacattgccagccgacgaccgctcgtggaagcttcaacagcggttgcggccgccatggaacgcgagttgtcgcggtgtctagtggcgtgatcagttgtaaccacgtaaaagataagggtggattctgaagaaatgtggttaatttacgccaatggtacttattggtgatggtgacggggcaatgatccgatcaaaatatacgaggctacgatgagtggtggaaaaatataaaaaaaataagctacaaaaataaaatatgatatatatgcatatcgtattatcgtatatagtattgtcagatactgaaaattttggcataacggttattcagtattatcatctacttttttggatgtaagtgagactgtgagtggaatgctatatttggaaaatgaagacttacccgccttttgtaactatttgatttcaataatataacgacgagtaagctgagtggggcttaaagttggtacgatttatataagtttctatctcatgattaataatacaatttgttatttctaaacaggggaatattaaccaatattaaaggggaaatcttgactgctgacccacttatgtatataagtttataaccataaattatgatcaagatactctggaacaaaaaaagaaacatttagtagctagctatatatagacaaaaaattttttgttaaagaagctattaaggacacaaatttctaagccaatgattttttctcttccaaaaaagaaaaataatcataaaaattatacatcaattgttttttcatcttagtttttgctgatttaaaaaacaaaaaaaagaagctaaacaaataaaattactataaccactcaaataaatgatacgatttttccttcaatttcttgtaccaacaaaaagtaaaaaaaaaaacaaatatgatacgatccacaaagtttgataatatatagcagcaactttttaggtatagaatccgttcaaaaatattaaccagtttgagtcggaacaaaacgaagaaaaagaagatttaatatattattttttttggtaaagagaagaataatagtagtagttattaattatattatactttaaaaatgagtagcagcaattagcaaatgaccgtacagtaagaaacagtagaatgcgccagaagccgtacagagaagcccgttgacaaatatgtgcaaattattcgattcatcatgtgagtgcccacacacacacacacatatcaatcttagttttcttaatgcgttcttaattggaacccatccattttttttattctctctactaagcccgtgtgcgattggcgtctctcgacgctagtggccacctttttttggtttgttttattacagtttgctatctcattgctcttgtcataattataaaaatatgttccgtaacaaacaaaattgatcactcattttcttttaccaaaataaaataaaattgatcacttatatcctccttctaacttctatatgtatactttggtcttcttggcctggtaccatgtattggaatttggaaacttatgtaggtgtgaatatttgcgtatatatatgatcttgacgtagattttgaacctataagatataaggaacaaagtgcaagaagacaaataacaacttgccaacaaaaaaaaagaagttcgagtaaaagaatcacatctttttagcataacccgaaaatttaaattctatacattggtcccatcaacgcgactttttttttattacagaaagtaagattccagaatctccgtcttcccttgtttaatgaaccgtcatctgttagt

SEQ ID NO: 37985 - DNA, 2156 bp, Arabidopsis thaliana landsberg
ctttgttccattcgtagcttttcaaactatgcttatatttttacaataccaatacataaaagttgaaatcgggaattgttttatcagaaaagtagtagtgggaacattatattctcaatggtggactattaaagtatgttcctttgttccttctgattataaaagtatcgcctttgtgtgttccatgacattgttttctgggactgggaccattagtaagttcgggttaagttatcgattttctagctgaggttgttcctggttactttggttttctagagtctgtagcttgtttgttctatttgtttgcatttatgacatctttattttttttccgtttgtagattaaaagatgaacccaaaatttcaaagtatgtaaagatcgctgcaactctaccggataaaactgtaagggatgtagcattgaggtgtagatggatgacggtaagttggttaagcttccttgagctatgtgcatacttcctgttgtttatgtgcttttgcttagatgacaagaaaaattaccactctagacgtctctcaaggatatttcttttgctagggaattacttagttgtctctagcattccttttcaagtggtatgtggctgttatgggaggatttttgttgaaggatatttctgtcactgttttttcttttgctaaatatgagggaatcagcatgatgatgcaatcttgcgtgtgtgcttcgtgataaagataaagtcctacaaaaaaagctagcggttatattgatgaaaagtcattgacatgtcgtaaagattgtctaaacactggtaaaggacgagcaaaaagagaaaatgacaagtattgctgacgctagattagtctttatattagctttcgagtccatgattgtggaggaattattggaaaaggaaataagcctaacgctttttcttaattatttctgtagttatcctcacatagattttacttttacgggtgatggctgacactgatccctatacttttatggttttttttttaaaatgattatattgctcgcagcatgagtttacatacatcataatgttaattgcttgcataataatgaaatgaattaatgaagtacaaatgtacaatgctttattatcatcatatatccatctccttcatgtctctgtcctttcataattgacttgagttttcaatcagatatatgatgtaatcaaacataaagctgcaaaattactccgttttcttttaatttagtgcttgtttgccaccagatatctatcatggtctttaaagttctcttggctaagtcgggtatctattttcacagagaaaacggaggaaacgagaggataataatgccgctaagaacattagcactaggaaggtatgcttgcccacctcaacctttcttgtgtcgtatttaccagttaataagtcgatggaggtaggtgcctcatttacgttttgggttaaacgggattttcccacagatgtgacttttattcatgcaagtctgagctaacgatggtatttttcaacgaagaaactgtaattggctaaattgcttgtatggtggacttttcatgagaacatattttgttagttcctgactaagaaaaaggactgtctgcatgactggacaatcaataaagtttgtgatcgatttttcaatgactgacgagcagcaaatgatgttgatccaactctgcagaagtattagcatatattacttatgagtatctgagcttgtgggcatgtttataatgataattataaggtaatctagtgattgttatgacatttgataaagggttagtgtgtgtgtttcatttcatgcacattctccttcctgggtcttatgaacttctgtagatcaatatgcttttaaacttggttctaaagaccatgcttcttcatggtaaggtggtggatacatccccagaactgaacatgctatccaatgtgccacaacaaaatgctttatatgtcctgaacaatatgtgccacagtacacgcacgcctttcgaaggtctagtgctcttttaattctttgctcttcttctggggtgtgtggtcttaaaaataaacaaaatcaaattgtcagctaggtacttttgctgactattccaggttaagtgagcaatatggatctttacagcaaatgctaagcttta

SEQ ID NO: 37986 - DNA, 2347 bp, Arabidopsis thaliana landsberg
ctttacgttggactccctcttatatatcttgcgtagtagataacgtaatctactcttacggaagatctagagtgctcatgtggtacatcacagaggaaagattgtggagatatttgaagggtttgaaaaaacttcctaaactaccaaaggattgtacttgtgttagactgttgggttatagtggaaaggttgtggttttgtgggagaagaatgtgggtggtggagaccctcagaagaagatgatttggtgtgctgagattgcgcttgaaaggcgcagtgcaaacaagatttatgggaagattgagtggtgtgatgttgtgcttacattgcccaggtcatgttctttattgaattttgcggctgttactgtttgatgaatgaatcattaacaccatttttttatttcctatttgattgaatgattttctatataatgcatctcactttgctcagttatgtgtttccttcttttctctgtttcaaattcggtttgtgtaaaagtccttttcatgtgaatttagaatggttcaataatactttagaagcttaactagtttcgatccaaatatcttgcgaatcagttcatcattaacagtctaaagaataaagaaggaaattttacatatttgttcgatcctgtcacttgaagatttcctaataagtacatatccaaatctagattgattacattaagagtcacggttcttattcagttaataagtttagggaacatataagtttaggtataaagtagtttaacaagaaaggctctttgtgtttgatttacttgtctaagggttttgtgctaatgatgaattcaccagttgatttgtcttctcttcctgatgatttacttttgaactgcttagctcgcgtctcgagattgtattatccaactctctccttagtttccaaaacttttcgatctatcattacttcaccggagctttataagatccgctctctcctaggccacgccgagagctgtctctatctttgcttcccttacgacatgaacacgcattggttcactctctgccgggaacctaatcgaaacgttgccgagaattcaagtggctatcttctggtccaagttccatctcccaatggtttacttcctgtgcattcgtcgagtgtcatagcccttggttctaatatctacaaaatcggcggcactaagtcttatagacacaaactctggaaaaggacgcgctattcttcttctgtctctgtcctggattgtcggagtcacaggtggcgtcaggctccaggaatgcgagtggcccggggctgttcctccacagtatgtgaagttgatgggaagatatatatagcaggaggctgtaaagaagacatcggttccttgtactggattgaagtgtttgatccaaaaactcaaatttggggcactctgaagaacccatgcattgactatcaacatgatattggatatagatgtgaagtcaaaagcttaggtcttgatggaaaaatatacatgtttggaagtgagtttgtggtttacaattttgaggaagatagatggaaatgtataggccgagataagtataatttgtatcatgcagtagaccctatgtctcgcataaactctagttcttgcgtggtagacaatgtcttgttcattttggataagggaactcgagtgttcaaatggtatgactttaaggtaagtttgtggaaggaattgaatggtgttgaaggattgcctgatttaagtgaccgtgggtatgttaaaatggtggatcttggtggaaaattagcggttttgtggcaagagtgtctgactaataagaaaattaaaaggatttggtgtgctgagattagccttgaaagacgcgatagagatgagatttgggggaaggttgagtggtttgatattgtgcttagtgtccactcgtctttttccttgctctgcgcggatgctatttccgttgttgtttgatgaaatgggctaccatgagattaggcttgaacggcttatatggatagtttcattttgttttgaatatttttttgtgtttcttttctattagtaatgagtattgactatgatgaatgatttttttttcatggtgttttagtgaactgcaattttacattgtttaaaacttctaaacatatgcgcttacttgtagacgagctagcttattttgactaaatgcacatgataacacttttgttgtgttgcacaaattaaagggtacggttcttgttacattcacgagaataactaaaacaagacaacatggttaagtgtttgttagtcactggaggactcttagatgattcttacctataaaaaaattagaaaataaatagagaaagtaag

SEQ ID NO: 37987 - DNA, 2345 bp, Arabidopsis thaliana landsberg
atacagatgaaggatcctaaaaacctgcctccttctatcaagaacttggttggaaaaacatttcaactacttgtgtgtgttgagaatgacaatttttctggaagtaatgatacctacaaggttggtaaggtctggtcaggtgttgacaatgtgaagatagaggattcatatgtcctggtttttactcatttctaacatagtttcagaatagtttttagagtctttctagtctttttcgtatgttttgagtcatttcaggtgcacttacacatttgggagctatgaagcataacatggaatttttgaggcttttcagcaatgaagattatcaaagacgttttttcacgcgatggtgtcgatcgacaccacacttatgtagatcgacacccttatttcggctgagggaatttctgatttctaccaagtctttgagaagccttgaagctttccttatttgcaaagtagttcctggacgtttttagtcactgatatacttaattatttggtcatttgttagacctaagttttgttttagagattgagatacattttgagagaagaatccaatcactgtagagaggtttctgaactctttttacttctattctaattcatcaatgcaaactattcagattatgatttgtgtttatgttatcatgtctaactaatcaccttgttgggtttggggagtttcaatcgggatttagatgaattagtagatcgaaaacctcttaggattattcttagatttcttcatcttgattattcttatagctagttttagattgatcacctagaacttgatatgagataatcggtatgcccaccataggtacttgttgtttgaactattatagatgagcctaggcatttaagaaagaataggtaggctcatagaagggctctggtttagatactaggtgaaataatcaagcttgataataatgcatgctttagtataggatttctcggcttctccggttatcttagctctaagtatagagagtctcgcggaacaccaccggttactctaaaatcatagtttgggtttgagagcggtgcgataacaatcctaatattagctagatctacaatttatctatctctcgagacaatgaagccttactcttagacctgacgccttaatcacttgaatctacaactcatttacttgcttatttgcctttaatattcaattacttcatgtagcttattaaacaacatcataagtctattgtgtgaacatcgagagcttagtggaattcgacccttaagtgctaacgacgatctcttaattgagggagtaagcttaaggcaatttgagctatatcaaatttggcgccgttgccgaagttctctttgattcaccattagactaggtgtagaatttagactaagcttttatttttctttattttgttactcacgcgttttctttcttctttttcctgtgatagggtaattacaagatggaacgcaacaaactgcaggcagatttcgccgagtgcgtcgaccgacaccaacagggtgtcgatcgacaccttctgcataacaaaccagctaccataggcgacttcaacaacgctgatcttttctactccaatcgatcagcgatccaactacctccttttgcaagagaacactttgctattcaccctgcatactatactcttgtttcacgcggaaagttttgaggacattctaatgaatccccactagatcatctagaagtctttgaagacttagtgtcctcaatcaaagcagatggtgtacaagctgattatcttctttgcaaactcttcccacactctctcgcgggcagaggaacatcatggttgtgacaaatagaagcaggttcattgaaaaattggactgacacaaagaacgcattcatgatccacttccttgatgattcagtgacaaaattactaagggagaagatctcttcgttttctcaagctccaacagaaggtttgaaggtagcttggatcagattcaaatcctatcagagggattgtccacaacatggtttctaggaaagcaaactaatcaacatattctttcgtggaatcgataagcagtatcggttatgttttgatgatgcaagtaatggcaatttcatgacaaagactccaactgaagcatcagttcttgtcaacaacgctgtcacaagtctctccacaaaggaaatagactatgatcgaagaaaatttgctgaggcttccgacaatcacagagaggaacaaggatctacacgcattgcttctccacctaggaaagatcgtggttgaatttactggcaagtttgattctctctacacagatcttaatgggaagatcgacaa

SEQ ID NO: 37988 - DNA, 2646 bp, Arabidopsis thaliana landsberg
ctgatgacgaggttcttgcggctctagctgagacgatgaagaaaggaacaagctttggtgctccttgtctcttggagaatgttttagctgagatggttatatcagctgttcccagcattgaaatggttcggtttgttaattctggtactgaagcgtgtatgggtgtgcttcgtcttgccagagctttcactaacaaagagaagttcattaagtttgaagggtgttatcacggtcatgctaacgccttccttgttaaagctggtagtggtgttgccactttggggctaccggactctccaggtgtccctaaagcagctacttcagatactttaacagctccgtacaatgatcttgaagctgttgagaagctctttgctgcgcataaaggggagatttctgcggtaattctcgaacctgttgttggtaactccggattcatccctcctactccggaattcatcaacggtttacgccagcttactaaagacaatggtgttcttctcatcttcgatgaagtcatgactggatttcgtctagcctatggtggagcccaagaatactttggaatcacgcctgatctaactactcttgggaaaatcatcggtggtggtcttcctgtgggagcatacggtggaagaagagacatcatggaaatggtaaagctagagttgttaacaattgaaccgaataatcttttgaatttgctgcaagagattgagaaagtcctgatcctttatcactcatgtctttttgcaggttgcacccgcaggaccgatgtatcaagctggtacgctaagtggtaatccgttggctatgacagcgggtatacacacgctgaagcggttaagtcagccagggacatatgaatacttagacaagatcacaaaagagcttacaaatgggatactagaagccgggaagaaaaccgggcatgcgatgtgtggcggttacataaagcggtgatgatacggtaaactgtcttcagagaaggacgccattattgatttattgaagcctagataagtgattcttacttatagggaccgaagaacaatagcatctaacaagacatctttgatctatgcatctagctcgatggaatcatcatcattcaaccacatgatatgcctacgctcataacaaattgtaagattagtgtttaaacgcagacatgtctcttgaagatagaatctcctacatgacggaatggaagaaatccttggaaaatttactcaacactattaatggtttcttaatctatcacttttctcatttaattatcttaattttatcatttcatttcttgctttgttttcacttctttttctgaattcataatgttattcttttgtatttatacatacataattttcaagatttaacttatgtgtatcgtttgcacttacaaaacccaattatttaaaacaattgttgcgtatcatctccggaatataaccatgaccatcgaattaatctttcggatagttttgtgtactctagagatgatagtactataaacatgtttcagtttcaatctcttcgctttatctaacaaatcgttattgtagccagtttgctaatattggactctttttaatatgaaatgcaagaatatattttcataattcttcccttctcttttgtttgcttacagatgtgagtttcatgattgacaagcaaatcaaaacggtatatgtatctggaaaaattgatccacaaaaaatacttgaaaagatttcagaagaaggcgtatatgttattatagtatggagcaataacggaaaaaatgaacagccgtcgaatcaaaaagtgtatttgatggaacaatgttatgcgtcgggatacaggaatactcctaatggtttctcaaatcctccacgtaattatagtccaagatattcatttgtgtattacaaaactaaaataaaataaagatatttatttgtatttttgggagttcatacttgaattaatttatagatgacatatacaactttcccatttgaaaaagatgtttccaaaaatcataaaacaagaaagtatctaagttagagacactaaattaaaaccaacgattggtaaccaacgatgacttcttacaaatcattacatattcgaagaaaaaacttgataacaacacaagtgtaccaaagatataatcaaataatcgaattgacggattgatgaactatgagattataagagacaaatttgtgtacttagtttttaaattcagccgtaaacacttacctcggaagacggatgagacgacgttttctcatccctaatatctcacattccaaagagcaaaaaatcattctatgagttgatcgattgctatgattgtagtaatatgtagcattccttctgtagccttcgtagaagatcaaaccggtacaacggttgtgacacatataacagagttgtcgagtgttactattgtttcgaaaaacttgcacctttccataataatcacgaaatatggaaccaggtttcataaagacagaagatccaaatatgcaatgaaggtggatggtgatgcaacatttgttacatgtgtagaaccattcttttggatccaattgtttttcacacacctcgcaccaatacgtgttatccgcgctttccccacaaaaagggtgagag

SEQ ID NO: 37989 - DNA, 2304 bp, Arabidopsis thaliana landsberg
tgctctcagtagacaacaaccgatatggaccccttggcaaatgatttagagggaagcaaggtattatatctattttattctagtcagattctctagtttggcaatttcaaataatcttatttcttttttaatttaagcggcctgagattatatcagctactgaagcagttacctctcctaaacattcgattgttaatgaagaggttagttgacattcgttttagcgaaatcattataatcttattgtagtaaattagttgttaacgattacttgtttaagttctcgtgctctcagcagacagcaaccgatgtggaccccttgggaaatgatttcgaagaaagctaggtattagatttattttcttctagtcaagtagactagtttataaaaaacttttttgtttgtctgactttattcttttgaatcttcgttctctagggtgtctccgtgtttggcgaagattctgttggcaacgagacgtctgcggagttgccagatatcttggttagcagctaaattgctatcaatattgctatcttgtccttagaactcctttcccaaattcacgtcttctctttctgtaaggattaatattggcgtgataacttattaggacctaaaatatacctttttcgggggttttagtttgttttcaacatttttttttggtgttttaaaatattaatcctaatttcttttgaggtacttatattgataattgatttcttcacagtaaccagcctaagttaaatagataagtttatcgcactaactataatattaaagttaatccattattacattgtttttctatgactattctttgtctcgaatacaatctcgtcgtggtctttttggcgtgaagtttagttatatccgtcacgattttactatggttattaagaatatccataaaagttttcaagcggaccatctttttcaccgggtttgttcatctcgtcttttacaaaactctaattaggtccctatgcctgctcatggcggtgttgttgggtatggagatgtggttgatatccccgatggtgtgtcggtagatgtgccaggaaccattgtcccggttagcttgataacattattagtatcgctttaacatatcattcgttgccaatcgataacttttgcttttgttttggttttaataggctttttgcaggggtgccccttctgctgtttcatctccccgccaggttatttatttatttttttttccttgtctgctaatcatattgttactgagttaaatttctctcatgtaaattttcaatttgtaatcgttcgtccatgcgccgtggttggtttgcgcaggattcagatgaggtaattcgtagtggttgcgctgttaattctttggtgatcgattaggttttttattaatgtattccatttcaggatttcacaactccacccccttctaaagaagcgatgcccctctccaggcattcaactttttttttttttttactttagctcatggagctctgtttttaatattttacattttaaactacttggcaaacagaattatggaaatgttgataatgtcgagggtatgcgtggaagaagaagtaaaaggctccgtactctctctaccaagttagatggtcggttccagtacgacaagaaaacgaaattgttagttgggcatccatcccctgttattaatcaggtcaacgtcgaccctgaggagcgattccaaaactcactgaagaaactcaaggcgataaggtttgttttatcctgttttttaattgtttagtcaatacatattttgttatttttaattatttccaggggtaatctttcagcttgttttctctatagttctattagcatttgtggtgggattgctctatctaataaagacattttggacttaattgaccgcaagaaaaatctgacttccaaggtattatgtctgcgatatatatgcgcatttaattttaaattgtttttctcatttacttaattttttcgtgttttactcgtgcccacaggtaatggatactctcataagattgagtcgtcatctgttgcgtactgatgatgtggacggcgaaaaacttcgtctcgaagttcttgattcgaaatttgtttcattgctctgccggcatttcacgtagttttccttatgcaactcaaaaacagagttccagttccctttacctctaattgatattctctccggcgttggcgaatctgaccgtgtgcagttattcacggaggctcattacatatatctgccttttaacttcgacaaaaaacactgggttgctttagctgtt

SEQ ID NO: 37990 - DNA, 1911 bp, Arabidopsis thaliana landsberg
  unsure (1)..(1911): unsure at all n locations
ttatgatccgtgctttatagatatccatatccactaatcaatatttaagaataataatgcaagattagaaatattttgaaaaccaactttgagagtctatatatataatttcaatttcatatccgagtagatcgaaaataaatgttgaatttagaaaattttaccaccctggcgaaatcatgttatatttgaaaagtttttagtttacatatgcgtttttagtttttgctggatagattaattcaaatgatgaatagaaacgtaaaatattgaaaggctttggcttcttgattatcaaaaataaaatggtagcagttgttttataatgataatagtcaatttacaaaaacccatagacacatcaacacataaaaatattagtttattgttcaaaagagactggagcaccaatcttgctacctattctacgaacacattcattccatgcttgtttgctctttggaatgcccttagatgcaatatttttatactcatatgtggcaaatatgagtttaaccaatcctagatggcaatctttgcccatcttcaatatatcacgacaacattcttccgtaattggcattgtctcatttaacatgttcttgaaaacctcatttccgcattttgaactcggcttttcagagcaagcctcaagaaacttgagttgtttgtccgagtaatggtgagcaagctccctgtcatattccattgcgggtgaattagcttcttcgaatggagcttcatccggagcttcgacgtaatcaaaatctgaagatggagatatggccacatcttctggcatttcctgtgaataatgatgaattttctgggagcaaattggacaaaccatataaaatattattatatatacaagcattaccatggaaaaagactttgccatatttgtttttagttttagatgtaagattggtgacatgaaacaagaaaagaagagatgttataggacaatcggtaatggtatttaattgataaaacatttattcattaatagttttatgttactgatatcataaacctcaacatttaatagttttgtttagaatatgtttacataagaaacttataagattttcaaatgtaacttttaacattttcttggatcgaacatattagatttttgcgaaacttgacaacaaaaacactttttttttcttcaaactattacaaattaaagtgatagattaaagataaaacaattaancaaagaaggtttaaatgattctatttgttttaatgaagatgattatgaacgtttaaatccaaaatgaaacgggctttatacttgcgaatatctatgagccttacatggtgataacagtaggtgttttcgattttactttgggcttattgttaccttttttcgtctcgagtttattgattagttggactactgtaaatctttctttgatccatcctaaaccgctaatagaatttccatctatatattccactgttagttagccctctaggccttagcctactccaatttgttccacaaatgcaagtttttgcttcatcatggagggtcgtctttacaagtgattcagttcagacgctacccattcttatggagtaccaattacaaaaatttctcctttatggagaaatcaatcccaaataaaaaaattcctcaaggagaggtcattcttgcaaaagttctcctttatggagagatcatccctaaatacgttctcttttataaggagatcaattcaaaaatttctcttctttatgatgatagtgaattcaataatagcctctgttttggaaaaatttgttataagctctatttctgtttcagtcgtacgaacgtttattgatcactaattggtcacgatgttgagtttatggatacaaattaccaaaacgagattaanacaaaatcacaca

SEQ ID NO: 37991 - DNA, 2124 bp, Arabidopsis thaliana landsberg
ctgctataagctgaattttcaataattcggtacttgacattgacaattacaaattgtaaggtcttaacgtaaaaagtaaaaacggaaggtagtttattttagaaaataaaaacgttacactgtttaatacaggagggaagatcgtaaaacgtcacgatgttcactataggaatacaagaacggtagatattatgttgtggaaattccggtaggtattatgttgtggaaattcaatacggcaggctgttcattgtaggaatatacaaacggtaggtattgtgttgtggaaattcaaaacggcacaatgttcaacattggtgtgaagaaaaatctcataatttaggatcaatggctgataaaaaaaaaatcagatctaaaactttctccgtcgtcgccgtcttccttcacgagctcctcctctcttcctaaacttcaatctccaggtactttttttctggtctttcattctgttattgtgtttgcgatggcttcaatttcagtttccaattttggtattgaattgatctttgtaatttatcagatgaaaatgaaagatagtcgttgcacaattatacgtttcgattacggaggatgttattcgaagaacggagatgatatacgatggaatccgaaagaagatcaaatctatactttagtgatgaaaggagcattcgaggagtttacttattccatgttggttgatagagtatgcaagaagattagtgtagatgaatccgcgacgatgttgaagttaagttacgttccgttgttagaggatccgaagaggcaaacgtatatttcggatgatgaagatgttttaggatatttaatggaaggtgatagtaatcagcggaggaatgttatgcatgtggaagttgttattgagcaagtttcgggagacgatcgaagaagtggaattgcgaatgatgcggtgttggttaatggtgagaatgatttgagtgatggagttgcgtatatggataattatgagatgtttgttgatgatgtacaagtagatgaggaggttgtgaatgttgaatgggaagatgggattggtttgagtttaggtcaagagtttgagagtaagcaggaagttcaagatttatttgagaaagctgagcttctgaactcttttgaggctgctataatcaagtcatcacctggattatacgtgtagaaatgtcgtgggggtagtggttgtaaatggtatctacgagtttttcatttttagaattcggatcgtttgtctgttgggacgtaggacaagatgcatacgtgctctcggataactactagtacacgaagatgtaaaagagtcgctacaccacaattagttgcatctgttttgcaagagaattttccagaggggttcgatacactaagaccgaaaaacctcatagatttggttcgagaaaaacatggcgttaaggtttcatacgctactgctttgagagggaaaaaacaagctgcaagagatttgcgggctaattcacatactccgtcagattgaagatcaagtaaacctttgcattttttttttatctcatgaaaccaaacgttgaggatttttgttgaaaagagtccagtttaagagtagtctcaaattgtgaactcttgcacagttcaagagtctaaaaatgtctcatgctttggaatatcaatcttttgctggcatcattaaccttggattcttacaaaaaccaagcaaacaaattgtgtgatgactgacacagcatttatgctttattcacaggggactgggtcgaattgacacatctattataggtaaatctcagacttcaaacgttctcagaatctaaatacaaaaagctatgactagacccaatgacagaatacactagaatcattggacctttgattgtttcatattccaaaagcatcggtttcaacactaagtaatatgtaaatatatgatatatcccttcgtttattcttgggcgctccactgtccacacaaacaaggattatccacagcacgagccacatgcaggtagggaatctgaaaaacatcagatttgagtcaaaatcattcacaagggctatgcgtgttttctatcatcaaatgaatcaaatatgaaactcatagccggtgacttactgtgg

SEQ ID NO: 37992 - DNA, 662 bp, Arabidopsis thaliana landsberg
tgactggaatctcaccactgcacatagtggagcctacttgaactataaaagtaaacatgcatggaaagtggaaaaagtctttttatgtagtccacctaagttttctgtgtcgcgctcatttatgtgtttgttggactcactgggaaggttgagaatattgtctaggcgtctagccaataaagtgagtatttatacactttaccctgatgaaagctgttggtgctttgctaatatgtatgctgtactagttataagatcatcttcgtgtagcaagggtccatctgattgttagttttttgtgaatattactacctttttagatttttgttttacttttaattatttgtatgatcaatttagtcttggtttgcgacctaccaagggagtgcttattcatggacctccaggcacaggaaaaacatctttggctcgaacctttgcccgccattctggtgtcaactttttctctgtgaatggaccagagattataagccagtatttgggtgaaagcgagaaagctctacatgaggtacccacatctgctacccatgctacaccagctgcggatagaggttcgcactttcctctttattagacacctaagatttaccaggatatttccatattcacttgttaccccaacagtggatatcttaccaagt

SEQ ID NO: 37993 - DNA, 3371 bp, Arabidopsis thaliana landsberg
atgttacatgtgatgggttttgaaagtgaagtggttatgccacagccaatagatgaaatgtctttgtcctggtcggaccaagtggagaggacactatatgtgtgcctcgaacttcatgtgtccaaccaaagtcaaagccctctagatttttattgcacacgtatagatgtatatatatgaatgtgtatattttttcagatatcatgtataataagatgatgacagaacaacgacgttagtataatttagtgcgttacatgtttttttggttaaaatgaaaaaaaatagactcaaaaagaaatgtttttacaaaagggtttagcgaggagaaacatataaaatggaagacaacctaaaaccaaaaaaaaaaaaaaaaaaaaaaaggatggaagacagccgcatgatgttggcgtatggaataagcatggacatactttcctactaaatgataataatagtaaattatatattttttcttaattgaagatgaaacgcgtagaattggttatcaaactggctttcttttattgatgaactcgcgttcgtatttatacaagagagtctccacaggagataaacacagatcctaaaatataggtatcccaaaccttatcacaaagggatttaagaccttaaatcctaattcatattgattcatatctatcctccaatattcccttatctattttaaggaaaatcaaaggtcccaaaaatccacaaatatttttttgttttgattaaaaaataagttgtataccttactatatatattcctagatgcgttagtggtgattcacattcgtgaattaagtgagtgccgaaaaaaatgattaataattggaactccacatttacattcaaccgttggtggttattcgactaagtatattttccatcagtgtaatttgtaatcgttcatttttttgtcaaaatgtttttgtagtcaaattgacatagagttagaagagagaatggaatatttttagtcaaatagtatttacataatgttatgtcggaggacataaagactccacgcatttagttttgatcatgttaagttggaaataacaacaaatggtaaaaacttgattattcttaatgttggagatcatgctacaaacctaatgttgtagttgatttataggctgtgagagaaatctcagaaattttaaaatgaagatagatcgtaggtttgacaaataattgtactagaaagccacatggggattatggaggtatttgttaaaacctaatgtttgacaaatggagttttaaaatgtaatttgagttatgcacaatatagtaagtctataaaactaaaccaaacaaaagttcggaagatttgcaatatatttaatttagatttatcatttggattttatgagaagaatagttctaatataaaattatctaaaaaggccaagatatgaaaattagtttaaaatcaaaccattacaagaaaacaaaattcattggccttatagtttgttgaaaaaaatacggttcaaaagttaatatagtgatcccaagtgaaaatttcttaatttaatttgagttatgcacaatatagtaagtccataaaactaaaccaaaaaagtttggaatatagtaatatatttaatatagatttatcattttgattctatgagaagaataattgtaatgtaaaattccaatttaattatctgaaaaggccaagatatgaaaattagtttgaaatcaaaccattataaagaaaacaaaattcattggtcttgtggattgttgaaaaaaatacgattcaaaagttaatataatgatcccaagtcaaaatcctaaactgtccaagcagattaggtgccttattgtagatatatgctgccatcttaacctgtataggttgaaatcacatatgtcattgaaagttataccaagcgttagacattcaaaaaattaacacgagtacacgacgcatctccaacttgtaagttttgagggaccctgcagacactactccttttgaatgtaaactgctcaaacctatgttcaccgattgtagtaggaattagcacgttcatcattgctggaatcattctcgtaaacggcctacaacattctaatcaattctattcagtttcttgtaacgtatcccacaatgatatcatagcaatcaatgtgccccttaatctggtccatgtgtagtgccacctagtgatcgcctcttgtttggtgaatcaaatacaagtgattcacatcttctattcacttcatatttgtctgttgattatctggaagcaaaccatttccataaatgcaatgcgtttgttgtggaatgggcagggatttcgcttgtacctattcctaaggactctatataacgcagccacatgttgtacaaaaaaaaacaactcagacaaaacaaaataataacccagacacaatataacataacttagacaaaagacactaataactcagccataatgtagcataacacaccaataactcagccataatgtagtaaaactctgacaaaacacactaataactttgctaatgtaatacttacactatcgaacaaccatccatattctctggttggtcagtgctttctttcagagatgataaccctgtagaaatcaacatcgtctgttgccctgcccaatgggagattcctaacagataaacacaagttaatatacagaaataatgttaacaagctgtaattaacaacttaatatggtataaagggtcatactagaatggggataagtaatccttaagtttctacaatttggctgtatcagccggtgatagaggatcatatattccagctgaaggcacacaattcttcctcatgcacttcagtctgttgtctccagtataaggaaaaacccgtgttgagagattaaagagtggattcaatgcactcccatccgtagacagcttaatattctgcgtctttaaagctttgattatatcaatcctcatcttttcctcctcatcatcatcagactcagggaacgtgcttccgttttcaccgataaactggtatgtgacatctcatacgtcactgtcaccttccttctaaccatcattgacagtgttttcgttgacttcctcagcttttttagagacaacaacacactctcttcacattaagagcaggtaattttgtttcatcagcttctcccttctcattaataacaagagcaggatatagttatatggtcaactttttcgccttacaggttttctacctctcttacctttcacggttggctctttgatgatttgctctttgacggatttcttctttacctcttcattctttttggtatttctcctcgtcgtagggcgtaatttcctataacccagagacttctcaatga

SEQ ID NO: 37994 - DNA, 2999 bp, Arabidopsis thaliana landsberg
aacatatataccagattcgcaagagaacttacagcttctgctccttgtttaatcaaaacgagtgattcatccccaacgttttccatacaatccattctatttttcatttagacatgtcacctttcccacaacgttggtcttagaatttatctcaaaaccgccttgtgcaaattatggcatcttcaatggcgaattgaagctagacgtgtagaatagctttcaagcctgccttcgtcaaaccctaaccctagagaagaatcgcgagaaaggcccaagtgtgacatggtcattctaaacctagtaaataattgaatttgggccagggagagaccggcccagtatatgatagcttaatattagcgtttcattcattaagcctttccgacacgatgtgcgtggaaagcgaaaactacaggctgtgcatgttcaaagatttagaacggtggaatatgtggagtttggcaaaagtcccacatcggtaacaagaaacaaaggaggcttctaaagctgagtataaataagagagtcatgactccatacaaattacttacctggacggggtcaactcgcgatcaagaagacgagtggcctaggctagtgacttccattgcacataccggaagggtgctatgcttaaggtcttcccttgaggaagagcctacgtcattatttgtggcagagggggtttgcgttcgcgcagcccctaccattagttccagtcttgaatgtttttttctaactaacaattatcgttgtaattgtgacagtctttgattagttctccgattgtggccgtcttcctcgccccctagcaaacccaatctattagttagtgattaagacagaccagattagaacagtaccaaactgattgtcattaataatggacgtgtatgttatttttaacaatgataacgacctagctcattatatatatgtcaagaaacagaccacattgataaacaacgaccatcttgttccgattattcgatgaaacatgaaaattctttaactgtatgcacacactcgggtggaatgagcaaaagaacacaaatagcgcaatcgctacttcctcaagctgcgtttccggtagtagtcccgatagtcttgagatcaagctgcgtttacggtagtagttccgatagtcttgagatcaagctgcgtttacggtagtagttccgatagtcttgagatcaaagatctcgatccagtagccatcaggatccttaatgaaggctatattcttcatctttcctgcaaggttttcatcaaataaaggattaaatatagactccccaaacagagttgcaaaagaaaaaagaaaatttcaaatgtttattggactcagctggtaatagtagtaccatcgtttggtttcttggcaaactctactcccaattcttcaaatctctcgcatgccttgtgcacatcatcaacggtaaccccaatgtgccctgtgacaacaacatagtttcttttttacatgtgtaataatattagacttgccattactcaagcttcaatttttaggcttattaactggttcatatcgatgctatacattctagccaccatatttaaagctcccctaaaacataacctaccgaaactctattcagttacttctgaatgtagagagataataagatagagatatttttaggaggaggttaccaaatccacgaggctcagagttcccattgtgataacctttaaactcaggatcactctctgtaccccagttgctgcaagtaaaattcatatgtaagaaatgttcaatccaagaaaggaaagagagaaagtaagggattagtatttgtttcttactgagtcaattcaattgttgccggttgaccaaatgtccaaaccgttctctctgttggatcggttggagctgttgtagtatcctgtaccataataaagaatcaaacccagctttttcaactctccactaaaatcagtaggattaagcacccaagagaaacatatctattcatctgagtggtccacaacaaggaaatcaatatttcaaaaaataacaatttaactccacttaaaatatcaatagattgctcgcaaagttccatactttttgttttactagaatcacctctagcttagtgaatagtataactaagtaagggtcaaagttctacctcgtagcccaggaagtacaaactaaatttcatctcagagaaatccagcctcttcagcaatctggcataacgtaaaatataagagcccataacccttaataacagaagaaccagtatgcttccatgaggaattcagaaagcagatgattcaagatttggaaaaaacttacgacatccccagcacacgtgagtaaaagtcaagactagccttagggtccttgatccgaaacatctgagagttacaaaaagatggaaaaatggaacaatatcaattgttgaagtggaaaaaagaaagcacaaaaaaatcactatctaaacaaaggagatacaagacggcttacaacacctaatcagagaggaacaacactcaaaagacggtttttccgaatgtttatatactacagggtacattcaatgaaaagacacattcttcaccacaccaagagttaatgaaatctataacttgattcaatctctagcaaaatttcttgtcgtttctagatattaagattatatcttcaaatgaaagctactttgatgattatcatagtttcatttcatccataatcaccaaatcgaaagatactatgcaaaatatgttcatgaacacaatgtcaagcactagagcagatcaaacaacagttctttagaaaatctcagtcaaacatgtaaactcaacgattaagcagctagataacacatacgaaagccctaactgagatcaaacatctatccttcaccttaagaaccccaagacatataacttccgatttaaatacggagattacaggtcatgatcaaccaaatcgcaaatagaggcggagtaatcttacaagtctgttg

SEQ ID NO: 37995 - DNA, 5886 bp, Arabidopsis thaliana landsberg
  unsure (1)..(5886): unsure at all n locations
actccgacaagtggttgtgtccccaaagctgcgattgatcaagaaaccaatcaccaacaataaccagctcactgatcagactaataataataatcataaagaaagtgatcactaccctttgaatcataagactaatttcgacgaggatcaccatgaagatcttaatttcaagaacgtcttgaccaggaagaccacggccgcgaccaccgagaatcgctacaatacaatcaacgagaacggttatagtaataacaatggcgtgattagggtttgttcggattgtaacaccaccaagactcctctttggcgaagtggacctcgaggtcccaaggtagattaatcacacttacttcaatcgaaattgtcttgatatatgtcatactatctatatctacctagtttagttcacatttttaaaattaatagttatatttcaagaatgtagatatttaatttatctaaacctgatacatcctttaaacattaatactttaatcaatgatactcataagtccaacattctatgattttttttttgtcatctacagttcgcatactaattttcatttatcattgcagtctctttgtaacgcatgtggtatacggcaaagaaaggcaaggcgagccgctatggccgctgcagccggcgaccaagaggtggcggtagcgccccgagtgcaacaattaccgctgaaaaagaagttgcaaaataaaaaaaagagatcaaacggaggggaaaaatacaatcactctcctccaatggtggccaaggccaaaaagtgcaagatcaaagaggaagaggagaaggaaatggaagcggaaacggttgccggagattcagagatcagcaaatctacaacttcttctaattcttcgatttcgtcaaacaaattttgcttcgatgatttgacaataatgttgagcaaaagctcagcttatcaacaagtgttcccacaagatgagaaggaggctgctgttttgctcatggctctgtcgtatggaatggttcacggttgatcagatcatcacaatatcctcattacaaaaaggtttattttaatagtaatatatagattatagtaatcataataatgattgattgttaaatcttggagtgattagtttagtttttgcagttggtctaatatcaggagtcaaaacattttataataagagtgtgtgagagtttaatatgataattaatagctctatatatgtttatggagattttggttttgagtttgttgtgtttttgttttccgatggaacgaacattagtcacccgataatgtgggtaattcttgttcatttacaagttttatagtactgtattgtgtaacgaggttggagaaataatataatcaattaagggtacttttatttatgtgtttatctttatacaatatacatatcatcacaatttagctcaatcataaatggattaccagctttaaaattgtacgtctagtatttggtatcattcaaaatttaaatatatttttgaagctcataatagtagtgtaatttttcttagaaatgctttaaattgactattttggatttaattgcttgtgagaatatactgaacacaaaatataaagatgagggtaaagatggttgatatgggataatatgaatgcgtatataagacaagagatcatgtgtgaagaagataatacgtttgtgttgcattttaagacgacgacatatttgcaagcccatatattttcttctagtttttttcattagattatctaactaatataagccctttatccaaaaaaaatgatctaaataattttatttcaaacttaaaaaaaacacatataggttgacctaagtctgaatcaacacatcaaaaaatacttttttctttcgctgctacattattacttagggtcatgagtagctagtacagcacaccaatcataaatatatcaaaaatgtaaaatgtgaaatataattattttttcactatacactattttaatattaagatccttatgaatgtatcattggtttataatggtcaatattaattactaatctacatactttagcttcaaaatatcactgtccaaaaaaaacaatcactatgtaaactacttttactttaaaacatcagtttggtctagtctatgactaatctatttttgttacagcaaattaaatcaactatatacacatagtacgcacacacacactgatgttaaataagcattttacaaaccataatttatacatgaacattgatccaatagatgcaagcatagctacaaagcatgcacttagagaatgttaactaatattaatattgaatcatacttataatataaataaaaaataacaaaattaacaaaaaacgacaattaacaaaaacctaatctgataactaatgatgtatcatgggatgaggcaaaaagcaaataattggcatttagagtaactaattaaattcatcaagagaaacagtaatggggtccctctcaattccctccacattcaaaatctaatttcaaccacaaacatatttttccatctaatccacaaaattttctttcctcactctttttcttcttacatacaaaaaaaaaatccactaaaaaaaatccttgaataccaaatttaaccaatcgaattttcaagtctgcgtgtgtatacctctgacaaatgccaggaacaatacaagtttcaggtaacagaattaaaggaagaaactttcgatttggggcattgtcctattaccacattaagcactaattgaactttgccttgttcaaatccacagttcttggtcttatcgatgttcagacatcttctccaggttcttcaaacacttccattaaaggtattaacttgaaatctgttcctcaaatcgcttttaactcgataaagttcaaatttttaatttgtcgtcttgtatcagttgctatgggaaagctagagtatcaaacttcagattcaggagactacattttgtaatttctctactgatccttttgaatttctaaagtttggaactttttgagaaattttgacagtttattgtttcttcttggattcaatgtggcacagtccagttacgaggctccgagagaatttgattgttactctgttagatgttaatggaaaccaaatattacagaaaggtgtgttctttttacaactctagagatcaaattagtggttttattagattttctgaatttgagggtttttggaggtagagatagagacaagaatgataatagagagtggtttcttggaagaaaaactttcattcaatggctatggaaatgttcaattgaaaatgcagtttgttctcagtgaggaagatcgaaatcgcatacgtttcttggtaaagcaaattcattatgttctgtttcattgagctctgcaaaattccaatcttgatgattccaattggtactgtgttttgattgttttgaaagagacaatctgcattgcgaaagaagcatgaggagcttgacaatggcagttcttttaccaaatctaaaagcattgcttcaggttaatctatgaaaagaaataagaattttcctttttttttttgttttttacattgttaagttgtgtttctaaatgtttgtttgtttttgctcttgctcttgatgagatgagagatttgtcatctttaagttcaatgcaatctctagacatcgtggctgttgctagttcaaagacaaatcttggtctgtctcaagaaacaaagctgaaagtaatgattagtagtcattttgatacagttttgtttatacaaaaattcgaaatattttttcttagatcactgatttttccacctgatgtagactaatgcagatagagatccggtttcgtcaaatcttataatgtggaagcctgaagtaaaagattcagtcgagaagacgaatattcaactatcttcttcagatgtttcttcaagcaagaaggttcccgaggttaaaaaactcgaaagtgtatcgttagtgaagcaagaagataagggtttgaacaaaccaagcaagaagcttatagaggccgagagtgtattgttagtgaagcaggaagataagggattgagcaaaccgagaaagaagtttacagaggctaaaacccccgagagtgtatcgttagtgaagcaagaagagacgggtttgagcaaaccggaaagaaagcctaaacggaagtcaatgaggcggagtatgtcagattcaaatttgaacaatgtgcggaaaatgattagcactttgaggtcaaagttactcaggtaatttcgaaaggttttgagtatatcagtctgtgatcaagatggttttcaaaatgttttggagtaagaatctctagatcttttaacaggatacaaaaattaggacagcgaagnnnnnnnnnnnnnnnnnnnnnnnnnnnnnnnngaaaactaaggcgcaaccaccagcggaaagcactgtgaatctagagaaatcggaagaaaggaagataataagctttaataatatggagaagtcagtgtgtagtgataacacagatagatgtgatgatttagtaatagtttcaagagatgaaaggacaatggatatagaggacaagagtcttgagcatagcactagaagaagtgacttgttaagtacgcaaagacgaagtttggtggtagaagtaagggatgatgagaagaaacagaacaaatctgtgtggttgaaagattctcaacttgagaatgcacgaggatctcgtctctggatatttccagatgaggcaaaagatttgtgttgcgaaacagatttaggaacaagacatttggatttggatttagcagaagcaaatttgttacaaaaaaggatagacgagtctactagggaaaacatcggtgaggtacaaaagcagtggtcgttagtggttgttacaatcttttgtatgatatatcttaaatttgcgtttatctgaaacattttcagaggggaagccgctgcataaacatcgcgaaaataaatagcaacaacaagtggaagaacattgagcgatcaaagaaacaaaagtctgagaactctgcagagtcagaaagttcaggacgacctgttgggcaagtgagtttatcaaccgacatgtttagggcttattgacaaaccaaaatcttttcatcatattgttgtaactttcaggtgatgcgtgcgttgatcgtggtgggttttgcaggattggtgtttttgacacgacaatgaacttaaacaggtttctgtccgcttaaaaatgaagccgttttgaactctgttttgtttcttgttacggacgaaagttaaagtaaagtagggttcttgtgttataagctttccctgatatttccttccttcgataatgctttctgcagatgagccaatactgcatttgagaggattggatcagttcttttaaacttatacttgtattattgcacatatttatagttttcaataacacgctttcaggcgttaaataaaatttcaagtttccaattcttcaggtgccaattgatcaaacagaaatatttggttaaatgtgagatacacgcatatataaaggggttatttcaaaattagtaccattgaagaggagtcctagaaaaaagtaaatttaatcggtctggttatgagcccaaatccgtacataaggttggtccatactactaaataggcccattaaaactttgctataaacgggttagctgatccacatcattttttttaatcttgtcgggataatttgtacaatatttcatctatatcataaattttattttcattttataaagtatgctcttgagcttttgcaatgtggaatctattaaatttattaatatgagagaagatttagaaaccatagtgtataaatattatgctatgaagtcgaaagaaa

SEQ ID NO: 37996 - DNA, 4658 bp, Arabidopsis thaliana landsberg
aatatatatactagtcttaattgaatttagttctgcttaaaaataatttagttatagacgcgaacatatctgcaattccaaaagaagacggcaatgcaatattaatgacggtgaacatggatgagaaatgaggctgattcagttttgacataaaagacaaaatagctctatccatgctcttttttttttgtcggatccatgcccttttcaataataagggataacaattttattctattttaaatgggcttactattgaattgcatgagacacaaaagtttacataagcccattattaggcccaataataacaagttcataattagataatgggctagataatttctaaggtcttttttaggaattgcaaggtttcaatatcaattagaggttgtagaagaagagagtataaatcttgatcgaccataataagaagtttgtaatgtacaaatttatacgacctcatgtaacaattcattacccttcaaattttcttcttctttgttttttggatatggcaattttgttcttttctcatcttcttcctcgaattttgttctttttcatagttttactacaattagtccaagacgatacagttgctactcatatatagaattcttctctcttcgattgagatcattagtagcctgcgaacattggcggtggtggtgatgcgtattggtgtcccatgaacggtggtatgatgaattcatcatcacttggagctggtgcatgagccggaggggtctctttcttttccaccggtgctggcggtggtgattggactggtggggagttgatcttgggcggtcttggcggaggagagtagaccactggtggagattgcgacggcggtggagaaaagaccggtggtggcggtgaataaacaggtgctgctggcggtggggaatgaaccggtggaggcggtgagtgaacaggtgctggcggcggcggcgaatggactgggggaggcggtgagtggactggtggcggcggggaatagactggaggtggtggtgaaaagacaggcggtggaggagaatggacaggtgggggtgggggcggaggcgaatacaccggtggtggtggaggagagtggactggcggcgggggagagtggactggcggcgggggagagtgaacgggtggaggaggaggtggtggggagtaaactggtggtggtggagagttgaccgcagccggaggagggctgcgccttttcgtcactggagattgatcgtaaggatcatctggttgaggtgactcttttggtggttgtggtttttgaaccggccgagatggaactggcgatggtttgtcaaccggcgtagctaaaactggcgatggttcgtgaacaggggttgttggaactggcgatggtttttgaaccggtgtagttggaactggcgatggtttttgaaccggcgtagttggaactggtgttggtttgtgaaccggcgtagttggaactggcgttggtttgtgaaccggtgatggtttcgatggagtagaagagccaccagcgcacttgtccttgctacaatcaaccgggcggttgatcacaaccgcacattcttgggcggatcgttgctcaggtcgagaagccaagcaattgcgtgtgtcatccaacgcaatctccttgcgactaccacctggaacacaagaacctccttgtccactgaagtaattgtaagaataagtcaagttcaccaaattaggcaactggcaaatgttatccggtacaagtccggtgagtttgttcccggagatatcaatttcctccacgctcgttaacccgacaaagctagtcgggagacgacctatgaacgagttcttgcttgcatcgaaaaccgttacattcgataactttccgatttcagatgggaaacaacctcctaaatcattgtccataaagacaatctcgttgagattcttcatgtttccgatactcttagggatacatccggtgaatttattgttagcaaaagtcacaaccgaggccggagattcccctagagattcaggaatcaccgaggtgaatctattgtcgttcaagaaaatggcgtcaagttctttcttgaaaagctcaggagggacttgaccttcgaaatcgttgaacctaaggtcgaagtatttgacatcaggccaagagagaacgacgttagggaaaggtccaacgaaacggttgttactaacatcgaattcgtgcattagctttagcttctcaaagcttttaggtatgatcccacaaaaccggtttgaattcaaatggaacattgcaacatctgtcatcaaaccaagctcagcaggcaaatgccctgcgatatccgcaccgttgaggtcaacaccagctacaaccgtgacatcggaatcatcaagagctggcgcacaaaccacaccggtgtagccgcacacgtgtgggccatgccagttccccgtggtgttaaatgggtctgaaaatatggcctttttccaagcctgaagagctatataagctctcttaagcctggtgttggcaaaggtagccttgagatcaacctcgtattcgatatcatcaggaagttcgccgttgtctggtaacgttaaaagttgtcgctgcacaatgaaggcagcttctgtatcggttagggcaaatgagacaaaggaagaagataagaaggagaagaataagaggaagaagcagcagccaaaggacggaggtttagccatggctaaaacaaaagaccttggaaaagacccaaggctgcttatagaagggcatgagagggttcaaggacacaaaggtgtattattaataagccaacggttttcattttgcaatcaccaacggtttcccttaacatactttgtctataattagggacaactcttgtttttaaggattttgcttcagatccggaggatatattatcaagaatagaaattgtggttaaagaaaacaagagagctaaagcagaatctctaaaatcaaaaccggtcactattataggacacagccttgaaaacgagtggttgttgattcattaccgaacatcacgcaatgacagaaaccctatttgtctcactatttcacgtgtgctgcaagatacctccctaaggtattagattacaatgtttgtatgcaaattcaaaggagtcaagaaacaaacgatggtaaatccattgtttcttcacatgatcctcaaaagatgatctacctagctttctgatatacaatctcttctctgcttcaattcccttaaacaattgactatttcttatttcctatacttacaagctcattgatcagtcacatcaacctaatcgagttccaagatccttatgatcctcttaaatatatgtatggatgctcatagactatgaaacctcgcaaaacagttaaaaataggtccgctaatacagatcctcaggcacatcctacatgtcaataagtttcactctcttgcataaaacgtgaatcagattgataatcgaactcaccattggtaaaaacgttatattttactacaagacaacaattgtgtaccatgtttctaaattgaatttctcttaaaagtcgcatgaaagcaaaaattatttactaataaaagaaattataaaattcgtaaaaaaaaacattgttcaaaaaataaagacataagtatagtagatagatgttatatgaattcaaaagaataaaattgccataaggtgctaatactatcagataacttttcccctagttaacattagacataatttaacgaaatcgaacaccaatcctatttccatatcccattggatccctttataaggaaggctctctttagcctcacgctatacaacaaacaaaaccctctccacattcgtaaccacaccttcttctatttctttatctctattcatagtatttcatctacacttcctaatgctttcacgttctgggcttcaccatccttaccggcacaacctgagaatatgtagcagcctctttagcaaaacttcaccagtagaagtgaaattgtttcgtatttgttctttatctatatttacctgatcctccttcaatgaactatcatcgttatttgcttctctttctcgttttttgctcacctctcccttctcttcttcttcttcttcttctctgaaattctgccctgacgcctctgtagatatacaagaaaaaccaatggacgtcagagtttagactttagacttaacataatttactacgatccatcaggcagacgatcacacaagttctaacaaaagatattcatgtgtggtcgggtgatcaatagatagcagaccagatctcatacatgtccttcatttctctgaatctcctcaagttatatcaactctatgtttatgcagcaaagacttctaaatccagtgcagtgttgactcaaggacatatttaatcaaaaatttcagtctagtatagtctaattgggtaccaaaaaccagaagaagaaaaaagacaaaaaagggaagatgccaagaggatttagattaaactaggctaagcaaatgttacctgagtgtttggtttcgtcatgacataacacatctccttggacagtagttcccatggtgtaatttccggtggaattttcaggcttatttctcaatgaatttctgtgaaaacgaaactcagatgaagtctccaaaca

SEQ ID NO: 37997 - DNA, 2148 bp, Arabidopsis thaliana landsberg
gcagtactttggtggattgtttgagatttaccttgatcgtttcgagactttaatcttaagtggatgagcttcggtgttgaataccccactcgtctaaaggaatgactgttgtcggcgagaagagtagatagagatacttgagtgtctctgcaaggaagaaactttgcatcttgttgtccttaacgcctgtattaacctggaaatgattgaaagaaataagaatctaccatcagttacactcaattactaatatagatggtggaatgatataattcaattcaccaaggttttaacaatgcaggatctaattaagcgcctacggaaaacttacatccttcaaaccaacatatccagactctatgcgcgagttcttctcaaatgcttcaaatatattccatccccactcttgatatgtcttgtttccagttaaccgccagaggtaaaacagtgattcgacagtttctggtctcaagatgttccacgacgttccaacactcatgtcctgaatcatcatgtatactaaacaataaataacgcataaaataaacaatgtgtttgaaaaagacaggcaaatgacattcttcttccacatacctcttggagcttctccccagccagttctgcaattgcaagaacttgagaagcagaacggttggagcggttcttggctccattcttcttctcagctttgtcatcaagtggatactttgcattatcatgctccagcaactgtagaagctcctctcttaccattttatctgcaacctcaatcggagtaggaggaacaacagaacttttgtctccatcagctgaaagcaacgagttcctaattacggccaatgaagcagctgggggtcttggaagatctctctgcaagaccttggatctcttcttaagcaatgcctgttgtcttgcctcttcctcagccttttccctcgctatcctgtctgacatgtcttcctcaattttctcttctggctcttcactttcctctggaggaggttgtgcaactatttggtactcgttctttggctgaggaagcccagtcaaaccagagcgtaaacttcttctagcttcctctcgtctctgcctctcaagttttgcactttcgtgcatgtccatgtcttcgttaatgtgaagttcatccctgaagggaggccctttgggtgtcatagaaaaagaagacccatcccttgatggcgtcaagccaattccttggagtaagaccagcaccaccaggagtcattgaaggggtcagcattggattaggcgcattgaatctgtttgtttctcggagtgaccccagtgaagtcagaaaggtgcatctcaggattttctcctcctagcaaaggtgtctgagagtctcttaacctggccaggttttctgcttccatcataatagcatcacctttaccagcaggggttctttgaggtgtcctcatgggtgtcattccttgccttggtgtttgtgagtaatttgccaaaagtgcacgagtagcagcactgccttctgttagctcctcattctcggcaagaaggtcactggcgtagcccatcttagcaatttcttctagctcgtggtctgaaatctgcggtggtggtaacatcagctttgacctcttcctaacaacttccggatcattcagcttgtttgcttgcaatatagctgctggagcatcctgtctctgagcaattttattccttgcaacatcttgtttgcgtaaatgtgcttctacatcagctcttctttttccttcaagttcttcaatggtagttggaaattttacttgatcagcaggacgatcttcatctgcagtatcataaaatccggcaggtgccctcttttcaaaaggaatttctgcattatagtcgattccctttctctttcttttcctatgccttccatcaatcccagctgcttttagttctcttcttttttgcagagaagcaagccttctagcttcctcaagttgtttttctctagcttttcttttagccttctttcccctagtgttagccaatctagctcttgcttcagaaagcatttctttctcatcttcgtccatgtctaccggatcaggacgagcaggctttgcttctgggttcggatcaatctcaccaggacgtaattttcgtggatcatccgct

SEQ ID NO: 37998 - DNA, 2299 bp, Arabidopsis thaliana landsberg
tgtgttaaaggagaaaatcaaagacttacaagttgaaagaaatgtgacaactagcattttgaatctagatatattccaaagagagatgacaaaatcacaagaaagagagaatacaagaagaataaaaagagctttttataataataataaaaattgttagtttttagtgaaaaacaattaaaagattaaaacaacaagaatttcatattacaatggataggttttaaaacatgaaatttcattacttaaacggatgccctttaaatgtagaatgtaatgtgagactgaaattagttgtattggtattatgaccaaatcgtactcaccaattatgctgagaagttaaaacataatatgtttgcaacaatttgttcaataaatgttaaaataactcatacctaaccaacaatatcttagtctaacagccacactaatttataacactacattgtttatatcagtgagaaaagtgtttaaaaatcttaaattagaaaattaacaaaactttgtaatttaaaaacagagtacgtcatacctttttgtaatggggaattaaggtcaatagaaacctagttgttccctagaaaataaataagaagctatatttgaacataagagtaatcaggagaaagaccaagaaagtctcatacgacaacctttttatttacaactaaagaaaagaatttggcaaagatgcactaaaggaaatcctctaagtggttgatgcagtttactgaaacttgttatgtcatttgatgcattcccaatcacatctatcattccgcatattcagttactcgtttagcggactaacccttagtccctcacctttactgatatcttctctttatatattttctcctgagtataatcatacattgatgttatataaacaatgaactcaaaatatgtggtcaagagtttactagaattagtcaaagaacgcctgagattataatgcgaattatcggatcagactaccggtttaaaacaacccgcatgtttatctgtatatgtaagagtaaaaatttaaatatcctctctaatacattcattctgatcttaagatcaatggcatacccatgtaactttttacatttataataaatatctcgattaatagacggatttaacaaaagtgcaaaagagtatattcgacaagacacacaaaaagttatctagtagtattttgatatcatcaaaatcactggatttcaaacttcaaattcttgtttagcattatgattgctaggtggttgaggatatcaagtaaaaaaaacaataaataattaaccatgaaaaacgagtttacatcatctatataatatataaaccctcaaagcctttcaacacaacttttgatcaaaaagatgagttcatcacgtttcgattagagtaaccaacccatcaatttttttaaatattctctaaagtctttaaaccaaaaacaataacaaatgtttataaagatgaaactaaacataatgaaccatatattctaggtgtaggaaagatctacttacctttgattcaaaatgccaaatctctaatgatgtggggtgggggtacatttactcaaatcatggcaatgcctaattgagagatcatttttcaggtctatgagtttgtttttgtagcgaccacagtacttgatcatattttactttgcctcaaggaccaagatcgggaataaaggaaatgatgaggtgattgagtcagacctccacagaatcaccaagtatgaggaataagcattggagacttaaactgaaagctaacatcgagaagggcattgcttttgctgcaaaggactaacaaccatgccaaatgattcgacctccacataatctcttttgactcaaaatcttttaacacttgatattaaaggatattatttggacatatctcttcaagtttagaaaaactgagtcgtagccttccaaataaacctcagtgcaagtttttttttttttggcagttttggaatttcattgtagcatcttcaacctgcaaaataaaacaataacactttataaatcaaatttctgataatttgggttgttaccaatttttagtgagcaaaagaagtatcttttttttttttttcctaatgtaaacacatgagaaacatctttagtgattgtgattaaaatatatttatgtttgaaagaaaaaagaacatttgaaagtgtagtagcttcagaaatttctctatttttaatctaattagataatagaagaatcaaatgagtgtgcgaataagacacttctaagtgtggttcacgttacgttcaaagtg

SEQ ID NO: 37999 - DNA, 2831 bp, Arabidopsis thaliana landsberg
  unsure (1)..(2831): unsure at all n locations
tttctaataatctaatccacccaatttcatcactcatttacttaaaacattcattataatgtttagtgcttaactgcttatatagtctcatacctatacggtcactctttttcactttagtcccacaccatctcgtattttatatgtataaattaggataaagaaagaaaaaaaatatttatgtatcaggannnnnnnnnnnnnnnnnnctatttaatcaaaatctctaccacaaaactcttaaacatggcatcatttcttctatacacatccaaatatccaatcatcaaattaagaaacaagaataagaacgtcatctctaccaataacaacaacaatatatattatcaatctaatcaaacatttacatatgaatccatcgtagcatgatttcttttcttctaaatcttatttggacctacaacgtaatcatactttcataatggtatacaacatataataatttgtcatattaagctatacaaacatagcttaataaaaatacattatctttttactttttttcacaaacaatcttaatgaccactcaatctaatgcttctagaaagatagcatcatcaaatgatgattacactttataatgcaaaagtaacaaatctaatcttcttgttgtctttttaaaatttggttgcgtgtttcgttttaattatgacgtcggaattgagagatctctcattccatgtacgtcctttgtgcccatatatatttgattgaatctttgataattcaaaactaaaacatgtttctcacagtttttgtgactgcctcatcatgataaacacagattcgcaaatcaatcgttgtctattaatgcaaaaatttacgcttagaaatttgttcaagcagaacttcatttgctaattttctattacagaacaaatgtgttgtatcgtatggttaaattaaaatgaaaaaaaaaaaatcaatcgcaggaagtaacagagagcccaacccggagatcgttagatgttccagacacatacattcggtgtgtctcgatttcttctcccttccggtcacttgtggccgccacatcagcagctgccgcgtaatggattccgttgttgacatcgtctccggtggagaaaatgatctccctgagaataggttcgtgtccgtttagaagatttcccatactgagcacttttctccaagactggttagccgatggaggcgagaacagattcgacaccacttgtctttctcttaaactcacttcctgtctacttacttccatctcctgtgtttcaagtgaacaggcgttacatcatacttttatttattcccatcagagaaattcttgttggtttaacgatgactcaccgtcctgcttttgttctcttcatcatttgcgctcattcccattgttggagcataaacgccatagaagtcgctgaatattacttgagcaaggcgtgatgcgtccaggaactttctgtgaatagatgccgcaaccgctaccaacttctccacgttttcaaagaccatgcagagacgtttcaggtctttgacggtctttgctttatccggaagattgtttcctgcatccaaatatctgttatatagaggcaagagggacggaaggagaagatggctcgaagggtttggataattagggagaaacaaaaatattacgttgtagagcccccaaagtaaatttcatgatgaggtagagttgctccaatttagaggtcatttgtctcatgttaccgacgtttgtctggttaagagtgtcagctgatcctctgaaggctgtgcagaccatttgctcaagaagctgatgaggccgtactgtttccaggtaatgaacattctgagaaatttatcacgacattgagtcaatcttaaccctccaagaggtatcagcatgaatgagagacagaccttctctccctctcggttcgggtctaggagaggcttttggtcatcggctggcaaagcgggtgcatcattccaactttttctccacaagtttccttgatcagacatccgttgagaaaggcggccacgaggaggccattcatctttcgagccttcggtgctggggcctgctgatggttcagtggttttaggttcaaagctctcccaatctccaggtgaatgccatctgataaagtcctcaaacactgcatctgggtttgccgctttgaatgctgacatgtctgcaatcacctttggaaaatcaggaaaataagaagcaagggatgtatggatgataggtttctaaaactagaagcacctatccttctcttccaacctattcaaacttagaattagatgacagaaaaatctagnnnnnnnnnnnnnnnnnnnatattcatcagagacagaattttaaacctcaccagataataagatgtctttctccaattggccaggaacgttctgaaattcaaagggcaaaagatgggttctttattagacaaacaacaaaatgaacaaaacataaaaagcgatcaatcatgttttttcttttcctttttctgtaagggtctagatataacgcaagagcatatagaagaaacaccatatatagcaaggcaacacatctacacatttgttatgaaacattatctttatagaaactttgttttgtagataaccaaacgatattcacttctattggaaaagatgttcggcttacaagggaatcaccaaacgcctcaacagcctggagtctttcttcatgcatgtcttcagtcataagaggtgggtcctgtcatagctcatgatatcttagatttgtttcacccataagaattatgaaaacagtccaaggacaagtcgatactaacctgggtccgtggggc

SEQ ID NO: 38000 - DNA, 1606 bp, Arabidopsis thaliana landsberg
caacagaagcacacatgtttgggctctcttaactcccattacagtcaaaacagtgatgtagagaaacaagaaagtagcgataaactcagctattccggctctgtagaaagaccatgagctgagctcgccgggctcgaacagtggcgcaggaggtggctctttgtagtccttgtcggtggactgagccgatgtaccgatgggttgcctctccgggaacttgttagctcccactcgtacatcttcttctttgccttccatttctctccctctccctcttttgttcttctctctccagaaaggttaaagttgtgagctttttctttctcgtgtgtagctacctagtgtgtggtcgagacttcatttatagagaacaacgatagaatataataaaattgcctaacgtttccaaacatttatttttagttattgctaagaaaataaaatagtataacttatagttttttctttatttcaagtttcaacttgtataacgaatagttaacacctaatttcaaggcttaggcaaataaactgagagtcaaataaactgaaccaaatgtactaaacctaaatgaaaaaaaaaacagaaccgaattgaatcaacaatttaaaaattgttgaatagatattaaattttataatcaaaataaccaaaaatgaattagtacctaactaaaatattttagatgatctaaaatatccaaaatataattttattttcaaaaatattagttatttctatacttaataattaaaaatatttaaaaatatatattaaatagtaacaatattcgaaaaatatcaaaaaataattgaaatatccaaaaatattaaaggcaaaataatcgaatggatactaaatttcaaaaaaaaaaaaaaaaaaaaacgaaccaaaatttcaaaatagtcgaatgaatactaaactttaaaaccaaaaaaccgaataaccaaatggatacgaatcaaaaccaaatagataaccaaactaagagtttagaactaataatttcaatgatcatttgtgaatggtcttaaactttactagtcacgaaattcttttttgtctttttatgttgacagatcaaactagtctagttacgtttttctcaactagttattattcatgatggtgaatgttgaataattatgtaaatgttcaatagtttggtaatttgtactagggttactattaaataaagataatgatggaggagactagagagggttgttctggaacgtaccgatgtgctctcgtataaagacaaaaacctgaccctttttttttcttttcctcttcccacagggtccactttctggacggtaaacaaaaatcgataaaattgtaagagcccaataaagcccaatagtaaaatagtaaaaaaaaactgactattcaacgaaacaattatctgaccgttggagaaaaaatcgacagctttatgtaaagtcattttcgttgggactgactatatagtataatgccgtgcttcataaaaatcatttttaacttttaattattcaaccatgcgatatttcagaaaatgtaatgaaaaaagttgagggcaaaccaaagttataaaaatctggtttacgttgacacaaaaca

SEQ ID NO: 38001 - DNA, 5155 bp, Arabidopsis thaliana landsberg
cttcctaagttagattctgtatgtaaatgcatctgaagaattttactgttgcagaacggcggtacatcggaaaagaaaccgggggttatttaacttcttcctccgatttggatccgaaacctaagattaaacatcatcgtcctcttcaggtacctgagattctgactccagacattggtgctggtgctggattcagtgtgtataataatcaagttcaagctcagagtcgtcatcatctgacggttgaaatcccagattcatcgtctcacaatcttacatctaagagacctgtggtggttcaatcttctaatccgttcaacgttgacgatttccgaagacaacaacgcgcaagcttgggtccgatttcatcttattgtccgtcgtatcttttatcgtggttttcttcatctcttccatcgatcccatcggccactaatcagaagcttctccgtcatgttcttagagtccgtttgatatgtttccatcttcgtttcttacttcttctctctgttcctcctctctacatcttcttcttgttgattagtttcagattcttccttctctttgtcttctcgattatcgctttttctttcgtcctttcgatctctctcaaattcgctcttcctcacttaccatcgattcgtttgattatcgctcggttactttctctcaagcttacccctaccagatcatcctcttcatctcaggagaacactaaacatgttatttggtcaattgggtctaagcctgtgactgagaagaagaccaactctggctcatgggttcagaagtacagctctggtgatgtatacgagggagagtttcatagggggaagtgttcaggaagtggagtttattactattctatgaagggtaaatacgaaggggattggattgatgggaagtatgatggatatggagttgaaacttgggctaaagggagtaggtaccgaggtcaatacaggcaagggatgagacatggaactggtatctacagattttatacaggggatgtatatgctggtgagtggtctaatggacagagccatggctgtggtgtgtatacctctgaggatggtagtcgttttgttggagagtttaaatggggtgtcaaacatggccttggtcattatcatttcaggtgagaattcatcagttttaacttttgcagaaatggtttagcttttcagtgtatgggtgatcttttagtcccatgctattgacgttaagtgtgaccggtttgaaaaattgaagtatatgtggtttctggctttcagtctcgactttcttgttaagttatgatgctgtgtttaggtccatgtctatgttactcgtgggatgttcttaaagtttatggctttcagtcttgagttcttgatagattgttatactgcttaataccctctactggtagcgtccgtcaccctttgaagaggatatcaaatttttaagcctaattgttactggcattggtaattgcatgagactaccctttgaaagattctggatttcagttcaaattgcatatgaaccaatagttttttgttggctatcttccttacgtttcagacaattataagtctagggggaatcaaggttcaggcttatttgttggacttgagcatggatctaaaaaaaattgcatcaatcactgtcttctcttcttaagtgatatctatctgacttgaagccacatctctcttgtagaaatggtgatacatatgctggggagtattttgcagacaggatgcatggttttggagtgtatcaatttggaaacgggcatcggtatgaaggagcctggcatgaggggagaaggcaaggacttggtatgtacacgttcaggaatggtgagacacaggcaggccattgggaagacggagttcttaactgtcctaccgagcagaccactcgccctgattcatcgttttccatcagtcattccaaggttgtcgacactgtccaggtaccttataatttatcttactgctgctcatatatattaagttagagattagatctttaagaaattatcttactgctgccaatgattgagtacccacatgagatttgatcctgctccctctctctctttgatcaacagcaagcaaggaaagcagccaagaaagcacgcgaagttgtgaaagttgaagagagagtgaacagagcagtgatggtcgcaaaccgagcagcaaatgctgctagagttgctgctacaaaggctgtccaaacccaaacatttcattgtagtagtggtgacgatcccttgtgagttcctgcggcaaagattttgacataatcgcagtcatgaccttacctcgaacttctacgaagacagaagagtgaaagagagatgtttagagaacagcgtcagaattcgcaatctccgttgagattttcttgaaggtgaaccacttggaaccaatgtcgagatctcataagtaataagtaagagatctggctatggagcaagtattacaggtttactttttcttttctcccacttgttttatgagcaggctggtttaaaactgtacataggttgttgaagagtaagcaatgtgtgttaacaaaagatctttgtaacaagcgtaacccatgtaagagaagtaacaaaacattgttttacttttacaacgtgttgaaaataacaccttttttttactagatttctatggatagaaattagaaaatgacatgagaattccagattcaaatcaacttgacaaaaccaacaagggaaagagtaaagatatctggtctgtgacaaggtccaagtagagacgaatttcagatcatctaggtaactgtgcttatggttcttcaaaccctttcagcaaatcctagcagccagcctttgtgtttgattaaagtgggctgggctaaaatattggccgaggcccatcaagtgattctctcccgctcaagtcttttaatccttgaggagaaaatggactggaaaattcacggaactttaacagaaagatgcaaaaatcgttctcgttgatccaaacagtggcaatctccggcgtattctccgccgtctcatgctggtgagcgattgttcccgtctttcaagctcttcttcttcaattctcgtcttcttctctttccatgtctcatctttagggtttaagctgccttactcaatttccaggtatggattcatgttcggtagagaatcagcgagaaaagagctcggaggtttgatcgaagagctccgtcgtggaggctccaattctaattccactccccattcctgagttaggcattccaatttcccaggacggaggaggttcttcgttatccgttgctaagttagtttccgatttcgattaatgttcatgaaaattgatcaattgttgtataaaccgatgtgtttgacaaatcctttgagttaattcaagtatgaaagattatcgtttgaacgagagatgcatattgattgatgataagagaaactcacattgattgagataatataaaactgtaggagaaaaatgcatagtatttgagattaagagtatgaagatgatgtacaaggaaaactcataggatacatctaagtgtacatcatcttgattttgcttctctttgctctgactctgacccagaattgtgcaaatctatagcttaaacactcttactggtttgatctctctagttatttatcagacaggaatacaataaacaccacactatatgtatgtacctatgtgggaaattacactaaagcagcctcctccacattctcagcgatcttgcctttgacaaatccaacataaaggtcacttccagttgtgtcttcttttgagagtctcctcccatgaccaccttccttcatgttcttaacaaactccactaactgctgccaattttgaccctcaaataaccgcttgttcattcttaggtaagtaaatgcggttaacccatttccagaatctgacctatttgttgctaccacttgtccgaatgcgcttgagtcatatcgttctagcgcgttctcccctgctagttcggttccggcctgccttgtcgcgttctgtacttgcttgaccagaccttctggtgagcaattcgcgtgctcaggttgctccccgtctttcatctccatgcaggtgaagttgagcacaactccatgtttgttgaacatcttagctattggcaggggcccgtcatggtttcttgtgttgtagtatccagcagttagctcagctgcgtgtgacctggtgttgtagtgccagtgaattccagctacctttcctgatagctttgctccgcttccttgaaagatacctttcgctgaagataggagttggtctccatgttctagcagcttcccggagtaccattccatgaaaaactttccatactcgctattccatgttccgtctctcctgaaaaattcagtatcttctgggaggttcttgtactcgccggcatcatgaggtccacttgttccccagttagttttcccgattgactcagcatatgcttgaagtgacgatttcatatactgcaatcaacaagtatcatttcttagaagaagcaaatggagtataagtaagcataagtatacatgatcttctctggtatatgtctaatctcttgactagtgttcttatgaatttcaaggctttttctgctagtttaaaataccttgtcgtagcactggaactctccaattccggggaatctccaggtcccgttgctctcagggtatgatgggtatctcaattctccacaaggtcccattcctacttgaatttcctgcaatacataaaatgatgatccaattagcttaggtccctgtattgctcatgtctgaagttaattcgtttcctttgtagtctaaatttctgcttaccgcaataactcctcctatgtagccttcaaatcgttcacggaagctcctcatgaaatctgagtagacctggataggtgttcttcctcttaggacaggcacagaatcacatcccaaggagatatattcagggttccttctcccagatttgtctgtgtagacaagatcagggttcttgctgatctcttcaagcacccatggaggcaaggggatactagattggaagagagagaaccatatagagcattaataagctagaaatgagagacagagattttactcaaagggaag

SEQ ID NO: 38002 - DNA, 2982 bp, Arabidopsis thaliana landsberg
tctgagagtcaacgctcattatggcttctctactttagcagctgttttagccataacttatctcgataagttcatctgtagctacagcttacagagagacaaaccatggatgcttcagctcgtttctgtcgcgtgtctctcattagctgctaaagtcgaagaaacccaagtccctcttcttctagactttcaagtaaatgatgatacttgcaataaatttccttaaagtttaagtcttttatccctctgttctcatctctctgtttttttgggggtttgcaggtggaggagacaaagtatgtgtttgaagcaaaaaccatacagagaatggagctactgattctgtctactctcgagtggaagatgcatctcattactccaatttcgtttgtagaccacattattcgacgatacagctttaaatctcatcatcaattggagttcttgagtagatgtgaatctttattactctccattattcctggtaatgtttaccattaggtttagatctcttgaatctacttgattttgttgtggatgctaaattttctgttcttggtttcttttcagattcgagatttctgagtattagtccttctgtgtcagccactgcaataatggtctctgttattagagatttgaagatgtgtgacgaagctgcataccaatctcagctcatgactctactcaaagttgattcggtatgtggttaccggtgtcttgatcaataaatgccaatgtgattagtgtaaggtttaaggatctagaactgattttatcatcattatacttgaaacaggagaaggtaaataaatgctatgagttagtgttagaccacagtccaagcaagaaaaggatgatgaattggatgcaacaacccgctagtccgatcggtgtgtttgatgcgtcattcagttctgatagctcgaatgagtcgtgggttgtgtctgcttctgcttcagtgtcgtcttcaccatcttcagagcctttgctcaagaggagaagagtgcaagagcagcagatgaggctatcttcaataaaccgaatgtttttcgatgtgcttagtagtagtcctcgctaataatgtcaacaacccatcaaaatgtgtcggtttagttacctaaaatctgtttccatgttttacatattatcggctatatggttctcggttcttgtgtttatggacggttgcaaatggtgtacgtttcgttatttgatattctaaaaacaaagttcttttacattaaaagtttccgctggatcttacctttttcatggcttgatgatgatctaatttcgtctcacaacctctgcattttgcaagtagaaagataacagtcaaagattatacacaaacattaccattacactattggcattggtctaaaacatcacatacatgattgtttagtacttagtacaggtatgtggaaatttgtcctttgaagtttgaattgaagagacaacgattgagttagttggatgaccaatagtgttggacaactagagagtttgttagctactcctccaaagttttaagttttatttttaaaaaatgttctaataaattttgttctatttttgggaggtttgatttgagaggaaatgcagagagaccaacactggggttggtccaagtacttgtgttcaattcagtgggggagaaaagcaaaacaggtggggatatacacataatattacgtacacatattattttatctacttcttgccagttgctatgtcatgtcataacattaaataaatataccttccatgaagagtcttgttatcacacaggaccaaatagcattgaagagattcaacagaaaaaagatataaagaaaataaaattagattgttttggttgaacttgagtgaatgtaccaaaaccaaaccactcataaacttttgttctgtcatctcagagatcttgtgtgaaactcacattaatactttcaagaaaaaaatagaacaaaaagaaaacagaaattatgaattctaaagacataaatcataaatgttgaagagtcgatcgttcccctaaggcaaacatatgcaaatggagtttaccagtgtatcattaagacttaattaagattattagaccatgtagataggtgatattttttaagtatcacaagtctaaaaattatttttatattgacaaaacaattagaatgaggttgattagtattagtccagtgatatttgtgataccagtatcatctgaggtggcttctcctaattggtcacatttaccaaaatcaaaaaataatatatataattattaaacaaatattataaataatattcaaaaaatttttaatgatactttgtaagtacacctatgaacatgctcttaaagtcacaaagatatatgcattacccgtagatgctcctgtaaccgtcggatttgtgttttagtcctctgttgtctttgcgtttttgtgttagtttgcggagaagctgtaggcgctttatcgagaggtttttgtgtatgggcttctgctaaggtttgctcgtggcaactaggatgggactccaactctttggtatcttcgagttgtggaaatcacgcaaatttccgagtttagcttctcggaatcggtgtttcttctcttgtttccgcttttggttaacgttaaccactattactgtttgtttttgtctgtgccttctgtagatttatttttccgctacatgtattccgtgtaacttctgttacaatttcgaaaatggtataaatacttaacattgataccaaaaaaaaaaaaaaaaaaaaaaactgtttttctgtattaatcactaattaaaatggtgggccatcaaataaaaaattcaaataatattatttgtccgtgttgttgttggcttgttggtgtttgctatgtgaagtcaaaagatgtgtgatggaaagaaagaaagaaacattactttgctcaaaaagatcgatcgagatatggggaacaacaaaggtgtcaa

SEQ ID NO: 38003 - DNA, 3553 bp, Arabidopsis thaliana landsberg
agtttccagaaggtactagaatgaaatattccaattcattttgtgcattacttaactaaggtaatatttctcttacctttcaggagggctcaaatcaccttcgtcttcacagtccatatgagagcccgcctaagaatggcgttgacaaggcattttcagacatgtcgttgtatgcagttcctccaaaaggttttttccccccaggttcggcaactatgtcagttcactctttgtcatctggaggctcagatacgctacatggtcacatgaaaggaatgggtatggatgcttttagagttagtctgtcaagtgcgattagttcgtcgagccatggttctggtcatgatgatggagacacattgggagacgttttcatgtggggagaaggaataggcgaaggtgttttgggtggtggaaaccacagagttggaagttcgttggagatcaaaatggattccttactgccaaaagctttagagtctactatagtacttgatgtccagaatattgcttgcggtggacaacatgctgtccttgtgacaaaacaaggagaaagtttttcttggggagaggaatctgaaggtaggcttggccatggtgtggattccaatgttcaacatccaaagctcattgatgccctcaataccacaaatattgagcttgtagcatgtggtgaataccatagttgtgcagtttctctatcgggggatttgtatacctggggtaaaggagattttggtattctgggacatggaaatgaagtcagtcactggtccccaaaagagtaaattttctgatggaagggatacatgtatcatccatcgcttgtggccttaccacacagctgttgtgacttccgctgggcagttgtttacttttggtgatgggacctttggtgttttgggccatggagacaggaaaagtgttttcatacctagagaggtagactccttgaaaggtcttcgcactgttcgggcagcctgtggtgtatggcacacagccgcagttgtagaagtcatggttgggagctcgagctctagtaactgctcttcaggaaagctctttacatggggtgatggtgacaagagtcgtctttggtcatggtgacaaagaaccaaaacttgtgcctacctgtgttgcagctcttgtagaacctaatttttgtcaagttgcgtgtggacatagcctaacagttgcacttacaacatcgggccacgtctatactatgggcagtcctgtttatggtcagcttggaaacccacatgcagatggaaaggttccaacccgtgtcgacggcaaacttcacaagagttttgtcgaagagattgcttgcggtgcttatcatgttgcagttttaacttcaaggactgaggtttacacttggggaaaaggatcaaatggtagactaggccatggggatgcagatgatcgaaattcccccacattggttgagtcgctgaaggataaacaggtgaaaagtattgcatgtggttctaacttcaccgcagctgtctgtcttcacaagtgggcatcagggatggaccagtccatgtgttcaggttgccgtcagcctttcaatttcaagagaaagcggcacaattgctataactgtggacttgtgttttgccattcttgcagtaataaaaagtccctgaaggcttgtatggcaccaaaccctaacaaaccatatcgagtgtgtgataggtgtttcaacaaattgaaaaaggccatggaaacggatccatcatctcattcttctttgagtcgaagagaaagtgtcaaccaaggatcagatgcaattgcacagagatgagaagttggatactagatccgacggacagctagctagattctcattgttggagcccatgaggcaagtggacagtcgatccaagaaaaataagaaatatgaattcaatagtagtcgtgtctcaccaataccgagtgggggctcgcaccggggttcactaaacataaccaagtcttttaatccaactttcggatcatcaaagaaattcttctcagcttcagttcctggttcccgaattgcgtcccgggcaacttcaccaatatcaagacgtcctagcccacctcggtcaacaacgccaactcccactctttcaggactaactacaccaaaaattgtcgtggatgataccaagagaagcaatgataacctaagccaagaggtggttatgctaagatctcaagtaagctgctttccacgctttaattcttgttccttactcctgtgtatttaggaaaaaaaacatagctggtgagattgtgctattttgtttcattaacatatcgtttcattctttgcaatttgactccttttgcgaactcagtagtaaatgatttcacaggttgaaaatcttacacggaaggcacaacttcaagaagttgaactggaaagaacaaccaaacagctaaaggaggcactagcaattgctagtgaagaatcagcgagatgcaaggcagcaaaagaagtgatcaaatcacttaccgctcaagtaaattccaaagtttcctctctgctgttaaaatgaatgaaaatgctctatgcaacttactgattttctcaataaaacatgcagttgaaagacatggctgaaagactacctgttggatcagctcggactgtcaagtctccgtctctcaattcatttggttccagtcctgattacgctgccccttcttctaacaccttaaaccgtccaaacagtcgagaaactgattctgatagcctaaccaccgtcccaatgttttcaaatgggaccagcacacctgttttcgatagtggaagttaccgacagcaagctaatcatgctgctgaagcgataaatagaatcagcacacgatcaaaagaaagtgaaccccgtaacgaaaatgaatgggttgaacaagatgaacctggtgtgtacatcactctcacagccttagctggaggtgcaagggatctcaaacgtgtccgtttcatgtaccaaaatgcttttttttttgttttatagtcttagctggaatgtttggatgctcctttttattggttatgaaatgagcttaatccgaggatgtctttgatggcagccggaagcggtttagtgagaaacaagcagaagaatggtgggcagagaacagaggaagttttttctaacaatacaatgtacgcatagtagttgatagagccagtgtgggtgtaggaagtgaagacttgggtcattaatattcttcgctaacccctgataacacagaaaaccctgagtttcccactcatctattcttttttagtttctgtctacgggtttcataggtttatttggggattataaccaagagagaaaatagttttcatcatagtttgggtgttattcatatgtaaattcttttgtaaataccacatgcatacattggttcgttctttgactcgataaatgttattatttgatgtggaaattcaaacagcattaatggtatggcgtcagtgcgagcttatacatcttagatgtctatgggctcattcaaatgatatgctgcttaacatcataatact

SEQ ID NO: 38004 - DNA, 1886 bp, Arabidopsis thaliana landsberg
attaaataaattttttaatcatttttctcctataaaagtccgatcaaactgtaaagagaagggttagtgaggctgagaagcaagagaatgtggtgagataagctcgcgaatttgaaacgaattctgggtttcgagcttgattcaaatgaattaggtagatctaagcttattttttaaatttgagagattgataatgacgagattatcaaacgaattctgggtttctggaatcgaacgaattttgggattcaaacgaattctgattgagagctaatctgctcaattgattcaaacgaaattttaagagctaatttcctcaattgatttgattatttttttgattgaattgggttccctataaattatctccttagggtttaatattattccattaaaaaacttttaattgattttttgagtttatcataaccaacatttagatgccgtgagttgtcggagaagatgactcaagaagatggcttttgattgagtgaaattgtagggcaagggtaatttcgttaacccaactcaccaaagtacctttccctataaatccattgtaaaaatgtccaatttttagtttttgggttagaaagtacccattctcgtaatagccccaaaattttatactcttttgtaggaaaatagattttagaaattaataaaaagaaatacactaaaacctaaaatagaaaccctcaactctaaattctcaatcgtgaaaattagcgtataactttaaccctaaaatctaaatttctttttctctaattgttttactgattatcatcaatctaaatttttaatatgccttactatagtttataggcccatatagtttaatatgtagcccgttaaaattacatccttcgagaattcgtcattccacttttgccctcactcacttgtcttcttcaatttcgccgacgacgaatccgacgtcagtaacttccgaccgcagtttccgaaactcgtgatcgctttctctttcgaaaatgttggcgtcggtacgggtgaatcagctgcaaagacttcttctctctgctcgtcgattatcttcttcaccaataatacctccgtcgcgtttacttcaccagcggctattctcgacctcagacactgatgcttcggctgcatctttttcttcttcgcatccgaaaatacaaacgcttgaaggcaaagcttctaataaaagccgaagcacatcgtcaacaacatctttgaatgaagatgaacttgccaaattctctgccattgctgatacctggttcgtctccttcactttaaaattctggtgatagttacttagctataatgcatggtagaccaggcttttaatttgaaggagagggagtttcatttctaggaaacgatcaaaagttggatactttgaaattatacttggcttgttatcttttggattgaggttaatcctttttatagttgtttggagaagttggtttttattcatgcaattgaatcttggaatgtattcatggatgcttaaaatatagagtcttgagtgttgagggttttcacatgatttctctgctctgtgttcttatataaaggtggcattctgaaggaccctttaaaccgttgcatcaaatgaatccaactcggttggctttcatccgctcgaccttatgcaggcacttcaggtgcatttcttgtgaatacttttggtttccttctatccttctctgttggattaatatatttcttttccagtaaggatccgagttctgctaagccttttgaaggactgaaatttatcgatataggttgcggtggcggactactttctgaggtattttttcatgagttcctgcataccttagttggcatatgattctttttattctaccttttatgagaccagtcta

SEQ ID NO: 38005 - DNA, 1263 bp, Arabidopsis thaliana landsberg
cgaattctggcttcttacgagtgaaaagaatcacttattcaaatgtttagactttatgagtgctttggactttttgttgggttccaatatgcaatcgaatagtccaatgacccaaatgtgaccggactttgggctagtaaaaggtacgttcttggcaaacgcaggtcacatgttcacatcatagtcttcttttggctcccaattggatttctagatttagaaacacttaaaccaacaagtcacggaagtgtctgaaaggaatgataatgctaatgatcaccatatctttatatgctttgtgcctatgtttctaggttttgatcatcagtcaccaactttataaatgttgcttcctacaagttatctctacaacacagctgtatcacattcatcttcatcttcagacatttgttttcatgatcttcttgtgagaaatgggaaacttgttgatgttttggtgactcttgtgtcaattcaagagggaaaatctcatcgaaagcaacctttgtcaggagttgcaattcataggacactgtttgatgtgaatgaagaagcttatgtcaaagcttctccaacagttctcggatttgatgtaaagctttgtgttattttatatgataaaagctttacattgcacctttttctttgtttctacagtgcttcgatttgtcttacaagagttaaatatgtcgatccacctctactgtgttctacgcctatcaaggtcttttcctcatcaaggtttactacgaggttttgtgcttctcttctctgcaatgagtcttaaatttctttacaaattctttaaagtttgatgtgttactagtttctcttcttgtcagggtcttttaaaagtatatgcaaacacccctgtattatattagaatatatatatatatataaagtattcagattcattatttcaactgattagatctatggaacaaattgagagagaagaagacaagattctgaatttgaacagcagctaaaaagcaagaacaaatttgactttttaattccctctcagaaaagaaatgacgaacccaaaagttctttctaacttaagaaaaacttgagcaaaacttaagcaaaacttaagaaaaatttaagaaaaaaacattccattttcttatcaaattagttctaatattatcgtagctagtgctcaaatatcacctaggttcataacagagaaaacacatggtacatatttggattttggccacaactatttgagaaaaactgtatgtatgtattcgg

SEQ ID NO: 38006 - DNA, 8692 bp, Arabidopsis thaliana landsberg
  unsure (1)..(8692): unsure at all n locations
ctccctcatttagccatttactacttgatctgaaatggcttgttgttctcgcagttcacgctgaattctatcaatgttgtcgctgtagtgcaggagattatgagagccacggggtcgagtttgcatacattttgatgttgctcggcgtgtatactaaccgtgctagcagagtatgagtacccgcaagacaaaaacaagcaaatgaagatagaagttagtaaccaaaaagaagtaaatagaacttgatcttaataactcagaaatcctaaatgtaacaagaaaaataccaaatggcaacgacgccaaattgatacaagagttttgtgtgtcaattccctaaatgcattttatgtcattgtagcatttaaggtgtcaatccaatcaggtggtattgttaacaatcaggatgtgatcagagaatactaagtcaagccaagtgtgaataggtttggtgtgtttctactaaactaagcaatagattaaaatgcaaatcaagttcagaaattaaactatactaaacagaaagtaaagaacacaaatgataaaagcaggaatgaaactaaagaccatgagctgtcaaatgcaagaactagaaaataaaccaagcacaaagtgaagtattcggccgagcataatacttaatctggtcgagtaaagtactaaaaacaccaattttgcacaagaaactaaacagaacgagcaaaatactaaagacacgagttttgcacaataaaacgaaacatagctcttaagaatggggtaattggttctagtggactcctcaatccattagataactaacaaactcaatcaagctatccctagacaatagattcaaaaccggatcaatccacttccatgaaaatgatcctcataattttaccacttcctaatctcaatttccattgatgaaacatagcaaagcaggctttaaacaccaatctattaaagtcaataagcagtctaaacatccaatgtcttgggctagaatctacaaatctctgaaattagttggttcatatatttcatcaaacacttgttaggtggagaaagtctaaaatcaattttcaattgatcagaaagaaaataacattaagaactcctaaaacaaaagggaatcatgcatacaaacacttagctagctaaagaacagaggaatccacctaaacctaacccatcctcaaaaactctgaagacactactcaagaacactgaagaacatcatagaacaaaacccagaaaattcataatacccagaaatcattataaacttagcaatagatagatctcaatgagatatataagtatgcagaagaaatcaaatccaaattctcaacacaacaaccagaaaatgcaaaagaaaatcaaagaaccctaatgtccagcggacaaagctaagatattttgggcaaaaacataagagctctatttataggcaatcctaggttgccctaattgggaataagacaaaatagataagtcggcgcaggagcgctcggccctaggccgagaaaagccgagtggcttggtcttggtcacacagctcggccctaggccgagtggcttggtcgagtggcttcttttcatccttaagtgcaccactcggcctccagccgagtgtcttggtcgagtagactccttgttcttcacatgtgctccactcggcctccagccgagtacataggccaagtatacttcaaatccttccttaggtcccccgaactcgagtctgtccatcccttgtgctagaaaccttcaagttgagtccaaaagtacctaattcatctgcaaaacactccaaatgcaagtattctatgcaatgcaatgcaaaatgtgcaaaagaaggaaaagagactaagaatgcataaaaacagacttgaaactaagctaaatgcatgaaaaacaagggcctaaaaaggttaaaatctagtgttatcatatcactgagtataacaacttaatccgtaaccagatcataaaagcgtaagaattgcatccttgttagaagacacaaagccaaagacttatatggactttggctacaccatgaaagctttgagaagcaagaagaaggttggttagtgttttggagtcgaatatgacttgatgtcatgtgtatgattgagtataacaacttaaaccgcaacccgatcttaaaagcctaagtagtgtatccttgttagaagacacaaagccaaagactcatatggagtttggctacaccatgaaagctttgagaagcaagaataaggctggttagtgttttggagtcgaatatgattgatgtcatgtgtatgattgagtataacaacttaaaccgcagccggatcttaaaggcgtaagtgatacaaaggttttctgtgtcaattccctaaatgcatcttatgtcattgcagcatttaaggtgtcaatccaaatgggtgtaattgctatcaatcaggatatgatcagagaatactaagtcaagccaagtgtgaataagtttggtgtgtttctactaaacctaagcaacaggttaacatgcaaatcaaataacaagaacataaagtaaaccaagcactaggtaaagcactcggtcgagcaatcgagtaagcaggtcgagtacaatactaaaaacaccaattttgcacgaaacgaacagagtactaaaaacacgagttttgcacaaataaacgaaacagagctcttaagaatggggtaattggtcttagtggactcctcaatccattagctaactaacaaactcaatcaagctatccctagacaatagattcaaaaccaaatcaagccacttccgcatgaatgattctcataactttagaacttcctaatctcaacttccgttgatgaaacataataaagcaggctttaaacaccaatctattaaagtcaataagcagtctaatcatccaattccttgggctagaatctacaaatctctgaaattagttggttcagacatttcatcaaacatcttttggatggagaaagtctgaaatcaattttcaattgatcagaaagaaaatagcattaagaactcctaaaacagaagggaatcatgcatataaacacttagctagctaaagaagagaggaatccacctaaacctaacccatcctcaagaactctgaagaacactactcaagaacaatgaagaacatcatagaacaaaacccagaaaattcataaaactcagaaatcattataaacttagcaaaagatagatctcaatgagataaacaagtttgcagaagaaatcaaatccaaattctcaacagaacaaccagaaaatgcaaaagaaaatcaaagaaccctaaaaaccagcggacaaaaacgatcatcctctgggcaaaaacataagaggtctatttataggccatcctaggttgccctaattgggaataagacaaaaaagataagtcggcgcaggagcgctcggccctaggccgagtagaaaagccgagtggcttggtcttggtcacacagctcggctctaggccgagtggcttggtcgagtagcttctcttcatccttaagtgcacaactcggcctccagccgagtgccttggtcgagtaggctccttgttcttcacgtgtgctccactcggcctccagccgagtacataggccgagtatacttcaaatccttccttaggtcccccgaactcgagtctgtccatcccttgtgctagaaacctccaagttgagtccaaaagtacctaattcatctgcaaaacactccaaatgcaagtatgctatgcaatgcaatgcaaaatgtgcaaaagaaggaaaagagactaagaatgcataaaaagagacttgaaactaagctaaatgcatgaaaaacaagggcttaaaaaggttaaaatctagtgttatcagaaagctttgagaagtaagaagaaggttggttagtgttttggagtctaatatgacttgatgtcatgtgtatgattgagtataagaacttaaaccgcaaccggatcttaaagttgtaagaattgtatccaagttagaagacacaaagccaaagactcatatgcactttggctacaccatgaaagatttgagaagtaagaagaaggttgtttagtgttttggagtcaaatatgacttgatgtcattgataataggtttttcagtcaattatcccaaaacaccaatcatgtcgttgtagtattttaggttgtcaatccaaatgggtgtgatgctaacaatcaagatgtgatcagaagtcactaagtcaagccaagcaataacaggttttggtgtgttctagcaatcctaagtgaacaagcaggaaacagaaaataaaacagaaacagtaaaacactcgaccaatacagctctttgtagagccctgggtgaggtcgagtgacaggtcgagtaacagacagaaaatgaaacaaagatactcgactgcacagtctgttgccagacaactgggtgggcgagtatcaggtcgtgtaatagtaaagaattgcagaaactaaacaataggtgacaggatgcagtaaacaacagtaaagtaaacaataaaatcaatcagataaagaattcccgaggatggggtaattgagtagtttcgtttcctcagtttacagggattgacatgctcaataacttatccctagacaacaagttcattaaccaaatctaagtgccaccgcaacagagaccctcaagttaaactagtcccagactcaatcactgatctaattatactaaatcaacagtcactttaaaaaaaactacaagcttctccttctcccacgtatgcttaagtctaaaattttgtacttttacattcgtaaaccaattcactaccttttactattattattcaatagaattttttttgacaaaaaatcaataaacttttaccacttttttagcaaccgcttcttccacgatcttaagatctccgaattcacttcccccacaccatgtatatctcggaatcaattaatacagtttcttccattcgctttcttcaaatcaacatcccttcttcaaaaaaaaaattgttacttttacagaatcgttttctctaatctaaaacccgatctctatccgtcaatttaatccacacaattcgttaaatccaacctcccaccactctggtcgtcttctttctcctctcataaggtaatttcaaatacccaaatcataaaatttgattgtatttctctcggttttgattcttatttatttagttgcaggtaccaatatcattgtttgcaacatgaaatttgatgtacgcacttcgtttcagattcatccctttcagacgcaaatgtgttccttggtacgtgttgtcaccatccatgtatattttttcaaaattaaacatctttttatattcttatgatttttgtcctgttcgcaatgctctatgtaaattgttgaatgttcaaggattaattgttataatggtaggtctgatgaattgatttttttcttaacattttttccaaaacctacaaaccttgcatcgtttctctttttttttttctagaaaaatcgtcaacaaagctcttcattagttttgacatttctgagaacgccaacgagatttaggagaggaacgatattctgtttttgagataaaagagatataccaaaggagcggtgctggaaataagtattattcacattgttttacacattggagatctcacttatcccaatgggtatctctccccgtgggatcagttcacagctaagtccagcccattgcttctactgtcccctacatgatcgccaggttagtcaacaagaaaatctacaacattgtgcttctactctctactcttgcagtgctttaagttatccttttcttcactgcagtggcaaccatgagcgtgattggccagacactggatctttttatgccggtacagactccggaggagagtgtggtgttcctgcagagaccatgttctactttcctgctgagaacagagctaaattctggtaaagttagttaaaccattgacattttcttgcaagtttcagaacggtatcttacaaatttcggttgaatgggcaggtacaaaacagattatggaatgtttcgcttctgtgtagcagacagtgaacacgattggagagaaggcacggagcaatacaaattcattgagaattgtcttgccactgttgatagaaagactcagccttggctcatttttatagctcatcgtgtccttggttattccaccaatgattggtatggcaaagaaggaacctttgaagagcctatgggaagagaaagcctacaaaaactgtggcagaagtacaaagtagaccttgctttctacggccatgtccataactatgagcgaacctgccccatttacgaggtttgatcccatcctaaattgctcggttttcgtctcatggatgtagctcttttcttaccctttttttcttctattgcagagccaatgtgtgaacaatgataaggatcactactcagggacctttaaaggaaccatccatgttgttgttggtggtgcaggaagtcacttgtctccctttagctcacttgtacccaaatggagtttggtcagagactacgactttgggtttgtgaagttgactgcttccgatcactcatcactgctctttgagtacaagaagagcagcactggccaagtgtatgactccttcaacatctctagagattacagagatgttttggcttgcactcacgatagctgcgagcccaccacatcagctggatgattattttgtattacattgttttccttcaaaacaattagcttcttagaactgttttttaacagggttttacgcaattctattggtcaagatttgttgatttcttcaatttgcagggatttactctatagacaatttaagtaacgatttattttttctcattttcatagaacaaactatcttacatcatatgagaagccaaaaaaacgtggctacgtttttcaaaatttacttccctctgtttccacgaacacaacacagtgaccaaacaatatactttagactctcttctcgtcaatcggacatctccacttcagggggcttgtcctgttggtcctcaggtgaaatcgtagaagcaagatcttctactttcaggggagaatgnnnnnnnnnnnnnnnnnnnnnnnnnnnnnnnnnnnnnnnnaaatgcttgagtcaatttcataagcatgattctcccaaaattcgtatgccatatgcaaggagagagagtaccgaccttggaatagctatcagcaaaggctcgggctcgatttgatacaccgatatattgcaaatacgccttctcaaatctaccatccacacatttcagccctccatcgccaatggcaaagcgaataagacttcctgaagacagccctgactgtaatatccaacatggcacgaaccacacatttagcaaattaacacagtgcgaaatcatctttacaatctgttattatgggtacatggagtctataacaaacagagcagtactaagctagagggctctgttggtcctagaaagaactcaaagaagctattactaagcaatatcactaacttacgagtacatagagtctataacaaacatagacacagtatagatactaccactgagtatgaagcaaccagtgatattatacagtaacaatcataaaacaaaggatacaagatctgtccactttctaatataatcatcattcatcataacaaatatagatatgttcttcaattttcaatttttccaaatgctgatcatataatcttggtttaaaggctgatcaggatatataaaccactctattatattctgaacagacctgttttacaaaatctgcatttaagcaactgaatggtacaggtggatcatcagatgttacaagttttccttcttcttgcaactccaagacaatctgtttttacaagatacagagagaatttatgttaagactttgtaaatgggagtgtaatactaaacactttgtatgaaaaaccatgagctgtaaaagtctgtcaaaatccacttacatgttgttggtttggaacttctccattgttatcagtatcgatgacatactgactacagctctcatccttccatatcaacaccagaggagtatttccagtatgataatgtgcatgtctgcaataattacatgaactttagtgggaaagagtcaaagaaaaatactagaccaatgagatattgatatcatgatactaccactgagtatgaagcaaccagtgatattataaagtaacattcataaaacagagaatacaagatctgtcctcgttctaatataatcatcattcatcataaccaatggttttgatacgaaattgttaagtctgaagaacttttttaacgaaaggttccccggttatcgaccctactgcccaaactaaaaccctataccatcataaccaaatgcattccctaatatcccttcaaaccattcagctctaaactaacgacttaaggtcctttgctgagatggcaaaactacaactaactacataactcctaggctagttgcaataatcctgcactagaaaacaactgattcgctactccaaaccttaaggcacccaaactttttgcaagtgcagacagcaggagaaggaaagatgggaatcacagtaaacttaaaggcaccttacaagtaggcgagatgaaatgatg

SEQ ID NO: 38007 - DNA, 1832 bp, Arabidopsis thaliana landsberg
ctatctgatgtcttttttcccgagaatttcagataggaagtgtccttgtagccgcaacttcatattggggtcgtccggattggcgccactataaatattccgactattagatacaaaagccctgtcgatgaaagtactaccttggaaatgtcgagaaagtcgtttaaacagagctcttgcaatggtagtcttaccaatccctgatgaacccgatataccaaccattctcacttcttcagattccagttgcagcagtaaactcatttcagcgatgtgatcttcgatgccaacaagttcctcagaatccttaggtgtagttaaaagcagtttacccaaaacatcattggctatttcttcaatcatttttgcttcgtcgttcctaataagatgaaagataatttaacaaatatgaaacaacaatttatttcaagatgtatcaacaattatataatgagttagtatatgtatctaatcatgaataataaccataccaggtcgcagaatcaaatccaagcatattagctacataagtcaatgctttcttccattggtgtttcacttcttctgtatgtctcttgcaagtcttttcaaagatacttccaaattcaccgatttgatgcctcacatgggaaggatccacaccgtagaaaactggtatgataattttatcattgcaatttacaatctccagcaactcgttaagacaccatagtttttggagaaaacgaccacagcgatcctggattccttgatggcttgttcaagatcgggccagagagagtggcttttctcgatctcattgtctctgaaagcagtaattagtttccgatcaagctctttgagaaagtggctacggaatgttacgcggacgtcttcccctctgaagctcaagaaaacatcatataaccaatttcgagaagaagatgaagaagccatagagagaatgagaaggatgaaactaggaacaaagactttggagattgagattttaagaagaggaatagagacgaatagtgagatataaaacatttgacataacagctgagaggtattggtgtctttcttcctcgtagttctaatactcgagcacattgtctagctaaaaaagctcaggctcgaaatagtctttttcccatgtaagcacatcggttcctgaatggctttctctagcggagactctcttcccgataatttaatataaatagtgtttgataaaaaaaaaaaagagatgttgacgtgtttcggctagatcatcgccgcaaaagacgaggaagccagtttacgtcgtgcatagcccaccgaacacagacgtagacaagatatcgaccggttcaggttttagcccattcgggtcaccccttaacgatcagggtcaggtcagcaactttcaacatcactcggtggccgagtcatcttcgtatccacgatcgtcaggaccattgagaaacgagtacagcagtgtccaagtgcatgatcttgaccgtcgaactcatgaagatgaagattacgatgaaatggacggtccggatgagaagaggagaaggataacgaggttttactcgtgcttgttgtttacgttggtgttggccttcactctcttctgtctcattttgtggggagtttccaaatctttcgcacctattgccactttgaaggtaattgatagatttgatcgcttggaacgtgaaaattttacatttatttctgttttcaaaatttaatttttatgaaagtataagaagaaaactagtttcagttcagattgtgtgttagctattaaattcataatttaccaaacaagaaacaatatttattggtgacaatgacaaaga

SEQ ID NO: 38008 - DNA, 3922 bp, Arabidopsis thaliana landsberg
tcaggttttttcctttgttgatagcttttgttaaggaacatataaatgactggagagttaacctgttcgttgtcaatctctaggtccaaaatccgcataatataaagtacagtgggacagtccaaggattgaagcatatttggagaaccgagggacttcgtggactgttcaaaggaaatggcaccaactgtgctcgtattgttcctaattcggctgttaaatttttcagctacgagcaagcttcaaagtaagacatctatatcttctctgtactctgttatcttgatcttaataaaggcatcatacttgatactatagatctttttctaatctatgctttttctcttttttctctcatagtggcatactgtacatgtatcgtcagcggaccggaaatggtaaattgatttcagcataacatttttattattacctgttgaagaatctgtgcatggtattattacctatcgcttcagcctttaaattaagtttctaagttgagctatgttgaactgatatcactagccttccatatttgatggtgcaaacaatagggctcgttgtttgtaagaatttatgttcatgggtttgtgtcatttctgcagaaaatgcccaacttactcctcttttacggcttggagctggtgcaaccgctgggataatagccatgtctgcaacgtacccgatggatatggttcgtggaaggctaactgtccaggtagcttttcgtaccctaagtttgtaattgctatagccttattgctcatctttgtaactctgcaaatatggatatgtgcacagaccgcaaattctccttatcaatatagaggaattgcccatgctttggcaactgtcctgcgagaggaaggtccacgggccttgtaccgtggttggcttccatcagtgattggagttgtaagtcttgtgtttttttttattcacttaatcgaacgtaatactacaaatatttatgagttgatgagactcttttgataaatgcaggttccatatgtgggcttgaacttttcggtgtatgagtctctaaaggactggctagttaaagagaacccatacggtctagtagaaaacaatgagctgacggttgtaacgaggctcacttgtggtgcaatagctggaacagttggtcaaacaattgcttatccactggatgtgattcgtaggagaatgcaaatggtcgggtggaaagatgcttccgctattgtaacaggcgaagggagaagcacagcttcacttgaatacactggtatggtcgatgcatttagaaaaacagttcgtcatgaaggctttggagcattgtacaagggtttggtccccaattcagtgaaggtttgtttcataacaaaactccgtttcttgatcttcttattagatgaactcaagaaagtgaagtgttgtttgtgtttcttctgtaggttgtaccatcgattgcgattgcatttgtgacatatgagatggtgaaagacgttttaggagtggagtttaggatatcagactgagtcatttgatatctcaatgccgtcaagaaagcgcacttctatttttgtagccagaagagaagttcaacaaagttaggggggctttatttatctcctttcaacatccggtgggaaggataaatggctataggggcttagccaaactctttttttttttctttttctacacttagattgggtttttgcttttatgctgaatcaaataagtcagtggccaactacatttggtactgcagtttgtgctacaacatgtttgggctcctcttttctcattcaattatttacactcttgttatgacccttattggttactttgcctatttagttgaataattccgtgatcctgtacttgctttacaaaattcatgtgcttgtgtcatttttatgtacctttgatcacacacatgttatgcacctttgttagatgatgtaaaaatgattgagaatattggatcgtaatttatatgaaagtgaaaagtgaaaacaagaagggagaagaaaaacacaaataatacatacatacacagtgatctttcgtaaagctgaactcttgccacatctttaaacgttttgaatcccgaccaaaaaaataaagacacatcaatcaatcatcataacttatgagtgcaatttaatcctgcattgaaattagaaacacaacattaatattctaattttcaagatgaacattaaaatagatttcatatacatttaacttggataggtacgtaccatttaagcattttgatggtgcatttactcatctttgaatcaagcgtttgtaatctcacgccaccgcaactgatagtaacccccaccgtaacaatcttacgccttcccacacccaatcctaccttcgttttagccatcactttcaccaccaactttttactcttcatgtccgctcttagcctcttaaccgtcggatcatccacctgttgcttcttcacttttatcggaacaatcacaaccgtccgattccctggcttctccacaaatcctttgactttcgttgacccgagactcgtttcgaaatcatcttctcctacactcaccgccacgtcaacgttaccgtaatagtaacgtaacttcccgttagggtttctgaaatcaagcctcgctgtagcctccgccgtcaactgcgataaaccgtcgccggctttcccaccggaaaagttgaaattgctgacgcggaaagaggagagacgtacgacggggagtctcgggctgtaataaagaaagaaaacggagacggtgaggataaggaggagaatgacaatggcgacggtgatgcagacgcagcagcaaaagacgcggcaacgactccatcgtctcttcttcgtcggataaaacgccgcaggaatggcatgttttggtgggcgacgaagcattgatgatgatgatgaagatgacccgagtggagtttgaggttgcgagtggagctcacggtagcctggtggtttttgaagcaccggtttaagtagagtctctcccgccatttcttagtctccggtggtggtcgttaaacttctttgatgatctctgttcttctcttctccatgtaatgttaagtttaactataactacaaagtaaaattgagattaaattttgaatagtcagctttcatgtcttataaaatattacaatgttatgattttgtctataataaaataagtcttgtgtatcctgtcctaccaacaaacacaaattaagtaatttgatttttccgacactttggccacttactgaaattattttggctctctgtaatatgaattgctcaatgttttattaaaatattggacttggtcatgagtttatggcctttggtaatgaatacatttgtgtctagatttctagatgacttccatattttttcatacaaattcttcttcaaacatgcattattcccgtaatcaaacatcccaagatattgaacaatgacaaatatggaattaatcagaccgattttagtattctatttacgaggaatctcaccaaattatctgtcaaaagtacaaacaaacactcacgtttagtggttaagggaagcacgtcgattttgaagactaatgtgataaatcttcttttatatatcacataagaaaagtgtgtttacgaaacgaaagaccatcaaatatgtctccccttatctctaatacatttgcttatataactaaacctatctatcaccaattatgtggttgcagcacacaccagagaacaccgaatctcttaaaccatattacatcaatttctgctcactatgcagagagctacaaatctaagaataaaaacaaaaagtctccttttaagttacaatcacaacccaaaggaagaaatatcgggttctcattgccgcggccacgctcagctagccgcgacaggatcggttatcggaaac

SEQ ID NO: 38009 - DNA, 1669 bp, Arabidopsis thaliana landsberg
  unsure (1)..(1669): unsure at all n locations
tatattggttggatgaagttgcaggtggacacaatggtgcaagaagcatagaggtttgcaaaggaagacaaagaaaagagagatgcgatggacacaaggaacctggctgactccgtcgtttaccagacagagaagcagcttaaagaacttggagagaaaattccaggtccagtgaaagaannnnnnnnnnnnnnnnnnnaagagctgaaggagaagattgcaagcggatcaactcaagaaatcaaagacaccatgacagctcttacccaagaagtgatgcagattggccagtctctgtacaaccaaccccaaccaggtggtgctggttctcctcctggaggtgaagcttcctcgtcgtctgacacatcatcctcagccaaaggtggagacannnnnnnnnnnnnnnnnnnngctgacttcacagacagcaattaatacgaattggattcatacaaggattatttatggggtttgtccatgattttgtaggaatgataatgtgatttgtgggcagcaaatgaatggtaagagtcaaattttgtctttttaaacacatgattgaagcaatattctggagcacatattgtcgataaatgcagtgttgttacaaaacatgtacaataaaccaaacctcttgcagcctttcacagagaagtagagacgttctctgttagcatatcatgcaggcgcacattagatacctacaaagttgaactgtacaacaaacacataaccaaatatatacagatggttgcaatgtaatgcagcatagcatatcagaggcggagtccatggttcctaggactttgaggaacgctgcttgctcttccccagaacctgcggtcatcattgcacccgtacttgccatnnnnnnnnnnnnnnnnnnntgtggttgtgtatgattggtcccaaccgatgcctctgggaatttctaacggtgttggtagtcgtggcctacacgttaagtagttagtaggaggctgcacgtatgcattgtggttgtggttgtggtagtggctgtgtggctgcagctggtgtgagatgttgggactgctatgcactctatgcattgggtaaagccggctcaattggtagttgttctgaaaactcgtttctggcggctcgtgactgtatccatcaggtgattctgatttgggagaggagcaagtagagacggtgaaggaaggtcgtgttttgatgggagcacgaagagcagtagcactcttggatgtgcgaagaatgccattgatggcttcaatgtagcgttgctctatggtttgtggctcgatggggcctaactgactctcaagaaccactgggtttgcaggaaacaagaaagttctgagcttgggtgtttcatgacggttatattcctctatcatgtgtttcacatcttcatcagactttacagaaactaatgcatcaagatcttctggaatgatctggtatttgagcacaatatcgttctctgtgattgccgtaagtttcttcatgagttctacaattgaaaccatagctcgatgataagaagacgtattgtgagattacatcgattaaaggaagagttggttaatttaccggagaaggagatgtcaggagatacagcaacgacgtgagtctctcccccgccctatttgagaactccgtgggatggaaaaggaaggattaa

SEQ ID NO: 38010 - DNA, 2641 bp, Arabidopsis thaliana landsberg
  unsure (1)..(2641): unsure at all n locations
tccattttcccattttcttctcagtcgtcatcttcatcatcactcctccttcaccttcaccttcactctctcttttaccgccaatcattaccaccgattcacctcctaagcttccggcgaaaactgagcttcctgtcatcggaagctgtatagattgaagatccagtttcaaatttctcgaatcatcgttagtttcccatcgacgttcactctgtaaatcagtgtctgtgaaacaccataacgtagaggagcttctaaagtctccggcggtgcgacctctcgggctagtatctggaaatcgccagacgttgtcgattctcgaccatgaatctgtcgctggatcgtaaatttctccgtcagatcggaatcttccttgagattccgttccgtaaccgctcagcacgcaaaaccttagacccataccaacggcgaatccttgacattcgtctcttccttccgtcatcggagtaaccgacgaccactcgtctttctcgacgtcgtacacctccgccgagcgtaaagcgtttttctgatcgtcgtgacctccggcgacgtataccttcgttggacttacggaggcgcaggcgaagaatgatcgtgattccttcattggcgcacctcgtctccacttccttcnnnnnnnnnnnnnnnnnnnnacgtctctcgtcggctgtaacgtctccggatcccaaccgccgatgagcagaatcttcccggcgtcctgaagcacgacgcactcgcagaaaagcgggatctgctcctcctctggaaacgcaacgcgatgccacgtggacatcgcagcgttgtaaacgctcaatccaaaacgcggcgtgcagaaaacgcgcgggtgtgactcatcctctgattttttctcgtcaaccattaatgtctcgtcaaccgatttagacgctggaattggcggcgttagcggttgaacgaggcagaggagaagctctgttttgccgcatctccgccgttcttggataaaagaagagtcggagagtaagctacgccaagaacggcaaacggatcttatggcggtttgggattggaacggaactctagccaaacactccaaagcttttttggaaggttaaccgggaatcaattcatgacattgctgaaaatctccacctttctttctcgacactttcatagtcatcgaacttaaacaagttcgagaaaaacagaccagagagcgtgtttgattgaccaagtgtctatgtgtagaagaaaacacacaaaaactgacgaaagttgcgattttaatttgagtgagtgtgaagctacaaagaggtggcagagcctttaaatagggaaagaggaggatgagtttgcttgcggttgaaataacgcgacggttcgtttaaatttttaaaaacccctataaacttgatttagcagcgtatgaaaaaaatcaagattcgtgtatgttgcaaaacgcaaacgtatctaaaaatttatttcttaatcattccctttcaatctcaccaaacaggcaagagtcaacacatgggttactttgatgcgatttccttaataaggaataaaactttgaaatggaatctataacaactggtttagttcatgaagacggtgcttttgttaaaacaatcttttcataaaacaggaaaagtagaaagcttctagaagactttcataaggacaaaatgaacaactaacagtggagtaaatcatatactccataagaatttgattatttgaatatcaaccaaaaattcaagaaatgtccatgttgttccatgatgttaattgtaaaggcaaatagttgaagttaggtcagtggttacttggttaagtgaagttaggtaacaatattgtatattataatcacaaattaaattgacagtatactgcgccgcactttttgtttaacgcttttaccactgtatagcgtctatagtttaaaaacagtttgaactaataactttttaaactagtttatcaactagatatctagattactattccatttcagtgtcaattgaaaccgaatctatgacatcttgataataaagttcacgaagaccagtagtgagctttttagtctttaccatcactttttatttgaaataacaaaaagcttctagaagctatgcaaagacaaataatatggagtaataaggaatgagtcgtattcactgacgcaaccgtcaaccgataagtaaacatctcgtgaactgtttctccctaatttactacaatttaaaacaggtatattaatatgtatgatggacattttcatttcatattggcatgtgcacgcactatcaaacaaattctttcacgaatagtccatatgtatagattctttatgttttgccaaaaaatttgtgcttagttgttataagttgtaagatatcatcatgtgtttttaattttgtaatacgtattattttacgtagaaaattgcgagggcagtttcgtttgaatataagattcatcaataatattatgattgattataactttataaaggtttctactttattatagtcttctagaagaagttctcatggatatacattggcattaactatccttgggtcttactcttcgattattcaacatattatattaaaacgttgacacgtctattctgcgatgcaccgacgtaaag

SEQ ID NO: 38011 - DNA, 4163 bp, Arabidopsis thaliana landsberg
aaacaaacaggtcatcagctatcacatttgggcctagtttgaattagtggactccaaggcccaagatacgtaaaatcgctatttcgttttaaggttctaaagataaattatctgtactattaaatattttaatattaaaaaagaaaagaaatggttttatgatccgatcccttctcaatctcacggaggggaaaagattcctccaattcaaatctctgtctctgtctctgtctctgtctctcaactttcaatttctgagagagtcggaaatattctccagatcgcctaaggcaaattcgttttccgattcggcctagcgacggcgagagaggagaggaagaggcaagttgattgaccggagaagaagacgaagccgttcttggagaaaatgataacgattccttatttaaccgctgtatccacctacttcagctatggattgctctttgcttttggtcagctccgagatttcttccgtcgcttcattgattggtggctcactagcaatctccaggtctgtctgttttctccagtatataatgtacgtagatgtggatcaatgtacaaagtttgtttaactttatgcttcttattccggtgaaattggctatcgacagggatacgcgccgatctgtttggggcatgaggatttctatatcaggcgattgtatcatcggattcaggtaaattcattatcaaatctatgattctgttaacaaaatcgaattgattattggcattgtagttatgcaagctttaagcgttgtgaatgtttggcttatgagtttctcgtgtttactgcttgatgactaatgtttatctccgttatgcttcaaggattgttttgaacgacctatatcgagtgcacatgatgcttggtttgatgtggttgagcgctactctaatgacaacaacaagacgcttaagtgagtctgtctacatgtgtttttctatcagtagtcgtagcttctttgattctgttgggagaatatgaaaatgctgaattcgaatggttgatacagtcttgtaaaattgtcccattcaagtttaattaggggaagatttgaattttaaattaagaaggttgctgagtaaacctttgttggtgttgactctgtgcaggcgaacaacaaaaactagcaggtgcctcaatttggggtcctacaattatcttgggtttggttcttttgatgaatattgcacgcctcgtgttattgagtccttgaagaaattttcagcaagtacatgtagctctcgtgttgatgcaggtaaagtgtctttgcctatagattcaagaaccattttggctctgtttctaaacaaacttgttttctgctatcaggaactacatccgtgcatgcagaacttgaggaatgtgttactaggtttgtgggaaagcctgctgctgttgtttttggcatgggctatgcaacaaattcggctatcattccagtcttgattggaaaggtatgcattggtttaccctttatgatgaaggcatatgttgtctcttttctaaaacccatgcttaagttgatattttttcctgtgatgtcttgtatacagggagggttgataataagtgattctttgaaccatagttctattgtcaatggtgctcgaggttctggagccactatccgtgttttccagcataacagtaagcatttgttgtgtttcagcttcagaggttctttccatataatggatggcttacatgtatattctcttgcttgtgtttcttagcgccttcccatttggaacgagttttgagagaacaaattgcagaaggtcaacctaggacacatcgaccatgaaagaaaattattgttgttgttgaaggtatttacagcatggaaggggagatttgtcatcgaccggaagttgtggccatatgcaagaagtataaggtgagacaatattcctgaattactgattatgagaattggttgataactgaaactattttgtgtgtgcaaataccccttaaaaagtaactgggttcactatgtgccacattcaatataagcgataaattaaggaactctattgactaaaattaccctttgaaatgccatattttctaaactattgggagttttttgttgcgtgaaaagatacacctaacttatcttctatcttcgtttcaggcatatgtttatttggatgaagctcacagcattggggcaattggtaaaacaggaaagggtatttgtgaactcctgggagttgacacagctgatgtggacgtaatgatgggaaccttcacaaaatcttttgggtcttgtggtggctatattgctggatctaaggttagaaaatgctacatttgtttttatttactgatcttgcaaatctcctgcagtcttgttttggtaaatcaagtttctgaccttttagtttagctcaaaaagaatattgatagccgtaactttcactcaaatataaaccattaaccaaaaaaacgctcactcaaaagtcaaaacttattttgaacctgcgaaatgacgattagtatatatatataaaggccttcagtatctatacgacataccatgtgatacttaggtaagctgtacacttcttaaattcaacaaaagtataatcaatttattatttttattcaacttctataggagctcatccaatatttgaagcatcaatgcccagctcatctttacgcaacatccataccaactccttccgcacaacaaattatatctgccattaaagttattctgggagaggatggttcaaaccgaggtactcgattttttttctcaccgtgtcattaattggcctcatttgggtcactgagcacaatctaatcaggtcatgactcataacctaaaaactcccattcttctcaaatactgaacaggggcacaaaagctagcaagaatacgtgagaacagcaactttttccgggctgagctgcagaagatgggatttgaggtacttggagacaatgattccccagtcatgcctataatgctttacaacccagcaaaaatcccagctttctcaagagaatgtctgcgacaaaaagtaagttctattattcaaatccaaatatcatatgagaactcgattaacacaaggtaacaagatcaaaaagtaaatgattaacttgtgggtgcaatggaaccttgaaactctgaacaggtggcagtggtggtcgtgggtttcccagctacacctctactgctggctagggcacgtatttgcatctccgcatctcattcaagagaagatcttataagagccctcaaggtaaaatattgcattctacccacttgtgtttttttcttattacaaataagcgctattccacagaagtcccaaagcacaaaactgctaaaatagatctatatgcttcgatagagctcggtttcaatgcaagacaagttttgaatcaatgtgtgtggttttgtgttggacaggttataagcaaagtaggtgaccttagcggaatcaaatatttcccggcagagccgaagaaaatagaacagtcgaaaaacgacatcaagctggattgaagaattaaccaatgaaatagagatgcatccaggaaaacgcaagcaaatgctgtgttatgtgttaacttctccatatctctctgatgtgacacaaatctgatttctcaggggtccagccatttcctctctaagtaaaacacaaacccagagttagtccacctttcctcaagtcttgtttaccatggtgctactgcatttatgtgattcttcatccatgtttttccaagagtttaaatgtatagtaatatcgttgaatgatgtcagagttcttttattactccggacaacaactgttttctatgtttggattatttgtatcaaaaggctttggataaattggtcaattaagttcccaaccatcaaaaaccacaaggtacaacaatcacaaataagttaatccttcttcatcttcctctaccattacaacaaactaactaaaatgttacattcaaaccaaaaaaacatcaaaagagagaattaagtttcagacattgccaatggctggtcacaaaaaacaaaactcttccaccatttttcacgagaactccctcccaagcttctgaattgcacaatacatcttcctcctagacccaacagcattaatccccatatctttaagatcct

SEQ ID NO: 38012 - DNA, 5136 bp, Arabidopsis thaliana landsberg
aatttagatgtaaatccacagaacttctgcactattgtgggtgggtgatgccattgcttcgtatgcgatgactatagatataagtattcatgtgcatgaaatagagtacgaccttcacaataactgggacgactagtggaaaacttctaggcaaaagtaaccctctacgagccagttcagctaaggccaaacaacccccatgccatgaaccatctccctgaatgccatgaaaaccacaataactttcagctagataatgcatgcttttaattggattttaagtacacgcaagccatgctgccatatccacaacgagtacctctcctggtgaaaaaagctccaatacagatgacaacacctcatcagacagaacagatgttagacgtgaagtaacacgacctataccctttgcagcagaccaacgaaccacggtgtcctacacagttcagaaaataataaatttcaaaaggacaatgcttgcagatactagtaacatgtgcgattgtctggttggcagctgaaagtttcaagaggcggaaagttcacataagatattaattcaggccatcacagctttacgtgccatctcagatatgtataacattcaagatctgtttaagtactatctggttactcgagtctacaacttaatataaagcagcctacttatactcaaattattgtgtgggcatctattcgtataagtttagagataaccacctaaagttatcagcctaacagtagtatctcaccctttaaacataccgtgtccctcaaaccagatagtagcatttcaataatctcttctaagatttctggaacatccatatcttcatcctcttgatcatccaaactttctggttgtaagatggcagtcacagtatgatcaggcgccaatctttgagatgaactcgtagacatattctcagaaagagaggcggtttgagcctgcaggtaattcaataaataagtctcggatgactaacagaaaatgactaccaaacattatgtcaatattgacattattcatagagtaaaaatataaaaacacatgacgaggaagagttcctctttgcactactattctacaagctaaaaggtatgtaccacatagcgccaggaaggtgagcgatgaggaagacaaacaagccctatcctctgagttaacttgatcaaatacttgcgaagcagagaacttttagccgcggcgtttgatttgcttagcacagtcacatcattcaaaacaataggaagcacatctagcaacactttccggctagcagtctgccaacatgagtagacatattagatccagatgcaaattggaacaggttaagtaatagaaaccagtaatatttctacaagatacaaaacagataaattgattatgtactttacagacatctatatatgtttgacgtgttaagtatggaccaaagttaaaacaaagagaattccaggttacaaacagaataaaccttaaaaatggcagatagagcttccattacaccaagcaagcgaaagtggttcgtgacactatcttccttacaagacaaaacttcatatgtccactcaaaaaagctgaaacggaaatgccacaatagaataaagaaaattagttaatccattcacgttgagtaaattgtacatgttacaattgtaaatagcagtttagaaacaatcttaagtgttcaaagtgaaacaacactgaagcactgatggtggtaggaacagacctcgaaaaagcttttcccatatccggacgagttaaaagcttagagagtagcaaccccgatatcctgcgcattggtccagcactgcacagatagtccttacagaaacctaatatcttcaataccaaaggagcaaggtcatccacaccaaaggtcttgtcatcagcaatgcttgtatcaacagaagaaatatcaaacggaaccaacacaaggattgaaagccacaaaagagtaacacatttggcctccatttctccagtgctttcttgcctcaaggcagaaacagaatttgtactatggcacttctcgaggagcaaaacggcgagttccagatcggatacttgatgcggaaagaacttgataacagctttgtacccacatacagtaactaaagcatagataatgatgcttattggcttaataatctcaagaatttcatcaggtttggcctctaaatcaactgttttggagcggatgataaacattaatggagaaactatactctctaagtaaggttccactaattgaccttgctcctggtatttatccatctacaatacaacaaaacaaagtcggagaaagtaaatcaacatgatactgaaacatgggttggatcaagtagatgaagtcaaaagactaagaagcgtacaatggatcggatcttatgaacagaagtaggatcaacaacacggccatttgaaacaatatcatcgagaagagacttaacgagcttccattcttgtaaaaaatacctctgtagaactctctccttagaatcatgctcatcgtcttcttcctcttcaatttttaccgccgtttcgatttcgatcttcgtcggcgacatttcctctgctctagatgccattactggaaagagaaaggggttcaataaattcccgcccgccgataatactctcagtgtagaaccaccggcaaatcacgagatcggtgacgtcgacgatgagtttacatgttaaggcccatggttatttattgggcctatatacccatgttcctattttgggcctataaccttcctcaatgtttcttcgttggtctagattttccatctttgggtgcttttataaaccggcttaaccagagttggtaggcttgatacttgaatttgaatctctttctggttttgtatattcaagaataagcaaacatttccttaaaaataactttttttttgtcgtacctcattttaaaaaagatattttatcctatttcattatggcggaatatccaaagaacaaaaaatggtagtaataaaaatagcgaaaggcatagaggatcactaaactcttagccttaatcagcggtcaagattataccttttagtgagatcccacggtcagatttgatccaagttgtcccttagtgaaaacgaagagatggcgaaattttgtttgattggctaaaaatcaacacactgataaaataagagttgcagagagagtctctcatcttcttcatttcttcaccaccatcatcacacaccttcttcttcttcttcttctctctctatcacaaaagagtcaaatccatggcttctacttcttccctcgctctctctcaagctctcctagctcgtgcaatctctcaccatggttctgaccaacgtggatctttaccagctttctctggactcaaatccaccggttcacgcgcctcagcttcgtctcgtcgacgtatcgctcaatccatgaccaaaaaccgatctctccgtcctcttgttcgcgctgcagctgttgagactgttgagccaaccactgattcgtcgattgtggacaaatcggtcaactcgattaggtttttggctatcgatgcggtggagaaggccaaatcaggtcatcctggtcttcctatgggttgtgctccgatggctcacattttgtatgatgaggtcatgaggtataaccccaagaacccttattggttcaaccgtgaccgattcgttctatctgctggacatggatgtatgttgctctacgcgttgcttcatcttgccggctacgacagcgtccaggtctgtgatctcttctctgtttaattgctttcgatctgatcgtaattgatgaatgtagtaactttagtggatagattgaatctgttttgatattcatctgatggctgcttgaagtagattcactgaaaaggtgtttggatttgtttattaggaggaagatttgaagcagttccgtcaatggggaagcaagacaccaggacatcctgagaatttcgagactcctggaattgaagtcactactggtttgagattttgcttcttttggcttatggttcatgtgaaatttcacagaaactatctataactgtatttacaattgtgctctctgctttggctgctatgcaggtcctcttggacaaggaatcgctaatgctgttggtttagctcttgctgagaagcatttggctgctagattcaacaaacctgatgctgaagtagtcgaccactacacgtaatatatataacccatagttatgttgtcgttcttggtttgtatatagctctgataatagaaatactgtttttgattgattgtctagatatgcgatccttggagatggttgtcagatggagggtatttctaatgaagcttgctctctagctggccattggggacttggaaagctcattgctttctacgatgacaatcacatttctatagatggagacacagaaattgccttcactgagaacgtggaccagcgatttgaagcccttggatggcatgttatctgggtgaagaatggaaacactgggtatgacgagatccgtgctgccattaaggaagctaaaactgttactgacaagcctactttgatcaaggtaactacacaatttcttaaccatcaaacatcggttgtctaaagacctttgtattgtttaccatattgcgaatccagtcactactaccattgttatgggtctcccaacaagggaactcatacagtgtccatggagctgcacttggcgagaaggaagttgaggctaccagaaataaccttggatggccgtatgagccgttccaggtacctgacgatgtaaaaaggttagtaaatccaaagcaggcttatgtttggttttattgctttgaagttgccttgatgacttactgtttgacttgcacttctctagccactggagtcgtcatacacctgaaggagctactcttgaatctgactggagtgcaaagtttgcagcatatgaaaagaagtacccagaggaagcttctgagttgaaatctattatcactggtgaattacctgctggctgggagaaggctctacctgtaagtagaactctctttgcattctgtacaattcaattggtattctagatatgagttatagaacatctttctttttccttttttag

SEQ ID NO: 38013 - DNA, 6733 bp, Arabidopsis thaliana landsberg
  unsure (1)..(6733): unsure at all n locations
agggagtggaaactgctatgattgatttgcatggttttgtgtatggagttgactgttttgctcacatggcagatgacaactattctgctatcatggatccacccgaacggccttcgatgatgattaaccagctaacacaaatccaacgtaatgctccagctcctcatgagaagtgtctaaaacgtagctataattttccttatgcatttggtggcgggatctcactcaaagagcttggtattatgaagttcacagctctgtttgtggcgcgttacgggatgcattttttttgagatttgatgaagaaagttgttatgaaacctcagtttaagttcatggagccaacaaatagcgtgttcggtttatataatgttgttgctgatgcgtattctagagtagtaaagccttctgatgatgcttgtacggagaccgttcttgtggattttttccgctgtcttcgatttgagaagctgtgatttgatttgcatgctttatgcggcttccactggaatatcagcgtatgtatcctccttatctttatagttatggtcagtctgcagacgcttcaatggggatgatgcaaactgcacgaccagaggaaccagaggcaaagagacaaaagtttgacgagtcagctcttaatccagaaggggctgttcgaaggcgtcacagtcgatggcaataagaaaggtttattgactttcatttaaacaagaaattgtcacagagtttcgattgtttgtttgtattagctcttttgcttaacacttgcatgttataagaatgcgttttcattcataaagaaacaacagttatttgtgttatagttagaattcctttgtaagttatacgaaaaaaacattaactcaaacagaagataacccacaaacttgaaaccaataatgggttggaacttcaatgcccaatttgtgcagagtaacccacaaacttgaaaccaatatttaacacgaaattacagcgttcaaaaatcaattgaaaaattgcttgaagtcactgatcttactcttttgcttagatctccaagaacttgttcatatttgttccagaaacatatgcattgcttgtttggattttggttcatggaactgttctctgcagcttcacagaagattactacagcgtcaacattccttctgacttgttcattttggttttggttgcgtcgactggttcgttttcgggaataatagttttcttatttgtccctctgcgttttcttttgatgttgcctgcaagagttttgattggcatgatatgttaataccatcaattattatgtcagcacgggttcttaaaatattatagatcaggaacaagatcttaaaacatgaaaggaagaacggatgtaccctcgtcgagaatgcaaatcgcaatgactcaatctttgctcctgcgcaaagcctgaggtcaaaacctagggaatctatttcaatttgcttcacttcctgcaaacaaaggggaagggcgtctatcatctattcgtacacagccaaaacctacagagatatcctgttatattccagagcttctagagttaagttgaagctatttacctctgcttgaatactgttatgtctccaacacagagatttgagtgcttcagttattttatcaccagattcttctaaacggcttatgatttcagctgatgcatgagcaatagcatcaggttgtgcttttctgacatcttccacctcaacttcagtctgttcccaaaagtttaaaagatactagtaagcataagattgcaacaaaaagaagagtttacataagaagtgaagcttgaaaacgagaatcatgagatttgccaatcaagaaacaaagcaagagcaagcgtaacacagttttccagatatgcgacaatggttagatagacgagagttttgcaagaacatgaataaatttacacagaaaagatggaggctatgttccaaacctgatccccttgtgctgtgataagctgaattcttatcatctccagcttgtaaaacgccaccacatttcttgctttttcatcctgtgatgaatctatctcagattcgtcaccacctgccttactattgtcttcaagcttgtccactaagttttctgcatccttgtttccgttagttgtagaattgctatcagcaagtttcttttggatatctgaataatcttccactaagatatgactcaaaagtccnnnnnnnnnnnnnnnnnnnnnnnnnnnnnccatccaatcaacaggatcatttgaagcaacctaaatttgacaacaaacaaatgtgttaaaagttaacctcagtcattctcttttagcctcaggtttgaaaatgatcttgcatatcgtttttataaagaaccaaaacactttctttttaatgaattctaaaagtcaacctcagtcattctctttgcaaaaaacatgggatgacaactcctcattgtttccaaatttgcccagtctcccagcgattcatcagaatcagactcatcatcatcatcatcatcatcctcatcatcatcatcatcatcatattcattataatctgtcgatatttttcttttacttgaatggaaaatttgctatattagtgacattactgctcaagcttctataacgttacataactaataatttactagaaataatattccttatcaaaaataatcataccacccaaagttaataataaaagatgcaaataatcgaccaaattttttgattgatgttgactttaaaatatatattattatgcttaggaatccaagacaaaagacatcatctttagtagtagatttgttgacaacgttgcttatgtccacattctgtgttttgaattttgaggttaattaatcattaatattgttttatctatctaacacataaacaaaagaacctattattactcgcccaaaagagtcgggtcggatcgggttgagctggattggcatggataatacattcaagagttatccatttcagagctctctatgtctccccaaatttcatgaattcccaaaaaaaaaaaatattgagagagccaaattagtgaaagctacaaatattacaaacacacaaactggtgacagattcaacaactgaaaccatacataaactaataacaattaacaagacaagaatgttagcatttaccataacccaaaacaaaacgaaagctgatttagacaacaagaagaagaagataatataacaaagggaaaaacagcagcaagcaccatggaggaaaagtcatttcagctagccaaatggtttggggaattattgaacatactatgccacatgtaagctcttgacaaaaccatttcgagctcttggtctgaccagttatgtgtcggaaggtgttgcaggaacattaccatttcttgaaaatctagcttcttcagctcatcagaccactgcattgtttacagaaacaacttgtatttgattctcgtggtatatagaagaaaacattttcaagaccaacgcaagttatattcgattcagtgtttgcttaccgtcaagagaaagctagcatatatatacaccaggaagtctggcaacgcatctccttcagcaagataagtgtcccatagtcgattgatgagattgaatgggatctagaaaagttcaaaggtttgtcagtttcacaattaaaaactgcgactaaaccggatttaagaaaccatggcatactggcatatattcgtaggagttcaaagtgatgtttaacctcacgaatcagaagacaattataccaccggaaagcaaattgaagaaactctagcccatgctcttccatgtgtcttgaaacaggttctagtatataacaaggcagatgaagatgtgacaatgttaactctatattataaaacaataatcaggcctaaaatggaaaataggtggttggttaattatgaattaatgcactaagaaatgcagtacaatagcatcaatcatcatgacaagttgattagcatcccttgttcttatcactttatgacatcaactcatcaaaatgtcgtatataagcaaaagcgtgactacattaaaaccaaacttaacacaagtacacaaccattgttaaagacacaaacttcaaatttccttaaaatgcagaagatgtaaattaaggacttcatggtaaacaagttgaaaatcggactcaatataattaacatgattctgtaaggagaggacgtgcatgtcataagctcaaacaatcaccaaagacacatccaattaacaggaacaagctagcaagaacctaccatcgatacgcctgaccagttccttcagcttaaacacaagtctctggattccaggttgagcaaacgtgtaatgatcttgcataccgtcaaggagctttgttaagcaccagtagcaatccgcttctacatctgagactttttcagcagatagatcatccattgaccaactgtctacaccgccatctagatattctgacaagaaaatcactaggaagggcgtgaccaggtcatttattccctgaacatatccgcttgctggatgtctaatggccctgcaaactcagaaaattcaatttttagatttagatttcaactgaattatccaacgggttgttggttgacccaatgcattctgtagctcaccacgtgtaaagaatacgctccagtgatttctgcacctgttcttgctgaaagaaactgacatctggtacagtcctcggacagtcaacagcaatctgagaaagaattaatttgctaagagatttaccaacttttgaataattggttatagaagcactgagactacaagataaccctggcgaagcatattgatctcatcatcagaacgttcggaatctggaaggtcataaaattggccaacagattccagatattcaagacgttttcttctcagaacagcctcccttctatctgaattaggtggtgcatatccctgttgtcagtttatatttaaattcaaatagacaaaacaaaccaaaatccaaaatagttgccgtgttgatggaaagagctaataacacaaatcatctgactagtgcaagtgtgccctcattctgactctaaataatctaaacagctatctatggaagatattataatgatcagcattataaatgtacataataaggataaatggattacaagtcaaataaacataagtttaacattggatatgcttagatatgaaagtcctagagcgtaccaagagaagccgccagacatcaggccgcatatagtgtggtacaccattccatgctagctcgcgcagtttctctgcaggaattgaagaggaatttccatagtaaccaattaacagaatatatgagaagatcaaaatggagtctttcattaagctatgtctggcaagtgatatcattcccataggattctcactatcgaaacagattccgggtaaacaaaacactacaacaaaggcaaagaagtgtacctaatatgacagttgtttctgaaagcactttgttgaacttcataactctagcagagtcacttgatcgaacacctatcttcaagttttgaacttctttcacactcctttcagcactagagtttgatcgtagcttaccagcatatgtattatcatgtttcttgcttgaattgtgatcctccacctgcatcatcactcttaatttcactttcccttgatacataaagaacaagagaataactcaaagtcatttccacaactactatacctcaacaggactttcgaatagctcatttcttccggcgtcattctcagataagctccgttgatatgttggagagattgggtatggaggaggatctgatctcctagtcaacaataccttaccaggaatacttctacctttaagaaacctaaacaaaaacaagcaaaaagtcgagacaatcaaatctgaaaccctgctaataaatttcgtgattcacaagtagcataacgaagttacagatctaagaagacattgaaatcagatataagaaatgcacgatccgggaggtgattgactcattacccttggacgttcttgagtgtttgattgaatctagaatcgtcgcgcttttgttgctcgtcttctctcttctccatggtttctgtttctgtttcagttctgatttccgatgttccacaacagagcttcttgcccagaagtgaaagaagatagttttgattgagaaatgagagaatttcgggttcgattgctttccatcgatttcaaggtctaaactctaaagtaaaaaagcgacgaaaagtaattaaaatccatctggagcaaaatttgattttgtaatcgcaaatgatgcatttaggcgttaatctaaatcactccttgaatttgtattggttctcttcggtaataaagtagttttcaaggcaactttgtttgatatagtttgggcataaaaaatgtttaccagtcataaacactactcaacacaacaaatgaacaaagtatatgattactcttttcttttacaggatttttttaattagaaaatactcaaatagcctgaaaaaacaaattattagtgtaggttaagctatacattgacgtttctctcttattgtcgaagatcgntaatctatcacagagggaaagaatgatcaaacgaatctattttgcataaatggcttcttattcatatattagtcagactatgttttctcttggttaccgaaatcaactgttcaaatgcggcaatcaaagcaatgagatgg

SEQ ID NO: 38014 - DNA, 1430 bp, Arabidopsis thaliana landsberg
tgtcttcttcttcgtctctatcctccaaatcgaaattgggtctcttcttttacctcaaaaaccaacacagctctcttctctaaaagggaaaatgcttcaaaaacccaaacgtagcttttcttagacgcgcttcatatacagtctgtcccgtttttacatattcgccccgataaagtttgtccttttactattataactataaacttatgattcgtccaatttacacccatatctccacccaaaacaagatttatcatattcagtccactatactgtaatatgaaacaacaatggaaactcttttccataaattgcaatctgttcctcacatttctctagattacaaaatttccccttcacctacattctcgttcttcaacgttagctttcccattaagaagaagagaatctcctgcaacaaatcaaacaagctgagaatggattcgtctcagggaatttcagctactacacaacagaagatagtgattctgaatagcaacaacgagaagctagtgggtctgcttcatgaaactggttcaacagaaattgtggtcttgtgccatggctttcgatcaaccaaggttagtgtgtgattgctgtttctgttgatcttgatttacccttaatcaaaatatgaatcttgaattgtaatcagtgactcaccaacgtaaatctgcagcctttttattatcttgtagttctctgttttctctgctcttgtggtgactaagatctgagacttggtcacatatgaattaactttgtctttggcctatgaatgtatccagaacttcgaaattatgaaaaatgtggctgttgctatagagagagaagggattagtgctttccgttttgatttctccgggaatgggtatgtttttcttgctaggtgccttgattatcttgatctgaataagctggattttgttttgactctggtgttgtggtgctttcattctttcagagagagtgaaggcagtttctattatggtaactacaattacgaagctgatgatctacattctgttatccaatacttctctaacttgaaccgtgttgttactataattctcggtcacagtaaaggtaagtagtaccgatctttctgcttcgagcaacggattttcaaaaggggtgaatcttacattgcaagaaactcaacttatactttgacattgcataggaggtgatgtggtcctcctctatgcctccaagtatcacgatatccccaatgtgatcaatctctcgggacgttatgatctgaagaaaggcataggagaacgtcttggtgaagattttttggaaagaattaagcaacaaggatacatcgatgttaaagatggtattgttatcgctcttcgcttttcatgcaccgttatcagaactttagtgttactatcaatgtactggtttgttacaggagattctcg

SEQ ID NO: 38015 - DNA, 3268 bp, Arabidopsis thaliana landsberg
ctgtattatgtaatgttaaacattgttattcgactaatcatttgattgataaacataaatgatatatattaattttttaatttttaaattttactttatttaagtaagattttcagcatgcatcttattagaataaatgggttgactggttatcttggattaacactggctaacctgatcttggtttaatgttgtaatttagccttgtgtatataagcattttattttatttggtcaaaacatttatccttacatttaaccaaagaaggatacagagtacaaaacatcaactctaatggtttgatgcataagacaaaattagagcaaatttacaacaaaggtagctagaaagattgagaaagttttaaacaaaagggataaatccataccatcccggagaaagaagctacaatgcaacttgtcataagccagatcatggtgtgtcaaagacacttctgcgaaacattcggaaagcttaagaatagtcactatcaaaagaatttgtgacgttgaaaaagattatttagcttcaaaggtttctagagtgaaccacttagaaaaaaactaaaagacttgaaatgattctctctacaaaggaagagggttgacgtgaaattacctccaaaatagagtaactttggtgtcaaagaccctcaaggtcagatgtgaattctacacagaagaaggcaatgtcgttcgtcctcgacaaactcatcggacaagacgcaagcaacggtccaagatataatcctgtcgttaacgaaattcgaagagcagatccttctggaaaaaagcttgtaatctatatagatttgattgagactaaaattcccgtatgaaaaccaacctaaagatttctttagacccttaccatggtaactaataggccaaacagaaggtgtcgctactttgcaagattggagtccacaaccaactaatacaaaggagctagacttaaaacaatctgggcttgaattagcttttaaagtaacagacctgggccaatgtggtgagtaagttgggcctgaacaatcattgggccttggtgagataattgtgaggttaggatccagctggcgaaatgggtccggcccgtagagagagaacaccttcgagattagggttttgccgctcgccgtcaccctctctgtcgagccattgctcccaaacaaaaagcaactctccgatatctcgactttgagacatagaggatcaagtagaagcgcatggagaggtgaattccttactatcaccgatgttcagtgaatcggtgcttcagaggaagctgagttagatccataacgaagggctatgacaaagacaacgatatagtagatctttgttttggacgatgaggcgccgcttgatttagagggttcatcttgtgttaatttcgagctttgtgctgagtccagagggtgaagtggacggaggttcgccggaatcctcctcctagctctgtcgcaaagtattagattgtcttcaaacatcaacacaagaaagagggttcgagatgattgagtaaaaagccaagattgacacaaagaaaaaagctttaaggaaacaaagttggagggggtcgagatatcccgacgccggcaagcataagctttgccggcgtcggacagaacgattgggaaaaaagtctcgagaatagtgcctgggagagtctcaacagtttaaatttatcaaccactagttcaaaacacttaaaaactttgtctttatttaactattgagctaaatagtcaccatttaacatactttttacttctctggaacttattcatctcattcagcttatttttattattcaacttatagttattcaacttatcattattcaacttattcaattggttcaatttcttaatcactatttgcagcataagtctcatgtaactagatgtattgaaattcaaaaaattataccaacaaaaagtctgtcatcactaaaaagattatcctaatcataaacaaattggacaataacataacatcacatgagaaaatatgttatcctttggatccgaaaaacaaaactgtcatgacttgtttttagtcatgaaaaaatgataggttacacaacaattcaaaatattaaagatttaggaaaatttgagaagattacatacaataaatctgcgagatattacaaatctgttataactatatcgaaagaagtttgtggtgctgcaaaaaaaactttcgaacaaaatctatggtgaaccaaaaaatatgtggtccaaaataaatatgtcgtaacaagaacctcaaatttaacaaaatcgaacaaaaaggcgaagtgtcagtatcgtaaataaatttctgcgtttttgaaaataaatactttttattaatggcattcttgtaatattattttttcatacaaagcaaaacaatggtattgtagacataattattgcccatataaccaatattttgggcatgtcattctaataacaaaacacaaaatatgggtcattatggtaaatttcccaaatatttatgtgatgttttggaataacaaagtaagttctttcgtggatcaaatttttgttgttgtgataacttcatctttccatccatcgaaatgaattagagatttagactccaattagagtttcttcgatttttgatatttttatgagaagaattagataaacaaaaaatgtgtgatatataagattagatattatgaggtagatcacatagaaactgtgtggtatgtacaagtatatgtccccacctatttatagtgaaaataaggatatgatgaaagtttttaccaaaaaacaaataaaattttttgataaagaagataaattaatttcataatgtaacactgagatattggcgcaaacatctaaaagggttagttagtttttaatattttcctaatagttcaaatatttgtttcactgctaaatttgttataactactttacgcgggaacatttcaaataatataatttgtaacggtttgtgcacgatatttaaaatattgttaatatttttctatctacttaaacactagcttatttattatttagatatttttgttactatacatactgttaattcactagtaatatacagctgtcacaagaattatattccaaaatacaaatagatataaatatttttagtactcagtattcaaattaatgatagtcaccaaaaaaaaaagtaattattctattccaaatatataaaataattttatagaaacaaacttttacagttggtattttttctagtcaacttt

SEQ ID NO: 38016 - DNA, 1021 bp, Arabidopsis thaliana landsberg
tctcatgtcgtgaccagaccggagctgagtgcaagtaaaacattgatttggtctctaacctcaagacgatgtttcctaaacgacgctgtttaatacaccaatatcaatatgtgttcgaatttaataattttttttttagtttcagaataaattaagaaaaagtcatgaccaaaaagatcatctcctttgaaacaaacaaaaacaaaagaattttggttgatcctaatgactcttccattgccaccatgaaaatgagggttttcattatagtttatccatctcttgattactatgaattttaattttcttgtaataattatatttctaagtgataattttctaatttctatcttaaattgtagcattgactaaatatttccatcttcatcttcaaaaatatattatgataatattaagttattgctaatgagagatgttataaaaagagttgtgatgaagtcattattatgctatttatgtatgattaataatatgttataaaaattactattgcaataaatatagttttcttatatcattgcatttatttataagaataagatacaaatcaagtccaataacttagagaaaataaaggcaacgctagaatcatcaattttgagagaaaatggatttataagtttgtattacttttgacaacaacatttgaaaccacatggaatacaaggagaaccacactgtccacctttttgaaagccagctctaagacagtccttattacattcatcattccagtaatcttcggaacacctaatattgcagttgtcaaaagagaagccttcgatccttgcatctacacaagtccacatatatatcaaacatcatcaataccaacatgtgtaaattttatatcattccaataaaaagacatttatacatatagcatgtccaaataaaagtttttaacgaaacttttgaatgcatgtctaatatacatagacacacaattattgtcgttacgaattttaaaaaatttagatatagcttttgaaatgatcac

SEQ ID NO: 38017 - DNA, 1105 bp, Arabidopsis thaliana landsberg
cttatatataaataaaaaaaaaatcaacaaaaaaaaacaggtaagcatagaggtcgtgataaaaaatacggccttaactggtgcagtattcaaaaacttgtgctagatataaaaaaactcgtagcctcatagtccatttcataggttgagtatccctagtagcataaaaagaacacttagacaccataactaccgagactagcatggcgagaatataaaatgaaaggctatatataggaaaaatgattctcacagtggaaaaggtgtttggctcgtgtttccttaggcatcgactctgctgcaagtaacctctcggcacctgcgcagcaacatccgaggaaattggccagtctctcactccgtagctgaccaaccgacctcgcttcctcctgcacaaggaagaagaacacattctcaacatcaaaataaaaagagatgaaacaaactacaatttccaaagataagaacataccaagaactgtcgtgaatcaggccaggccattctagtaaaacgcttgacagcaatcttcttttggttctccaatttccctttatagacaacatttggagccttttctccatgttcagatacaatatactccacggcaaaaccagaagtagctgccttaagctgttctaaagtatactcccggaaattaggaacatcagtgatctcactactctctccattatctgcatcaatcagacaatgtcttatagcttcttagatccaagtagaaaaaacactaattcattgtcttaaagaaactaaccaacatcaggagcttcaagaacagctgtcttgtgtgaagtgttcctgcaacaactcaggctagagcattgacctcccatctaaataaaaccacgctccaaaaaatattcaaagactcttgcttttttctcagcccaatggaaaggaaaggttttgtttcaattaggagatgtctcttcgtaaacccagaagctgcaataaaattatacagccaatgaatgatcttaccaaatcaaatcttcaatagtttcaaaatcagtgaagtagagaaaaaaggtcgtacctttcgactctactgagtcaactcgactagtagactcaaaatcggaaggg

SEQ ID NO: 38018 - DNA, 1810 bp, Arabidopsis thaliana landsberg
  unsure (1)..(1810): unsure at all n locations
tactaacattttaggatttcttttggagaattaatattgataatatttaattctgaacatttcacaatcgagactaaggtttaatcaattaattctcacaacggaaatcgaactcgtgttgagattgttcgagaaatatctctacttcttattgtatatataaaaaggaaaaaggatcaaacaactttctttttttttggacaaccttgttttcattcaatttagagaattgagttcatacaagcgaggagacctcttttgccaaggcatcagcctaaaattttgctttcgcgagattaaaaaaaaaattacaagtatcaaagaaattgggaattaaacaacttatgtctgaatattttgggacttaaacaaagatgcaaacttttataactaaaaaaagacccaacataaaccatgcataaacgaaactaataaaaaaaaaaagaagtagaaacgatggactggaacattaacttccgaatgttaagaagacctaaacaaacatgtttctcatattgttcttctgagtgtctcaagatcctatgcttccactactgctggctttatgattcatgttcatagcgtggttgaagctttggttccacttgtgttgatccacttgatttatgcaataacttgtaagattatcaacatacccaccgatggattggtttatcaaagggttatcaatcaaatcattggacccaacatcgtaatagtcttgctcaaatgatccatcatggaaagctaagcgatgatttggtcgaacagttcgagttggatgcaaatttgttaccataccaccatgaatatcatacaaagaaccaaaaaggttcccaacagcaccaatagaagatgaagatgaagcaccaaaagatccaacaagatgaacgttttcttgaacattagagaaaggttgattgttacctcgttgggtctcaacagaaaccatccgagcaaccgaaggttgatttacccttgcccgtttggcacgactacttccaccaactggtatgtttcttaaagccccaccatgagtccagtatctacgacagttcttgcagaagtatcgtggctgaaactcacagtagttgttgtaataaaaaaaaactttttgatgtcaagatgtgattctgataacactaagttttgttattataacacctacaataagactcaacctcgctacttctgctagaattgtcatagatattagactcgtagtggagttttaagaaaagtaccaattgatggaagttgtcgtaaaaccataacgtgcatgggtagatcaacctttggtttctcggatgatttatgttgaaatctaacaatcaacatttcttacatgtaaaagacaacatcaagtttgtgggattgtttggtactttaatttaagggtagtaaatctatatcgtagatactttgtggtatcttagaaaacaaatgtgtgctattttctagaataaccataaatatctttgttcaaaaaaaaaaaacacacacataaatatcttaatgtttggtaaatatagtaaacaaactaaaataaatgaaagtaatttaaagtatattttaagtaacttattttattattttacctagttaacccattttctatattttttgagatcttgaatacctgtgaagccgatttgttggttaaaatctagatattggaaatttcagaaagtacaatataagtttttgtaatttaaaatattaccaattntgaagcttttacatgagttgaccanaaccatgtacatgaattaantcttgaaaaaaatcgattcgatcagaagtttccatt

SEQ ID NO: 38019 - DNA, 2918 bp, Arabidopsis thaliana landsberg
cccgcttttaaaaattaaacttcttgacatttatttgattacaaataatttcattagcgatgaaacgacatggtttaagttaaccagaagttgtctgaagactcaccaatgagaaataaatacctgtaggaccttttgacaacaatgaagagtgagtcccacgttccacgagtttgcctttgtctaaaacagcaattgcatcacaattctgaattgtgctcagcctatgtgcgatcaccacactcgtcctccctaccataacacgctcgagagcatcttgcaccacacgttccgactggctgtccaaagcgcttgtcgcttcgtctagaagcaacactgacgggtttttcaaaaccgctctagcaatcgcgatcctctgtttttgaccaccagatagttgtactcctctgtctccacagtacgtatcatagccgtccgataatgttactatgaaatcatgagcgttggctgccttggccgcctcgataatctctgactcgtcaatcttgtcagatgctcctccatacatgatgttctctcggattgtcccagcaaataatattggctcttggctaaccaaagctatgtgttgacgaagtgatctcaaatgataagactttatatcacggccatcgatctttaccataccctttaacgggtcataaaaccgttcgattaacccgattatagttgatttacctgacccgcttggacccactatcgctgtcgactttccctcgtcaatatcaatggagaagttcttaaatataatcacatcagggcgtgttgggtacgcaaagtccacattgacaaactttatttgtccctttatgttttgtgggacgaaaccatccggtttctccggttcaatgtttgtgtaacgatctaacaccgcaaatactgatccgaccgcatccgagcccttggctagatccatcgtcattgctcccgcgtccgcaataacccgacccgtactcacaaagagtttaaacaactcaaagaatgcttttgacgtgatctttccatcaataataagtctagcaccgtcccagtaattcaaagctgatgtgtttgtcatgagacttctagaagttgctagcacaatccctgctaaccacgattgacggatattttctctttgtggtccttcttgaaccattttgagtaattttaggatccgttcttgtgacgaaaatgctgttatggttcggatgttggatacagcttctgccgctagtttgctgctctcatcttgtgctttaatggcttttttcgatatgcttttgagtacaatgcgttgagtgtagaagcatccaacaaccactggttgtattgctatcatcacaatggataattcccaagaaatggccaaaccaagtgtgcaagctatactcactgctgatatagtttgtaccaacaacgacactcgttcaccaacaagcgatctcacctatcataacaaaacattatgggatcactcgtaaaaaggttgatttgtagattttaaattagtaagacaaaaagacataccacgtttgcgtctttggctagtctagagcaaattgatccactcgagttctcgtcttcatcgaaccagcttacctcaaaggtcaatagctttgagagaatattttctcgtatacgtttcgttaggtattcacccatgtaagcaaaactatattgttgaatgatactgatcaagaaacataaaacagctagaccaacgaaaagcaacacatagatccttgttttctccttcatctcatcatgactcgttagaaaatacactgacaccattgatcctgaagcatatgcataaattgggtgtaaggctccatacaagactgcacttaagcaaccatacaatgcatgtttccactctggtttattcatcgccatcaatctcttaaaagatggcttcttatcctttggaattgaaccagcaagacttgtatcaatgcttgaagttgcgaaaacggaagaccgactttgaatagaaagtcttgaactatacttcacgtctttgttgaaatttgagaattgaccctctcgcatacttacgctaacgttatcatttgattcttcattttccatgatttgtaagcggactagagaagtgtattgaccatctacattctccatgagctcttcgtgtgatccagtttctacaatctgaccatttttgaatacacatataacatcaacattacgaatagtagagaggcggtgagcaataacaatagttgtacgaccaatagtggcattgtctaaggcttcttggactactctttcggattctgaatctaatgcgcttgttgcctcgtctagcagtagaagtgtcggtgatttgattatcgcacgtgcaattgaaatcctctgcttctgaccccctgacatttgcactcccctctccccaacctttttttgtaaataagaaaaacaaaatatacatttttgactcaaactaaaatcaaacaataatcaatgttttaaaagttagaatctaacctgagttttgtaaccaagagggaactgagaaatgaaatcatgagcatttgaggactttgcagcttccactacttcatccatggatgcgtcctctttaccaaataatatattctcctctatcgatgtggcgaagagtgctggctcttggctaactagacccatttgtgatctcaaacatttcacttgcaactttttaatagacacaccatcgataagaatctctcctacgatggggtcataaaatctttgtaaaagcgatatcacagttgattttcctgatccgcttccacccaccagagcaacagatttaccagatgagattcttagacataaatcatcaaagattggtgtctcgggtcttgatgggtacatgaacttcacatgcttaaactggacttctcctttaatat

SEQ ID NO: 38020 - DNA, 1391 bp, Arabidopsis thaliana landsberg
atttaacttaccggagatttggtacataagtcggcatgaaaccggacgacaagaacacggcaacggaaaaccagcaatcatgctggacggcagaataaggataaagtctccctctctgaagaatgttagagagagaagagagcgagactttagaaaatcgctttttacaaagtttgttctgcttcatctaaccctctcttgtcatattatataagatttttatatcatgtgataataacagattactggaagatgtgataataacagattagtggaagatcaatcctactatattatttgttgggaagtacattttaaatataaccttatttttgtaagtaattatataggtatgccactagaaataaaattttaaagagtaaattaattcatttttaaaaaaaaaacaaaaagtcaaatactaatttaattaattaaatttaattcaaaaacgaaatatattattaatttccaaaaaaataaccaattaaaatcaacaaattagatttgatatctaaattatcatattaattttttattaattattatagttcacctctcatcttatataattctatttttgcgaaaaaataatatcatcgtagtttgaaatcaaattggttatgatctagtatccatatatgagaattgctacatatttaaatatgagttttcaagcccatgcatagcgtgggtgttttatatcatgtggtacttgacttgtctccttgtataacgtccttaaagactaaactaatgaattattcattatttatatatcacaaaggatctcaaggaaagatctgatctcaaggatgtatataataaaattgttctgcttcatcttttttttttctcataagtgacctttattaatattcaaggtttacaatcccaaaaaggcccataaagcccatacgattacaattctaagaaaaagaaggatatactcaagcaaacacaatatccagcaaatagataacaaagacacgtgttgcatgagagctgcgtaactttccccatcatcctttgccgtcaacgtcttcgattccggtgacctccatcgacgtcagaatttttttttgtgatcgtcgattttcgttttttctcaccgaaaactgcaaaatcagcttagaagggatacaaataacagaatcttcaacctcatccgtttgccaaatcatcaacaatgaaatttggcgaaaatcgggtaatcaaaggatgaaaatctgattgatccacataaatttgctctaatcaaagctccaatttcttgtaataacagctacaggcaatccaaatttgcaaggatccaatcttcttttcaacttcttagtcgtaaccatcattgatttgttgttgtaaaccgtttattcaacaaaaacatgatc

SEQ ID NO: 38021 - DNA, 2421 bp, Arabidopsis thaliana landsberg
actctacgaggttagaaacaatattagattttgcttttgtttcttgtccttacaaggaaaccggtttttttaaaaaaataccatttggttcgcagtcgttgaagaaaacctgtaaaggagaatatacaaatgttcatccacgtaacacacaatgcttgaaattcgttgaagaatttaataaggtttacacactctagcgccttagtaaataaaaagattcatgttcactaaattcagagttcagacacttttttttttcttgtggttatttcattttagtgtacaaacagaatattgcaacaacgtttactagatccgttgtgcgaaactgaaactccagattgctatgtaagtaatctatatatcttgccctctcttatctgttaaaccctttgagaatatatctatcatacacggttgcttttgcagatttataggtttatgctaactacctactgggccaatgacgaaaccgtacgcaaagctcttcaaatcaataaggtaatagtatatcttaaggttcttggtaaaagcacagtgccattattataggaggatctacgattgcaggagagaagaggggaatggatacgatgttatcgcggtattccttacaatcatgacattaacagtagcgtaccttaccatatctataacagcatcgatggttatcgttctctcatctacaggtcagagtttataacccttttgctgatcttttgtccctatcaagattcaagattattgttaaactgtaaggtttttggtgttttggtggatagtggtgatcatgatatccaagtgccttaccttggaactcaagcttggataagatcgctcaactattccatcattgatgactggaggccatggatgatcaaagatcaaatcgctgggtatatataaaccgaatttgttcttccgttttgtgagattcactttgaaatgtattcttgattcttacttgaatggcagatacacaaggacttatgccaataaaatgacatttgctactatcagagtaaagtcttcttaattgtttcagcttaacatttttattttcattgcatttccatttgaaaaattgtattataattttgttttgattacagggaggtggacacacggcagagtatagaccaaacgagacctttatcatgttccaaaggtggatcagtggccaacccctgtaacaaagactcgtgagttttagtcttttacgtatgaaaaataaaagtacttaccatgaaatgtttgtaatagatgctaatggcttttgtcagctttatgtcctttgtctccttgtcataactttctcgatttgtacgtgatactaaataagttggaatgagaagtttctgttaatgaatctcacttttgcgaatgatatactgtaccatacttgaatcattctatttgactttactcgatccttatatactagtaagtttcatgggtgtcaaacaaaaaacgttaaaattaatggattagtccatgtttcaagtgtaatagctagagccatacttcgatatattgtaacgttgtttccttcttcaactctgatttcgatacaagaaaactttaaacagatgtatcacttcttgtaatacttcacgtctgttacttgaacacgataaacagctgtatctcagcagtttctaatactcggttctaacaccaacatagtctacacaaactccagtcacaacttgatatacatgtacattagtaataaactaataatcgattaatttaagttaagctctattaaaaaaaggatctgtggaaagcaaacatttagtagtttgggctttctaatttcaatagacgaaaaaagagtaccgaaaagcaaaatggtaatttgggcatggtccggcccattttatacagacatgaaattaaatagggaaataaaaactcgattatcagagccaggtttcgatcctgggacctgtgggttatgggcccaccacgcttcccgtgcgccactctgatctacttggcaagttgtgaatatgaaatctataattgtaattaaacatatatttaaggattgttaaaagatttctgtttctattttagaagattgattttagtattttacatactttcttatttttaagatacatgtatatttaaaaacatatgacatttgcctaaactatttttgatcttactcaaccggagaaagcaaaataaatcaagagattgctatgattttagagaggtttattaaaaaattttttttttttctttaattataagatcttggaaaaaaagccatcaaaatagagagaatagataagagatgtagatatatagtcaaataccaaacctgcattcctcaagaagtagcttatatgttactttaacgaaacatccatcaagctaaagattcaacctactggaacgttaattgca

SEQ ID NO: 38022 - DNA, 4601 bp, Arabidopsis thaliana landsberg
ataaataaggttcgttacattcgtaaacatctaacaactccataaagatttaagttagtagcaaacttatcgacacattctagagtgatttcatacactatgtatgactgataattcataggtttaaccaaagtttaaagaacaattttgaagaaaacaaaaataggaggaaaaaatgattatcagtcaaataagtttatattgagaaaagcaaaaaaaaaacaaaagacagaatgagaagagatgaccccagaaagcacttaaaaaagaagacacccaattttgctttttggaccttttacggcctttgcttctcattaggcgtgaagcgttacagtcgacaactctgtccccattctctttttttttttacctactttctttcccattttcacactcagaattcacaaattacccatcttctagttcaatattgggtaaataattcttttttttttttaacctcagataatacatttcacttactgtcctaatttcgtgggaatgttcaatttaattgagtttagaaatgcaccaaatttcattggcaattttttaactcgattttaacttttaactattttattttacctacattataacccaaaatgaaaaaaaaagcatacctgaaccaagatcaaatcaaaagtaaaaacaaaacccgaaaaacctacagttgggttctgttattttacctcctatagaaatttgcaatattcaatttgtaaattcgagatactatattattttaaaaaattttggtagtagattttctacaaaagacatggcatgattgttgttagattcgtatgctctagtatttcacttattttcaacaatatattccctagacatggaaatccacaaaatcatattcatctacgctaaatttcaatttaatctttatccatattatataaagaaaaataaaataaatcagattcagttcagtgttcctaagaatcgagcattttccgaacattctcacaaaatcacgaccaaaacaaacgtgctaaaaacaaacgaggcaacgacgaagccaaactaaaactaaccgtacgataagaaaaacagagtcaacaaaacaatcgtaaccgtaggatgaagtaaggtgcacagtaacgtacctgaaacgtatccgcttgagatcattaccaccgccgggaagagaaacgaaggttatgagaactccgggctcaacctgagcaacccattctttaggttctttctcctccacgaacacaatcgggtcgacccggtttctcccactcgccgatttcggagtcgcttcgccgctcgatattcccttaagtctcgcttacatctcctttccccaaaccctaggctgttgttgcgtcgccgccgccggccgcgtagctgtaatcgaactggttgatcttccgtaaagcattttaaaccgttgatccgattcgaaatccgactttaccgacgacgacgacggattgctcttgatcgggccttgtccttgtgcctgaccttgcgccgccgtgcacagcgtgcaatgccggtaagctcctgatgctttcagagccatgtctttgagctgatattgaattgacgaaaataccctcaatcagaagagagacttacgaaataaagagactgacgatgagagtgagttaaattcaatttacctgagatgttagagatttggcgtttttagaatctggatcgtctggttgaccggagattcatcgcctgctcgcttcgaacgagctatacacgtcagcattttccggtgactggcttggtctttgatttgagattttttttctttctctttttggatacggagagagagagacagagatggtgtcagtttcttctactttggtttgggttcggtgctctttttatgttttattctctctttttttttataatttctgcttaagaaactttaaaccgggattaccggtttccaataaaggttccgcgtctcactacggtaattacgcaatccggtggttaaaatttcgaaagtgaaaaaagtaaaaagttttggtcttgcataaggtaaggtaaatcatttttgtttgtttactgattagctaaacttgtacagaggttagactatatacatgatttttggcctgtggatttagactttcagaggtatcaaaggtcgttcttcacactcaagtagccaagtgtgctgcaagatttgaagttaatcgatatgtatgcaaaatttgactctgacttttgagaaacctaaaacgaaataatttattatgtgtggttctaagctagatcacaataataaaaagttgttcttagcattattcattaaatgggtactgtagtgtgttgttcataacgcttctgatggcaactcattgacatttaatttaaggatagcaatatgttccgtccgacaatatttatgtatgtgacgtcttcgtctacattacatttcaagtgaataatgatccaacgactcgaaaatattaatagtgtaagtatttttgttgttgttgttgttgttgtaaatttggtaatgtactaaactgaaaattaaaatgttttggcaaagggtggtggtccaagacttgtttagtttacaaacaactcttcagtatttttcttttttttcgaccagccactatggtcttgttatcgatttgagtgtcaatataacctttctgaaacattacactagggtcactaagataaattggtctcttctccacttttattatttcatatacaaatttgtatgtaccaagatcttatccacaaaatttcgtttttcccaaaactattataatattattaaagaggtcaaaatggtttgtgcttgtttacaatatattcaagtttttttttgctaagtttcttacaacatttcaaaatgcatgacaatgattttacttaactcatttaagcaaataacttcgcgatacaaacaaaaatcaagttactattatataaaaatcaagatagaaactgtagaataatctatataattgttgagtacaaactttacaacttagccgaactattgattagagttcatcgggaaatgtcatatttgagtattgttggtggactcgcaaatgaacaatttagaccaccaaatagagctacattttcttatggtgaagactcaaaatcggtttgggtttagcgcatagatgggctttagtttcggcccagtgaaactctgtctcaatccttctcacctgtaaacttaaaaaaagaaacgaagaagctctttttctcccctctgaagaagaaaagcaaaatccacgagagaaacagatagaaagttgcaaaagtgcgttcgatttttgcttcttcttctgtttcggattcggatttggatttggaatctgctcctttagcagaaccagaggaaatggtgacgtacgtgagcgcgttgttctacgcattcggagggatagtcgtcgccggagtggcgctgctcgtggctttccaggagaagcttgtgtacgtcccagtgcttccgggtttaagcaagtcttatccgatcactcccgctaggctcaatctcatatacgaagatatttggcttcaatcatccgatggtgtacgtctccacgcttggttcatcaagatgttccctgaatgtcgaggtccacactctctttgatcattgagtctcctttcgattcagtttttttttcctggtagatttgattttacattttcgaataagcttttgaatctactgaattttgagggattttaggtcttgatgtctctgtctttagctaggttttgaattccttttctcagatttgtgatccctaagtcattttagctttagtttggaacttatctgtcacctaaaatctagttgcttgcggttgctagctttagcctaatgcgaagtctttctaatagattatgtttggcatgcaggcccaaccattttatttttccaggagaacgctggaagtatcctttccagagccatttcttggcttttgtttgtctatatttgtatgctctaggaacctattttatgttccatgtctgtcagctgggatactttgtcttgttacgaccttgaccttagaatcccagacatcgctcatcgtctggagatggttcgcatcatgatacaaaaattgaagtgcaatgtattcatgctttcatatcgcgggttagtttcagtttgctggtttctggtctatctcttatataaattgtttgtttttgagtctaaacattggatctgtttatacaatgcttattgattttcccgtgcaaccagctatggggcaagtgaaggctatccttcacaacaaggtatcataaaagatgctcaggtttgcttgtctccctaaatttatccacatatctcttctgttgcgtctccatgtattcattattcattttcttgcctgatattttttgttaggctgcattggatcacctttctggaaggactgacattgatacatctagaatagttgtatttggaaggtcccttgggggagctgttggagctgtgcttaccaaaaacaatccagataaggtactattagtacatactgctattggtagcatttcatgagtagggagcatgtattttattcacagagcagaac

SEQ ID NO: 38023 - DNA, 2103 bp, Arabidopsis thaliana landsberg
ttcgttctgaaggacctacagctgaaatgcacagaaatggcagctgaggaacttataatcaatgatcaaagcctgtgtgtgagcaagctgagttccagaaaaagcatacttggtctttgcttgtgtcgaactcccgccaggaaagaataatgaagaatgaattcgaaatcacactctagtctgaaaggcatcttcaattgaaccatacaaagatgagactggccgccaagatacgagtggtggcctgagcaagtagcaaattctgttcttgaaccttctgaaactcaatgctaagattcttcagatcacttttgatgccactgcgtcacaaaacaacaataagtattagcaacaaataaacgtacacaaaactcataagttttcatattttagaacaaagattactctctctccatgacgactttcatcagctttgtgttttcctgcaaaaacatgttgataaagagcctgaataagcacagtcaaagacaaggaaaaaaaatccatttctctatatcgaacagaagaatttctcagtgccttttgaagattttcagcgttttctttagaagagattaatatagcttgttgctgatgcttcgctccctgattcattagattcttctgattctgcaaattagtaatatcccccaactttcgtctttgtgcactgttcatcggaggttccagaaccattttctctcctttagctttgttagtacgcacacctaccgatttcaaacaaatctaatcgtaattaatcatggaaaggctagcattctcgtgtaattagagcaaaaactgaagaaacccataaaatcgatgaaaaacaacattgcgcccataaattccaagcaaatgaaattgaaacaatcgaatgcgaagagaaacactaacaattagcgaagatccacaaaggtattattaggtttctgagactcaatttagcatctaaatcggaacaaaaccatctgaaaatcccgagatgtgagctctctatttcaaattaaaacacagaactaggaagacgaacagattgcgaagagagatttcgtaagcaagactagattcgaaccttcactggcgtgatcaccgacattcagaaccgtcgctcgaaccatcgtgaacccctctaacaggatcgaaatttgaatcccggaggaaaaaatgagagtgagagtgactaatgactatacatacgagtttggtcttcatttggttcggttgaaacgttgccggttcgcttgctctgtattactaaaatgaggataaaccgttaaagattcacaatgtggttcggtttacaaattgatctcttgtttccctcttcccttgttcgcgcttaaattcttaaaccaaactgagaaaacgaaaaaggaaacaacaaaaccttcataatcaagaatcaatgtctctgattcgattcaaatccttttgcaaagagcgtccatggattccataaagcgtttgttgcagccgtcgttcccacttgatgtagtagaagatatattttacaagattcccgccgaatctttgaaaccgattcaaatggacgtgcaagcaatgatactatttcgtcagcagcaagagattcatgtacaatcacttggataagtactctccggttccaaaagaagaggtagatatatgagggttagtccttctaccatgcaatgcaactatgttgaaatcaactgaggtactatccagagatgttattgacattaattaactaccagttttcttatttgtaatgatcttgagaagttttaggttttggtccagattcgcatatgtagtatttattaaaaccccaaaagcagagaaactaagcatcattatcgaaagacctcaacacttccaacgaacaaatgtaacatttcaattgtatgttcatcatgtgcatacttggaaaatagatgcaatgtttggtcatatattacgtccaaaaatattcatttcacaagaagttatgcaaggatcttagtaaaagcacccaaaaattagaataagaagaagaaaaagcaggagacttacgagtgaaagataacttagaacccaagaaaaagaaattaaattaccctaaatacttactattgagac

SEQ ID NO: 38024 - DNA, 1292 bp, Arabidopsis thaliana landsberg
ctaaaattgttgggtacttatccatcaacactccatgtttaagaccggtgtgaatttatatgctttgatggattcattgatgcaactatttttgttttggttggtttgaggacgcttttaaggtaataagcgataaaattatagattgatacaactccggtagaatgaaactgaactaaactagagaagaatatgaaattgtttctgaatcgattatgacctattttatttggttaattatattttgttttaaaggaatcgaaacaaagttgaatatgatattggtagctactgaatcattatgtgttgtttctatgtttgagtagtttctcaattgggtttggagttttctttgtttaaacagttaacactctactaacgggttaactttactttagtgatttcagttcaagaagaacgcttaatttggtctctgtttaattatttttccgcttaatttaagaaaaacaaattttgtctaagctatactcgtttctcacaaattcggtgtataacttttcatattgattcaatcctaaagtgttacatcgatgtaccattcgactgtgatattgtgctcatttaattttaatcacaacttaagaaacacattcaataatgtatgcaaagtaggtatggaatcgaaatcaacatttaagaaaatggagacataggtttggaccgtttggtatgagttagtgaatgttcaacaaacaatcaggttttaatatgatatcagtgcgtccacgtgtagaaagcatttcaattaacagtcagtctcctataacccttttggtgagcttgacactttctaaatctgtcttgagaatctgtgatggagttggatcatatcttcagctatgtggtcttctggctaagttatccattgttcgtgaaacagcgaaagcaccttaagttaggtaacttccactcatctctaatgatgaactggtggccggtctatgttaaaccaagttggttaaatctcgttgtttgagaattcggatagatgttggaacttccatgctgtattgctctgttttctagatttgaattgcttgtgaatgtttctgaatattaagcttaatcctaaccagtttggtataccaacacatttttttatataataccatgctatttgtttaaatcacataaatgaaaaaaacaatacacagattattttacacattacaaccagtctatatagtctacgcaagtacgagagatgaatcgtaatttttgtaggtaaaatgttgaacctatttgtgtaattcgataacactatatgagta

SEQ ID NO: 38025 - DNA, 1816 bp, Arabidopsis thaliana landsberg
catggaagagctgaatgtgtcaaccaccattggcatggaaggtattccactaagctctagggaagcagctattgcaaggatgccttccatgattgagaaacaagctacagcagctgtcgacgaatcagctgttattattttcgttgtcgatggccaggttctgtgcttatcttctatctccttaacttttctgtctttgcctttcttcctgttaggcttttcgattcctgccataaaaacaaagtccaacaacaaaaaataatttggttgatgtgttattttcttagacttatactatgaataggtgggagttggttatcgacgaaatattcaatagatttcatgtttagtgaaagatattaccaaatactcaagaaagctgtgacttatatctggaacatatcaagttggttttgtgaattcttttactgtaaagtacaatggagtgtttcctggttatcatgccatgtcattgatatatggtattgattttggtactcgatatgcaggcagggccatcaggtgctgatgtggaaattgcagactggttgcggaagtactactcacataagtatatcattctcgcggtgaacaagtgtgaatcgccacgtaaaggactcatgcaggcttcggaatttggtctctagggtaaattgactttcatcttacttcagaatcatgtttgcgcacaaagtaggcatgttttggggaaatgtggtttaaggataataacgtgctgaaaataagagagcttctctttagaagatagcttttcatttagtgttttaactttctcacaaatatagaattcatggacgaacgtcatttggtgcttttatatgatttgaatatttgttactctcttattcaacacagtcttgtcctaatttatgaatctagttctgttattttgatgagtttatggacctggcgaaatttgtaagcatcagaatgactttttcccattatagtgtctattttgatgttcgcctttcttaaaaaatgcgagtgagtagtttatcctacaaatttatgagattttgctggaggttggtagctgtggtttagccggagagaaaatgttttacatgcaatgctaaacattttagttactttgcttctgtgcatttgttttgtgttttcattgatttcatggtggaatttccaggttcacacctatccctatctctgcattgtcgggaaactggacacaggagagctgcttgatcttgtttgttctggcctaattaaactcgaggtttgtaatggcctttctttctttcagaaacaaatttgtgcaggaatatgagatattggcaaatagtcctttatgaagagagttctgtatcgaagtattagtgtttctggaaaaaaaattcaaggtctgaatctacattatatacaccctcaaaatttcatctcttaattatcaaataccttaaggcatttttgaatatgttcaatgggcacccattgtttattcagctgcaataactggccatagcgttgacaagtgagcctccttcaaatgattcaaaaactattttcaaccttacagtccggttttacttagtctgtttgataatatataattcaaatgtagtattgtggttgctgctgctacggttcaaaaggagagatcaagaagacttagtacggctatattgaaccaagtgataagagaagcagttgcatttaaatcccctccaaggacccgtggaggcaagcgaggtcgcgtttactattgcacccaggtaataaaaacaactcccaatgttttctagtagcagtaaagggaaatgcattagaaggtttt

SEQ ID NO: 38026 - DNA, 1076 bp, Arabidopsis thaliana landsberg
gaaagtgaaagatttttggtacgtttctagaaagtaaataaatgaatccaagtttcaagcacattgtctttacactggtgtggcaggctagcagcctaccagataaccattttgattgttcataaagtgttaccttcatattttgcaaaacctcttatccaattgcgagtgcaaagtagagttggaacattccatttaacaatcataatggtcatctggtgggctgtagaattcatcattatgcacaccaaagtaaagattgtgtgctcgaaacttggattcaattactttttcgtcaaaacataccaaaactctctcacttttaaaagttcaagttaacggaagtaaggggatcgatctgttccaattgtactcaaacacactctctcatccaaaactcaccgctctttctatatatatatactgtttaaaaactgtgcatatcttcaacgatcgtgataatcttaagattatcaaacttgagaatttttttgctgagattgatgtgttcaacacagttacttaatttcactattctctcaaggtgttgatggtaaatgtcatgtggtacaatgcaagggcctgcttgaagactcataataataatcttaagctcttgcatgtggcttcctattatgttcatagcattgaagtatctacacctcttttggatattttctccactgactacatatttgatggggaatataactttgtcataaagtcttcaagacttttctttactaaaaactatggggctatagacccagagagagtaccaatcatgaactacaacatttcatataatgctcgggtacgtactagcaattgctttattcttattttttgttatataattacatacctatatatatatagaaaaccatatttatatattatttgatatgtttaagttgtttatatgaatcaaaaggagatggaaaatcttgggcataggttcttgatgagtacagatgctaactattttgggaggcttaaatatttggcggtggccgtggatataatgaatatatacgaacgaatttgagatgttcaggtaagttttagttgggtga

SEQ ID NO: 38027 - DNA, 2000 bp, Arabidopsis thaliana landsberg
agaggaagagcttgtgggctattacctagataggaagatcaattcaatgaagagtgctctagatgtcattgtagagattgatctctacaaaatggatccatgggatatacaaggtaattaatcaacgtggattttgtataatgattatcattgattaatcctttgcatggaatgacagtaaattgtctagttaggacatgagtttcgaaaaccaataatatgtgatgaatttggcatgcgaagtgattgagagagcctactttctttgacttgtatgttcataaacggagtgtgaaaagaatttcacaaagaaattaagagatgtatagtacaatcataaatcataatacttcttttgaaattaaaccggttgaatttattttattgaaaatggaaaagtataatcatatcacatatatcaattactttactacataattttcaatcttctctttagaaaaaaacgaaacataaaatttctaatgttttgacctttgtgctttagaaatttatgacattaatatttagttttacatttgcagctaggtgtaaactagggtatgaagagcaaaacgaatggtacttctttagtcataaggacaggaagtacccgaccgggactaggaccaaccgagccactgcggctgggttctggaaagccacgggtagagacaaggcggtactatcaaagaacagtgtcatcggaatgcggaagacacttgtctactacaagggtcgagctcctaatggaagaaagtccgattggatcatgcacgaataccgtcttcaaaactccgagcttgcccccgttcaggtatacacatttaaagactatgattgatacgcgattcactatcaaaccaatcatccaaaaattactaataaagtagtctaatacaatacttattccgtgaagcaaaaatgttactgtgcatgtttgacaatcgattcaataattatataagaaaaaagtaactagttatctaaatagctttatatgtttgtgaactataggaggaaggctgggtggtgtgtcgagcattcaggaagccaattccaaaccagaggccattagggtacgagccatggcagaaccagctctaccacgtcgaaagtagtaacaactactcatcttcagtgacaatgaacacgagtcatcatatcggtgcatcttcatcaagtcataaccttaatcaaatgctcatgagcaataaccactacaatcctaataatacatcctcctcgatgcatcaatatggcaacattgactcccgcagttggacagcccgagcttgtcgcctagtttagggacgaataaagatcagaacgagagtttcgagcaagaagaagagaagagctttaactgtgtggattggagaacactagataccttgcttgagacacaagtcatacatccacataaccctaatattcttatgttcgaaacgcagtcgtataatccggcgccaagcttcccttccatgcatcaaagctataatgaggtcgaagctaatattcatcattctcttggatgcttccctgactcgtaattaaaaaaaaaacacacttctatatattgatttgtattctataatttaattgttccatctggaaaataacatttataattgtctatttgtaaaaaaagtttgtgtttattacgtagagatttgttgttgaatttcacaaaggtggatttgttttttaaaaaaattagtccctttgtttttctattcatttattctgttgtccaaatttgtaactcatccatacattctacccccattaattttttatttgagtggtggcctattagttaagagaacttgtaatttctgatcagactcctaactttcaaaatttcaaatcaaacctcaaatttgtaactcaaacccaaaatgcacgatttgaatcgaaatcatatgttcaccatgtatataattaattaatgtacgtattaatatgtactacaaatgtctatatatttacatgtgaagaag

SEQ ID NO: 38028 - DNA, 1968 bp, Arabidopsis thaliana landsberg
aaccatccgaaatatcaaaaaaataaaatgtaaaaagaaatctaaagtcattatttttagtctatgcgagtcacagagcaaagcggtccatattttagtctattatctaagcagcagtagaactgttagttatcgtaatcataattattggtgctttattatgctagaattattggtcctttattatcatcattattaatgtagggttatcatctaaatgtaattcaagattgtggagacctattgtgacgagggaccattgttagaaggtcttattgttgagagttgagactggaaacaactatttgttttgcaagaaaaggttacaactttaaaagtgtgtaacaaagaaaatggacactaaactcggtgattatatgacttcattcatcatctaagtcggcaacgaattgattaaatatggaaactaatagattgaagatacgcaacccctaatctgcccataaattattgtcatgtatatacttgaaggttatgtaaactcctgggctctatgtgctgtggattttaaagacttattaatccttaaataaatacatttttttggttgcattcttttaaaagacaactggtgaaggaaaacgacaaagttcaatcaaagctttaaaaaaaatgttttcttttgtaccatccattgctcaagtaaaaccactttccttttcacactagccaaaagaagagaagcccaaaaatttatcagattcatcatctcattgtaactctcccttgagagatttctcacattatccaccacttgcatcatcttcttcaacatttcagttttcactacgtctctttcaatctcttcatgcttcttcgactacatctactggttagtgcgtcttcactgtcttcctcttcatatttcacaacagcttcattctctgaaattcttatagtaatccactcattgagcttttaaatccttcaaactcaatatcttgggtcccatttttcagcttaaagtctctgtctttatggtcaatctttacagtaataccctccacaattcttcttcgaaagttcagttagctttttctggagattataaatcaaaattttttcgtcaacaacactattaattgctctggtcaatttgttgatacttacttggtgatttgatatatctgtgggtccaatataagaaattaagcttcttcaagtgccatacctggtagaaatttgttttgaggttcttattcataatatcttcttttaaagtttgggtttttatttttggaaacacaggttttggattttggaatcatgttgagatgaaaccagtgtctctttccttgtatcttgctgttgttgttggatctctaaatcagacatgaagatgcttcgagctctgcttttgtgtctctctttagtgttcttcttggcgtttcagattgttgtttcagagattcaattaggttctaagctcgttgttggtgaaaacaccttgtgggtatccaacaatggtgattttgctctaggtttttttaatccacctggtttgcttaatcggttcagcattggtatctggtttaactccaattcaatcccttatgatcaacggaaggtcgtttgggttgctggagcaggtgttgtcgtttctgataacagctcttactttgagcttactcgtaatggagaattggttttgtttgattctttgttgggtgttccggtttggaatagcaagacgaaccggttctctgtatcctctgctttgcttcgtgatgatggtaatcttgtgttgttgaaagatagagaagagattgtttggcaaagctttggtactccaactgatactttgcttccaaaccaaaagtttccagcttttgagatgttaagagctgctagtgagaattcgaggtctagttattatagtcttcacttggaggattcggggaggttagagctgagatgggagagtaacattactttttgcccaagcgg

SEQ ID NO: 38029 - DNA, 2262 bp, Arabidopsis thaliana landsberg
aaattcaagatcttcttctctgttcgcttcccctgcagcattaaagatgtaattaccacataataagttcttatggttaggtagttatagttgctaaaggtaagtacaaatggtgcttattagctcactttaagtttttctttgcacaaatagattcaaatgtataatcagcactaagaaaataggattagaaaagctttatagatatgtcctgttctcgtagtggttactctagtctgaaataacaaaatgtttagtatatcttaaatacaacagaccttcatattcaacttactcatcaatataatgtgtgttttgcatatctagatttctctaaatttctcatagaaccttatgtatatataaaacttttctactaccaaatttctgtggttgaagcctattgcaacagcaactccaaacaccatgattgatgcaagaacactcaagtagatatcataaccatttgttcgtatctgattatatctccagctctaacacatactaaatgttcaagagataacactaaccttggtcatagacaggtgactctggaacaacgccgctcttgatgaagttagtgagccgtggactaagctccaatccctcacagtcatcttcatccgatgataacacaatttctccaacagaattcgctacatcatcttcacctactctggtggagttccttttcacaaggctatgagtctctagtgtctcgctggcaccgtctggcgagaatctttcctttaacttgcatgagatattatcttgccgatgtttttccgaagtatctactggaactaagtcaatgtgagatgtattccggcaagaatgttgtttttctgttttaggcagaggcgtattgtctgactccagaacattagaaaagaataaaagaggacttggcattacgaagacgttccccagagtatcaacggatgcacattctgaactgaaaagataacggtgtgtgggtgaagattcttcgtaatccttctctgttgtctctaaggtgcttgtgggagattcaacttgttttgcctttctctgtgatgtgttgacttccaaatcacggacagagtgtagatctgcacattaatacaatagaatggatgtgtttcaacactacaacgaaaggcctgattttcatatatatgcaatgcaaagatacattattgaccagacaataagctatctgatcaaagtctataagcatctttcctataaattattggcaatttcatttgggttgatgagaagtgacatgaagctatataaaatacctaaaaagagcagatagtatatcctaaaataggctttttggtcattgttcaatagcttatagcctatagaccaaaaaactagctgatagcttataagcatacagacctcctacgagctggtttaggaatgaatatatatccatgcgactttaagaattgatacttcggcaagatcaatgagactatatttacctttcggatcattagtaaccctcagacctgtatcaagctcttctctttcacccaaaggagctcgaaactattaaagtaagtgattccacgtaagtgaaaaatgaattcacagaaagcaaggaaaaaccaaagtttaccaggattttgaaccacacctcagtgaagaagcttttactctgttctgaaaaagttggctcttgcaagtgctgcatagcgtcaattaacatgcctgtttgacgtgaatgcattactttgtgcaccttggatggcaatgtctggaagtgagggaacgcaattaaggacactctcaacttttcctcatcggggttgttgtaatacttagcgagcatatgcgtctctgcaggtgtaagctttttctggaaagctggagtctcagtggcatactcctcttgtagtttctttccacgtggaacgaattgcttgattgaaaactcaacatgctgaacttctggcttataaacatggggaatctataataacacatgacagagatatctgaagttaagagaagttgaaaactgaagcaacatggttaggaaaacaaattatcaaaaaagaaaagctcttaccatccttggactaggatgaaaattaaaactatttgttcctccattccgcatgtgttttttaatagcccgtgcacttgcttgctttcgcatatagctgttcttttctgatcctccacaaagcagaactagtaaaggctagccaaggaatggaaagtgtaacttcaaagacgtcgtatatagcgttccaatgaaaa

SEQ ID NO: 38030 - DNA, 1736 bp, Arabidopsis thaliana landsberg
tgtgaaccaccagtttactgtgttactcaagacagactgagactttagcttgaggacctcttttcacatatccaaattcttagtctcttccttaggctctcagtgagggagatgcgaacttccgagttgtagctgtgtcttcctcattgtttcctttgcttctgcttcggtctctctgtagtcttctttcttcctcgtggacatatttcccggaattgttgcaccgtttcctctattttctacacaaggttttaggtgcgcagtctcagggttgtttcttcttgaaaatgattccatgtactgcgtaactctcttctacttgtgccgctgcaaccgcctacttgttcccttgtttggacattgctaaataaacgcatacatacaattttggttaagagatatctaaaaatgtgttcctatcaacctttgtaataactcttctagattcttttcgaacccatgaatgcccatctcaacctcctcaagtttcttttgaagatcatcacaaaagcagcataatatcgtgaatccaaactctccaacatgttctcctaaggttttaagttcttcttaaaatctgtttcatcagcccgatggtagtcttgcttttgttcacttacctacaaaaatcacgcctaaatgccaaggttttttgcttgacacctttgcatatatctcatctaacaatctcattatcatagctttaaataaagaggtttccgtgaatacatactttaaaaatcctaaaatcatactcttaacatattgataaaggtaccataagtcatcacaagtaataacaaaagatcacaacaaatggcaaaatgtttaaaagatctgaagagatgttttcatgtccatgtccttcaatcctttttatgatctgaaaaaatgtattttgaaatatgaagtgcaaatctgttgagacaaaaacaaaccaagaaaccatatatacaatgctcaactgggctgagaatttaacttttaaaaccaagaaaccacaaacataccacactacccttttaaaaactatcctatatgttagatgcttattgcatagcctaattttgttttctcatggtgcagcagggttagtttcttgtgtacctctagatatatattctcttgctgcctagggttcccaagctgcccatttttttttttaaactgttccccaaacacccatccaataagaaaggtctactttgtagctcaaagctattagagttgtgctcgcgtcttggttttactgttttagttaccccatcgatggtctagaatgtgcgaggtgactctcatggaggtaaagaacaatggtgattttgtgaagcacccaacgtaatggtaattcctaaaaaggttagaagttttttcagcttgttgtattgctaaaatggggttgatgtactcaacgacccattttttggggttgagtacctcgacccattattcaaactaatgtaaatggtgaatgcagcagtgactttgttgccttttgcaagaactaaagaagacagaaacaggtgtgtgtttatcgtagaaagagcaaagtgaacgaaaggtgtacctttttgacttgttgtcactgatttctcccactcatccatctcatgctgcatcagaaaccaacataagaaatgaaccacgtcacgcgaagcattaggagttgcttgtaaattaatacattgccattactaacgtaattcagtagattctaactacgaatgaaggcaatg

SEQ ID NO: 38031 - DNA, 1565 bp, Arabidopsis thaliana landsberg
  unsure (1)..(1565): unsure at all n locations
gtcctcctcaagtattcattagtttctatggaaacgaatcgcgcgacaattcatcaaatatcttgtgtggggattgagagacgagagagtcaacgttttcgtagacagagcagaagcaaataggagagacatacgaaatatttccacaaagatcgaggagtcgaatatcgcggtcgtcatcttctccaagaggtatacagagtcagagatgtgcttgaacgagcttcaaaagatgtacgagcacgtacaacaaagcaaccttaaggggatacctgtcttctatgatgtgagcataagcggtgtaaagaacctcgaggatgaattcggtaatcatttcgaggaactgagggagaaatacgcaaacgatccactcaagatcttgaagtgggaggattcattgagttcaatagtagagcggaccggcttaacctccgaagaccacgggtaatatttttttgatgaaatttataagtagtgaaaacacaaactgttttgaattttctatgaattttttttagtcaattcttgttaattgttcttaggaagactacttatttgagctcatttaacggtttcttcctgacatatgtttgcagaacggggttaggtcttgtgagggcaatcgttacagcggttaagagcgagctaatggactctgaaagacaaaatattactaaaggacaagtgtatgttttggcttcagctgcggnttttatctgtagtctcattgtagctcgtttactatgcactgatgtgaaagtttacaaagctgttaagtctttactagggtttcgagttttggctggtgtcttgcaccacttttactgtctacggacccaaccaaacagatgataacctcttgattaatcaccaacttgtggtcaaatggtttttgatacgattggagaagcaagtaaagaaaagaaagaagcagaggcagtcaacggtgttgactgtgtgtgttgactgtgtgatgagctgggaaggaaagcaaagtctctgggcatgacagagaatttgcggttgcaggcttgagagtataaataacgagagatatccatttagagaatctatgcttattgttgattgctgttgaattgtgtgagtcttgcatgacagacttaagagaagagctagtgatgtgatagtctctcccgtatggtgtattgagagctgacctagtgatgtgctagtctctctcgtgtatggtgtgttagtgaatagtgagtactggtttggttaaggaataaaggtatcgatattgaaaacttaacaagatcaagggcaattcagagtgaaattgtcgtttagtttatccagtttgaagacaggggtgattgaagctacccaaacaaaacttgagagacgcttagaattgcttttaacatggatttaacttttaaactgtaaccaagtcatgggcctatatctttgagacagaaacctgaagagacctttttgtagtgagtgagaacaaagacatatgatataaatgcccaatgcaatgagtgggtccaaatattttgtaaaaacagactcttggcntgcgcaccaatttttccaag

SEQ ID NO: 38032 - DNA, 905 bp, Arabidopsis thaliana landsberg
tagatgaggagcaaagagcagagtaggattgttctcaattgggggacgagaaaccaaagacatgggtgacgggagaggtacatgactctttaattacggataattaaatctaattacgcgtcattatatttttataaacatctttctacagttggaatgatcaagctgatctggcacatatgtggacccacttttgaacattgggctgtcacggcccacctaataccgtcgtctacgaagaatccaacgacatagacggtgccacgtggtgaaaacttgagcggtcaagattgaaaccacgtcatcaaaatctaaagcgaaccacctgtttcggggcggcctggcgtcaagatcctaacgaagattatgttttctctgactagtcacgtgcaatggccttgttgcacacgtgcgacggtcaaaaacataattttaacttgttaaattttgctgaaatttactgactgtttatatttctccgacagaaaaaatcaactataaagagtggtatattaatggggtcaaagatgggttttaagacaacttacaaatatcctgatttacaactaaaaatatgaatcagaagacattctagaatgatatgttatattgttatgttacaatcagaagataatgttatattgttacacttaaaatttgacatgacaatctttaaatgataattctttgttgttaaccgaatattaatgataaaattatgtgaaagcaattagaaaagataagacaaagaagatggatgaccgataagtcaggtaccgtccgccgacctattacgtacgcatcaaagcagaagactcataagtcctatcttcccaaatccaaatcacacaaaagaacaaatatttttcaaaagattatgatttgatgatagaattatgtcttga

SEQ ID NO: 38033 - DNA, 2394 bp, Arabidopsis thaliana landsberg
  unsure (1)..(2394): unsure at all n locations
aaaaaaaaataaaacattaatccaatatatttagaagaaagtatatagcccgttattctttttttttgaaatataaggtttattcctatgttttttttattgaatcaatcgacattctatgtgaaatgaatgaagaagttgagaaagaatatttagttaaagaaagcagaaaatgtcatttacattggtgttatccattttaccgtcacctttagcaccataacttcgaacgtcgaatacttttggccgagtgattgggcgacttgttgtgacggcgatgaacaagagaagcaaaccaaaagccatgaacacaaaatcaatgcacggcgccatcttcttcttttggcactgcatgcttctatttatttctctgttttttctttttgtttgttttgttcaacctttctcttatttttggatttttgaaataacaaagaaatctgtactttcttgaaaagacaatacgatttggtctttttaaaagaaataagtacatcgtaaggaactatatatgctaagaaatctgcgaaaaaaatttgattcttgttataccaatttctgggctaaaaaaacaatttctttctaaaatcttcatacagcaagataacgattcatatattttatttgtctttggggtcttgatctggtgagattagttgtatcaaatattcttaaaatcatgcaacaaattacatcaatgcagtaaaaaactactatatatatcacctttatattgaccancaaataaataaatatatgtacactttctccccccacctactaactagtactacatgactcgttatcttgctgtatgaagattttagaaagaatttgcctttttttagaaaaccaaaaatccaggaaaaccaaaactcaactactaacgcctgtatacagtttctttttcgtttgcatataatataaccaccggtcatttgcaagaataatacttttctactaaaaaattaagaatatagcatactatatgtatcaattaagaaactaacatgaagggtataaaaaatgaccaacggtggtggtggtatgagttccggcgaaggtttccggcgacggagctccggcgagggttttccggcaagggagttccggtggtgggtttccggcgatggaattccggcaaaaattccggcgagagttttccggcaaagaagttcaggtggtgattttccgacgacgtagttccggcgagggagtgccggcggtgatttttccggtgagggagttccggcggtggtttccggcgagggagttccggcggtggtttccggcgagggagttccagcggtgatttttccggtgagggagttctggcggtggtttccggcgagggagttccggcggtggtttccggcgagggagttccggcggtggtttccggcgagggaattccggcggtaattttccggcgaggcggatccggcagtaattttccggcgagtgagttccagcggtggtggcagaggttccggtggtggtggtggtggtggttctggactggggtggtggtgtgaatagttatggtgttgaggatattattgtattattacactttatacacctaatatcattgtattttttttgcataggttagtttctcaatttataattttttgatgattataaatgcaaatttccctataaaacacacacttatatagttatatacatatcaaggaatctataatacaaaaatcgaaatatgcttatataccaatgctgaggaatcattttttgttactgagtaacgtagtattctaaatttctatagactccaaatttcttatttcgtatagtattctaaagatatcaaattttgttctgcatatgtaaattatgtatgcatcttaggctggtttcacgttatgtaatgtgattccaatattccatcaaataaggcgtgctttgacccattacactatataatactgattctttcgatcgatattaaataaaggtcacataataataacaaaagcccatttattatttggtccgtcaaggctgcttgaatgttaacggtcaaacctgtctcacccgtacaagaatctcgtcaaagaccaatacaataattgaaaagaccacaaaataattttcttatggtcaaggaacatacaaatgaacataaaaacatctaacaaactagtgtaaaaataaatttaaaaaactatcagatttgtctatcaataattaatgaaaaatattggtgaaacgttgcaaaaaataaaccccacatgtgtatagaaattcttgaataagtgaacagtctccagtttcagttgaccccgccgttacaaaaactctaaaatagattttattatatgcaacgtttgattagttgattctaatttctttaaaaatctggaaaatttg

SEQ ID NO: 38034 - DNA, 5195 bp, Arabidopsis thaliana landsberg
gatgggttgcagcaactggctgctaagcacaaggttgtgctctgtataaggcagaagtatattaggtatgggcgggttatggcagaggtgaaggattatgcttgtcacagagctggagagcctgtatcaattaagaagtctaggattttgaagagggagccttatcagtcaaagagatgcggttgtggttttaggattagagctattgttcccattgctaactacagtgaaaagaccaaaacttttgtatatcaggaagaagggacagctgtttttaagctatacgctgtccattcagggcatgagccgggggctatggatggaaatgcgagaatcatgcatcgggttgttggtcataagggttttttgatggatcaagagactgtctacggagtgcgggacgaagacgtggaaaccgaagggatgggattgactgggaaggatgaacgtgccgagatgcagtttactgtcttgcatcaggtgcaggaactaaggagcgaacttggcactctagaaggaaagattgggaatttttcacaagagatgttgggttcagtgtccacagagttgtttgagatgctcaacaagatcagaaatatcggcgttgagagtgtccaggatacaacgggcttggttgcagagaaatcacactcagatgaaatacttgttggagataacgatctagtacattggagtgaccatcaccacgagcatttatatggagatgggaaggatgcagaacttattgaagacgatgaggacagttttgagaggagccttgatgatgttgttccttgggaacagataacgccaccgtcagattgtacaaatcaaaaggaggatcttttgtctgagacatgtaagcctgagaaatggttaaagtgcaatgactttgatgagaatagcattctgaatagcgaagattctaaattaacaaaaccgatgagccacgatggaggtagtatagaaacagatgtaggtttagctggtatacaagtcgatagcttctatcaagaaaactcgaaatggtatgactctccttgtggtttggattcaaacacggacggtgaagacactggattcagcagacatggggagattttgtagaaacatggtaaggttcttcgatataaccaatttctaactttctatctcacacattctcgttatgcatacccttccccaactcataaatgggaaccagattggatatttaatgtgttctattacaaggtttcagggattttttttgtttggctgtgtttctggtaggtgttgtttccttcttgtgttatgtaaattcaaactcagattgtttctatgcatatatctaagatcggaaagctttcaaggtgtctcactttttgattattgccaagtgatcatctcttggtttttaagactccattagcaaatttgtccaaatatttctaatttttaatcaagactcaataaactttatgaatttttgaattgtaaatatacaaatacgtatgatcttggaaataaaagttctccagaccgggaacaggctacgaatttcccggcgatcaacagctcagaaacgtagtgatgtgaaatgtcgcaattggtgtttgaatttccttcaattacaaaaagttgctgtggaagtccagtgtcaactgaagggtatttcggtcatataatagtgaattttcatttcgatggcagaaaaatcaaactgcgacgacgcgatctgaagtatcgtctcatctacctctttgctctgtaccctgcaatttccttttgcagcggcttgagtcagactcgttgacccaactcggatcggactcagagctccgaggcaattcacgggaagagactgtttcgttcccgttggtctatttgttctagatctgtgagtcgctgagctcgccgtgaaaattgggaatggcttcctcggaagctgattcccgattgagtcgagtcgtaacaccagctttagagaagatcgtcaagaacgcgtcgtggcgtaaacactcgaagctagctaacgaatgcaaagctgttatcgagcggctaaattcgctgcagaaatcaccacctccttcgtcctctgctgctactgactccgagtctgaatcctctgttcccggtccacttaacgacggtggttcgatcgagtactcgctcgccgattcggaactcatcttcagccctctgatcaatgcctgtggcactggcctcgccaagatcatcgaacctgctattgactgcattcagaaacttatcgcgcatggttacattcgtggtgaatcggacccgtccggtggagcggagtcccttctcctttttaaattgatcgattccgtttgtaaatgccatgatttgggagatgaatccattgaattacctgtgctacagactctggttatctgccattaactccatctcgctgaggatccatggcaaatgcttgctcctagttgttcgtacttgctacgacatttacttgggaacaaaaacgtggtgaatcagacgactgccaaggcttcgctgatccagattctggtgattgttttccggagaatggaggcggattcgtcaacggttccaattcagccgattgtagtggctgagctcatggagccactcgaaaaatcagatgcggatgggacaatgacgcagtttgttcagggtttcatcaccaaaatcatgcaagatattgacggagtgttgaacccgacaatgtcaggatcaggatcaggatcagggtcaggaggccaagatggggcatatgggactaccacagtggagactacgaatcctacggatttgttggactccactgataaggacatgttggacgctaagtactgggagatcagtatgtacaagtcagctctagagggaaggaagggggagctaactgatggagacgctgagagagatgatgatttagaagttcagatagagaataagctgcggagagatgcctgcctggttttcagggcgctttgtaagctctccatgaaggcgccgccaaaggagtcttcggcagatccgcagtcgatgagagggaagattctggctcttgagctgttaaagatcttgttggaaaatgctggagctgtctttagaacaagcgagaagtatgttaaatacctctttagctcctttttcttttttgaatataagggtggatccaccgtatcaagaaaaattagattttgtattcttctgatgaatttccatctctgctgaacaggttttcagctgatatcaaacagtttttgtgtttgtcgttgttgaagaacagtgcttctactcttatgattatcttccagctttcttgctctattttcatcagtctggttgcaagattccgggctggattaaaggccgaaattggagtgttttttcctatgattgttcttagagtcgtggagaatgtagctcaacctaattttcaacaaaagatgattgttcttcggtttcttgacaaactttgtttggattcacaaatcctagttgatatattcttgaactacgattgcgatgtcaattcatcaaatatctttgagaggtatgttatgtcccttgatgcttcgctgtttaaagtttaagtttcgttcaggtggaagttctttgcgtaatttatgtttcctctgtatgatcatgtttaggatggtcaatggtctccttaaaacggctcaaggggttcctcctggtacagctacaacattgatgccaccacaggaggcagctatgaaacttgaagccatgaaatgcttagtggccatattgaaatcaatgggagattggttgaacaagcagttgcgcctgccagtttctaattcattgaataaatctgacgtaattgagattgatttgggacccggaagtccccagttggcaaatggaaatgctgatgagtctgctgacggatcagatacttattctgaatcttcaggaggtacatctgatgctctagctatcgagcagcgccgggcttacaaactcgagcttcaggtaagaacttaaagatgtttgtgtattatgcagattattgtagaaagtgacattttataatttttctgtggtcgttaatgctattttaaatgtttgtcccaggaaggtatttctctttttaatcggaagccaactaaaggtattgagtttctcatcaatgcgggtaaggtgggtgaatctcctgaagaaatagcaggttttctcaaagacgcgtcagggttaaataaaactttgataggcgactatcttggagaaagagaagatttagctctcaaggtgatgcatgcatatgtggattcttttgatttccgaggcatggaatttgatgaggcaattagaacctttcttgaaggttttaggctgccaggagaagcacaaaagattgaccgaatcatggaaaagtttgctgaacgttactgcaagtgtaatcctaaggtgtttactagcgcagatacagcttatgttcttgcatattctgtgatcatgctcaatactgatgcccacaaccccatggtgaagaacaaggtttgcttcattcattgtctaggataatacagttattgtggaagttttaggtaaaatgttagtgacgttctttgtgccttttttttttctcttggaacatatagatgtctgctgatgactttatcagaaacaatcgtggaatagacgacggaaaagatttacctgcggactacatgagatcgctgtatgaaaggataacaaagcatgagataaagatgaaagaagatgatttacctttgcaacagaaacagtacgcaaactcaaacagaatgcttggtttggatggtatattaaacatagtgatccgtaagcagtggggagattcatatgcggaaacaagtgatgatctgatgaagcatatgcaagagcaatttaaggaaaaagctcgtaaatcagagtaagatcactctctcttacttgcatcatatgttgataacaaccatttctctgtagacttagtattcatttcaactcagaactactctcctgaactgtttcatctcttgggaaacttttagctgatgcagtatttgaattgactcgagttttcaggtcaacctactatgctgctacagatgtggttattctcagatttatgattgaggcttgttgggctcctatgcttgctgcaatcagtgcgccgatagaccagagtgatgatttgattgtgatcaaca

SEQ ID NO: 38035 - DNA, 2232 bp, Arabidopsis thaliana landsberg
  unsure (1)..(2232): unsure at all n locations
ggctgccacctgagttgtgactcaactggctagcggaatctgtttcactggcattgaatttgggaggaggttccagttctgattacacggctgaaaatgtatataagcaagctgaatcgaccaacccgtccgatgaaacagattcccttgatgaccctactgcttcaaaagttaatgtgactgatcattgcgagtcatagggcactcaatcaaatgccaagaatattttgagcggagaaacctctacatttttagaagatgaagataagccagtaccttctgaaggtgataggtgcagtttcagacgctttgacatatcccaagatcctgtggaccaccatttccttggcgtagatgggcaggtacgtcatggacttgtactatagatgactcctttagtggtgcaaaatactaatatatataataaacttacagaaaaccaaagaaagacagtggttcaagaaggttgatcaagactggaaaatacttcagaacaatcttccaggtaagaatgtcaagctgtacagttaaaacgttcagtagtatctcatgatggtaacttcttattggaaaattttgatttaactttggcagatggaatctttgttcgagcttacgaagatagaatggatcttttgagggcagtaatagtcggggcatttggaacaccataccaagatggtctcttcttttttgattttcaccttccatctgactaccctagtgtgccacctgtatgggtttctaatttttattattattatcgtgcccaaccaaatgttgaatccagctataatatgaaaataatgttctgtcatgttgcagtcggcatattatcattctggtggatggaggttaaaccccaatctgtacgaagaaggcaaagtctgtcttagccttctcaatacctggacaggccggggaaatgaagtctgggatcccaaatcatctagcatccttcaagttcttgtttcactccagggattggtgttgaattcaaagccttatttcaatgaagccgggtatgataagcaggtcggaactgcggaaggagaaaaaaactcactgggatacaacgagaatactttcttgctgaattgtaaaaccatgatgtatcttatgcggaaaccaccaaaggtaattgtgaagctctgttgctatttcttcttaatttcacaactttcatttcttaatttcgtgatgaaatctgtaggattttgaagaactcatcaaagaccatttcagaaaacgtggatattacattttgaaggcatgtgacgcctacatgaaaggatatctcataggttccctcaccaaagatgcctcggttatcgatgaacgcagcagcgctaattcaacttcagttgggtttaagcttatgctggctaagatagcaccaaagcttttctcagcactgagcgaggtaggagctgactgcaatgaattcaagcatctgcagcagcaataacacaatcctcaaaaggagctggatacaccgatcattgccaatgaaccaagtgaaggtttgcggcttctttactattacaagtttcaaattcagagatttctgaaatgtgtgtagtagagttttttttggagttatacaagaagtacgcgatactaagttgtaaccccatctgctcgaacaaaatcggcaaatgaatttgttttggttggtcatgttttggggcctacttaaaagttttaggggtgcacttcaacacttgtttcttttgtcatgggttgtcaaattacttctctaacaaagattacttaagtaaagttgtttcggtttggtttattcctggtattggatacaggaactgttttcgaactgacattccttttatccttatatcttgaaatgaaaagatcttcaaagtttattgatgcagaatgtttcttttgcttgtaaagcagacatctttatagttttggggaattggtccttattggttgtggtaatgattgatgtgttggtggtggtgatgatgatgagcgctctgattcatctggtgatcaaatgggtgatgatgaccannnnnnnnnnnnnnnnnnnnnnagtgttgataatcaacttcgttcttttcgttttgcatagagcctgtagccatttgatcatcttgccatcctctagatgtgttccgggttatttctagcaacgagttccttacttgttcagcttggaccatctcgttatcatttttctgtaacatgggaaaacagagacat

SEQ ID NO: 38036 - DNA, 10137 bp, Arabidopsis thaliana landsberg
aatttaatattgaaatcatatataatcaacaaaattttaataacttattttaatgttaaaaattttgatgagaacaagctctagttcattgtataatgcacctttttattaatttggcaagacacgagttaagactttacataaacaaacacacataaggaagtcagtcatttgttctttgatctttattctaaatttaacccaaatctttggctaccatcgtatctagaccattacatatctaatgttttgaactaaggttattttactcaactcgcatacaatttcattggaccaaaccaaacctacaaagactttcaattggattgtatttaccacaaaagtgtacttataagcattaggttgttccctccaaaccaatttgagtttatttttaacattgccgcattgtagctacatgtctacactgttggtgtatagtattcacataatttgcattcctttgctcgtttcttactagctatcaggggcggactcacgttagttatgggtagggcatgtgccctatactgaattcaataaatattatataagttaacattatgtagttaaaatgtaagtagtacagtgactttttacttaatagtgccccacatcaacccaagttcaagtcttactattatcattttattgtttttttttaactgtgtcccatatgaaattatttcttggatccgccactgctcgctattgcatatgcaaattttatttcctgcaaatcagatcaatagttaaacaaaagtaaagaatattatatttatatatatatatatatatatatatatattaccacaaaaattgagtactgaccaaatgattttcatggactttcaaacgatgggaaaatgtttgataaccctatggaacgttccctagaccatgatttgtcaatataaaaaaactttcttttggtatggtgtcaatataaaaactttactattaattgtgtggcagataataaaaatatcgaatttttatttttaaaaaaacttaatgcgaaaagtacttcgaatcgattgggtgaatgtacggcatgatttatatccaatcatcccaccacctccttgcccttttctggatatgtcaattatcatttcttcaaggcaaaaaaaaaaaaaaaaacacttttcttcaaggcatctctatgttttcaagttttaatttatatacagtatcaatgtttaattctgatatcatattttcaagattttaactttcagaaacgacaaagatattatcactctagtggattcccataagattagattgaatttacgattttgcaacacgaatacggattttgccatttccattctctttaaacaactagtcagataaagtggagcaaatatattccccataataaaaaaacaacatgtagtcgttaaaattcattaccatttactgcatctatctgtagcagtaaatactaataaaatactagtccataatcattcgtttactctatagtattaaactctctttttttatttcttgatttgcttcgatgatgacattaaacacgttcttggtatgcatttcaccttcgccatcgatctttcttctttcttcttcgtttccttagccatctcaacaatctttgatctgttcaaatatttaaggatttagtcagaatttttgtaaccatacttgtcgattagagctgactcggtgtactaacctttcctcgttgaacgagttggatcgtcttagcgatggttctgccgtgactcgttcctgactcaccgactcaacgatgcttccgctgaaatactctttctcctccgcctgaggattcccgaaccttggattctccgacatgaaccttatcatctcacgctcgtcatctacgacagtcttcttgacaatgttcttgcacaaaactccttttcgaaggttctcttctttttgtctcggattcatcacactcggtgcgtagtacttggtggcgatgtgaccgcaagagatcatctgcagccacatcgacccacgacccgatccgggttccaccggatctccgtcctcgacccgcgtcgaaactccgtgtcgacgtggcttcaccaccgggttggaacgagtcaaatcggacgagtcagaacgtacttgcaaatcttgctctgtcttggtcaagttcggtttttgttcggtggattccattgtctccgtcgatacgcctcgagaacagcgagattgaggcgtcgtggaagatgtgtaactcgttttctcttcgtaaagctcgtattctccatcttcttcctcttcctcttctccgacgtagagctctgcgtcgtcaaacgacgccgttcggttttgaggcttgagttttgacctgagaagtcgactttttggagcttcttgaatagaaccagacaatggtctgttcacatgtacttcttgaaatttgtctacaaaaatgtttagcaaacaagaacataaaattttaaactcaaattctgcaaaatcacaaatttcaatttgtatgagtttccgatttttaacagcttaccggtgatttcagatcctttcaagacatattcagcacagtcagaagggtaaatcacatcattctctgctaagtcattccacacaaatccatttctatagctcctgatgaatatatcaaaatacaatgtttaacatttgcgcttttgattacagattttgcttcattttaaaagcgttgttaccttttacacgaccaagcatattgtgatgtcatgcacttccctctcagaatcgttagccggttcatcacatcttcattagaacaaacacactcttaagttgatgtatacgaaacaaaaatcgaaagtttagcataaattgagatcaaaacactaaacagagcaagacccatggactatatataaatagcgtatagtgatctccctctttctgttgttcggtcttttacctcttaaccggagaggctggttaaccggagaaatgacttcgatgaagtgaggatgttcaaggtggccatttcttgtgagatagtaaacaacttggactcttcggaaaatgggtttctttgtcttgacctcttcttcaagttcttcatcatgttgatgatgattcaaagaccttatgatcctctctggacttttgttgttctctctgcctcttctgcatcttatagcttccatcttttgtgtctataatgtccggacaagagatgagaattatttaacacagactgtggtctttatatatagaaagataagggaatgtatttatctctgtgtgtgtgtgtgtgaattggctctctctgtgagatagcagaattggcattagagatgagccaaaccagaactgacaacgacttggctttactttctttctacctgatggtacaatgggataagccggtccagtcttaatctatccagctctgattttaatttggatttaaatccggttcaaccttattcttagaacccggttcggtcatgatagatttagaccagattggtcctcatgcttgagaagatttagttgaggaattgatgtctgtcatgtcattaatgatattctttgattgtcgaatattaattaataaacatcatttaatttgtttcgtttgcctaaatatggataaaaaagatagaagctaaagttgtttcagagaagacgatgagtcaagatcattgtgcttcatatggaagtttgacttttaatgacctcttttcatgtattaaaaaaataatgtttttgatattccatttgtttgtatctaaccacattcttccaagtctttaagataaaagagctccagaatctaggtaaaaactaaagagaacacgtgagggttgtttactgcttttgtgtactgcctcaatacatccgttaaaatcagaccaatatgacacatcaatacaatagggtaaaaactttaatggacggttttctgaaacaatatttctctttcaaatgattctaactgttttaactcaataatatattgaaaatcaactgaaattaggtgattctgaacagccaaatttcattagtctttgttttgaggtacttaatgaaacagcgaatgtggatatgctcttttataacccacttgcatggacataaacgagcttctctgggcgtagagtggcccatctacttaacttcctcaccagccacccaacaaaacaatgctattttctaaatttgtgtgtcagcttttcatgacctctgaataatcttttaataattatgagttcatagaagaaaaaccattttaaaaaaagggggaaacgtacaaatgaacattaaatattgaaaggtgacaaaaaaatagaacattaacttttgaaaatgatttgatgaattttgattaatttcgaaaatattttgtatgatcaacattgatctataaagatgcaataataaatacaatgaatattgcatgataataccatcgttctttataatatacaaaaaacgtccatctacataaatgaaatacatatatgcatttggcttaaaatgatataatactgttatagtatctcctaaacttctccgactctccaacgcaatgattagatgtattcgacttttattagattgcactagtggctggaatgcattgatcttttactatttttaaatatgagttgaataataatagtaataaagtgccttgtattttagttgaatagtaaatttataagtttgtattcgtagttgcagctatatattgtaggcgtagggggtagttgcagctacatgttgtaacttgtaaccaacggttaccaaatacggtttctgcatttttaaccttccatattagaaatactagctgaatgatacgaatctgatacaagacaacaaaaaagtaggtgaaaattatatctaatgggcttagatgtttatctaaaagaaaggcccatataagaatccatttccaattaggaaaataattaattgggcctaaaaaagcccaactcaggcctaaacaacaaaaaggcccatataatcatcccattttcttcacccaccaaatccaccattgtttccgttggaagctctttgaaaactcctcccttcgaattctccgtctctttctctctgtatcgacatcgaatcggcaatggctgcttcaagctccgttttcacagtatccccgtcgcgaaatcttgcagctattcctcttcatcagtccctatctccaccgttgcttagatccagctccgtcgcgtttcgtcccaaacgaagatccagctcactcgtcttatgctcaactgatgaatcaaagagcaccgcagagaaagagatcccaatcgaactaagtaatttccctcttattgcactctgattttcaaatcaagtttcaacttttataaattgttaatctttaattgtgtcagggtatgaggcgtttccgacagtgatggacatcaataagatacaagagattttgcctcacaggtgataattttattaaagcattgttctttttacagctgaagtttgcattgttgtgatccagtttctcaaatctgaatcttgttgtgtagattcccatttctgttagttgatagagtgatagagtacacagctggtgtatctgcggtagctattaaaaacgttaccattaatgacaatttctttcctgggcatttccctgagagacctataatgcctggagttctcatggttgaggtaatttgcatttgccctattctctcttcttactccaaaagttcaatctgtttgcatatatttatagttaaaagagaagctttttgagcctagacatttactttttgctctgtttcttgattgcttagttgattagttggttttgaattgtgattttggggaatagagtgagggtgaaatttgtgttcaagttttgagggaagtacaggtgaaggcttttggtttaagtttcagttaagggtcggttaatagagatctccgaagctcgaaatttaagaaagggacttgatttaagattaagataagttgttctaaaggattcttggatcatagctttatgctgtgataaaactagtaatttctatcccaaatgtatgtggaatgaattgttaggaggctccttatgtgttgttgcagttaataagagctacatatagtttattcatagagttgctgagttttacacatcataacaacactactaagtggtatggtatatgttttggttctacaggcaatggctcaagtgggaggtatagtgatgctacaaccagaagttggcggatctagaagcaacttcttctttgctggaatcgacaaagtcagattcaggaagccagtgattgcaggtgatacgctggtgatgaggatgacacttgtgaagttgcagaagcggtttgggatagcgaaaatggaagggaaagcatatgtagggaactctgtggtatgtgaaggagagttcttgatggctatgggaaaagaagagtgatcacgcctttgtttctttcttcttcatacgggccttgtggctgctaattagttgtcacatcctaagttgagtctcatttctatcttcaatttatgatgtttgtttgcacattatgattatattaaaaaagcaacttcagttttaataactagatgacccaaatatatattatagtttgaaatgagatgaaagacaatcccaattcagcgcgagataccattacatatttggctggggaagataacgaaaccacatagatgacatttgtaaatgagagaaagacaaagaaaagaacacttacattttagaaatgtaattatttattaaacatagaaagcaacatagctaagaaagggggtcttgaattggtctctttgatcacttgtactcgagaatcatgttgttctcaggagcaagtccaacacaagctctgagtacgttctcaagcattgcacgctgtttcgacaaagcattcacaactggcgtgccaggaggaacctgcattcattgaatgaaagtgatgttaaaggaagtcgctaggattgaaaaacggcacaatgttttgcttcggttttgcttaccagtggtgcctttgagaggtaacttaggagagtagccaccggatggaaagaatgaaactttccctgcaagaaaccaacaaaatcaagctcacaactaaatcaatttggataaacattgaactatctaacgattttgcaaataatagtaaacctcgttttcactcatgaactggatccgagtagtgagctcagcaagaagaacaaggtccaaaataattggagcagccaagagagagtcttcacaagtgttgtgcatcacaatcgtgttcttccctcccatgaatatctctgatgtgtactcatccattgctctcttgctgtctcctacatatggcacatactgcaacaccatccaatagtataatttatgttaatgtgatttgttagattggataattataattaatagtaaaattaatcaccttaatgaccacaacgtggtcagggtgttcaccaggctcgtacaaaattccgttgctaccaaccatatcatcgacgacattgctcttcgatatctcctttgaccggaatgtttgcggtgccgacaagttcatcccatcgttgttcccaagatggttgtaactgacaatcgacgtcggctatacatatagataaatgcaattaatttcgttttgtaacgttaccatataaaataaatttaattaggatacttatttaggattaagtactttgattccggcgccaacaaggaaatcgacgaggacagacttcatcttggtctgaccactcttgaagtcatcaccaccgatcaagcagtttctctttatggctaattcaataagccctgtataatataagcaaaatgtgattactatagaaaattgaaggtcattaatactatctagatatagtttaatttagttaccagggacaaaaagtgttttgtggacttccattgataaaaggaacgttctcaagaacacaagcaatggcgtaaagagtagaaggagaaatctcagcctcatccttgtccaaagatgacattagattctccgtcgtgtcgttaagaccaaccaccacattgctgtatctttctgtgtttgccgtccacagtaccaccactttatccactttgtttttctctttgaactccctaattattttttaaattttcattatcaaattatcttgtaaaaattacgatcatgatacatctaatgaattttggaaattttatagcagagagaaaatttacatttaatttgctaataaacataaaccgttatgttaccttagaatattttattacaatagtaaagacgttgtgttacctgatgtccttgatgacttgttcgagttgttgtttcttggtgcctttgatcacgtggttagcacgtgacccttggttagctgcgatgaaatctgggtcgaagattccggggagtggaaccatgtgttccatgaacggacgcatctgcttttgaaggtcgatgtctaggaccttggctcgtgccattgcgtctgctaagttcatgtcacttatgtcccatcctccaaacacaatttcttccggattcacctatcattttcataacccattaatcatttattattttctctatttactgatgtttttcaaagtttaatttgccgaccaaaatatccactaattaaaaaaagtataaaaaagagatcttgttttctacttttgtaagtcacattcaacaatagttaaataagtataatgtaccatggggagaagacttttgaaaggagcatagatttcttcaccattaaatgacccgacccgaatagaagatgcttgggttaatgacccgaaataattagcttgttgcactttctcctttgtagcccaagatattcccctgccaccattttttgtttcattatataagaacatattcaacttgctcattattcaatatccaattgcgggaatatgaatatattataatcccacacaccataggacacacaactttattcccttttgaaacagtttattataacaaacaattaagaagaaaaaatattttacttactcacgattggcgataacaccagcggtaagtgtagaaccattgttgcctccccaaccaacgagcattactctgccaaaatttaatcagacaaagcaaaaactgcgttaatcaaataataaataaaaaatctattaaaaagtattttaactgaaaacggaaaaaaatattttatctaacattaaaatgattttagagaataagatgactgacccaagtttgggaacatgagtgtcggtcttaaactcatacttcacagtctttggcttcacagtccattgaaaagcaccgtttttgttctcatgaacaagctcagtggtttggtagtcgtacactgagtggatctcattctcggtgtacttcacgttcggagattcaaccttgaagctttcgatgaacatttttgcctaaggaagactttgagaattaattgatgcttgagagagaggaagagagagatatattctgtttgctcgagtgcttctgaatgcattgagatttgagagaccatggtcgtgttttatagacgggattggacactaaaatatttttatttggttaccaactttacagtattacagtatgggattatgacaaatgtaaaacgattatattacttaatgttaatatttttaattagattacttgaaatggaaactgttaaaatttaaagttagttgactagaaattaatggtaataaaaactctatgatatgattattattcacaatttatgggattatggaaagtgtaaaaagattcatttctataaaatgtgttcaaaagagaaactcttatctggttaattttatctttcttatagttttgacttttgtgttgttcaactgtaagggattgcaacatcatgacagaacacccatataattggcctatttgatattgaaattccaatatttccaatttcagttatttctgttacacgtctcgtccatttctatagaaaataaacaattcctaaagatgatattggtggaatacaatgttatgtttttcttgtagagaagaacttttcaaacttcatacatgtgacagtacgtcagtgtcagtggaacatcaaaaagtg

SEQ ID NO: 38037 - DNA, 1149 bp, Arabidopsis thaliana landsberg
cacccgttatgggtcaataataaaggcccattcacggtatatcttagcaagatagcgtgcgaagaacaaaagtcgttgccaaaaagatgtgtaagccccgattttgacacaatttgccgattcctcgatcatttcatctgctgaataacaacagtgactggctcttctgattagcaagcttcttcttttcgaaatcgcatcactttggctgatcggtggattctacgaaccatgttcaatttctggtaacatcaacttcatgaatctgatttttgtgattatgcgattttgttaccctcttttacctcagctcgattatgctgttatctaattttgattatgatcgttttggagaatttcaatttctatgtgtttgggattaaagaactctgctttttgttagttacttactgttttatgcataccattgatggctcttatagttagttgctgctaacatagttaaggtgaacaaaaattttagttgtaatcattaaaagaacctgatctatgctcatgaagttgtgctgggtcttaagattttgcaatgttagtatattgggtattggaacagtttcaggtaagtatttttaagattgttgtgttaaaaatccaggggatcaaaagaacagcaacaaggacaatctcgtccttctccagaagcttctgcaacaccgtggtattcgccgtctcttgtcacctctcctagctcatcccggcctcaaacctcagggcagattccatcacatgtttcaccaggtgaagccgccggcattattgccattttaaaagacaaaaggttagtcttcaatttccttataccttcttgtttgcctcttttgtacatgatgtataacagttttcttgtgtcacacagtcacacatttcttgtcatctttaatatgaatttatggtcttttaggcttggaatagtttagattaacgctagaccaaacactagatttactggttctgtggttttgatagtttggttgctgatagtctcttgtgattttgcgttgtgttactaatttgcagagatatataaagggaattgatttctgtacttgtcggtatgttatcttgtatgcttactcttattactcatttatgatgttcttcaaatgttttgctcttagtgtggatgag

SEQ ID NO: 38038 - DNA, 2665 bp, Arabidopsis thaliana landsberg
  unsure (1)..(2665): unsure at all n locations
ccgccattggccgcttcctatagtcagcgttcaacattgcctaccaaaacaccacacgcagagacattattggtcaaagtaccaaaactttccaaacatgaaatcagttgactctatcataagcgttctcagcatttctcctccatgcttctcgatattttcttttcattaccgtttccatttaactttgatcagagttcagttatttaacttttttttttactgtgaaccacgatgcagagaaaattggaatgactagatacctggagcaattcccaaccagctctatcaccaagatccagaaactttaccgcttcttcgaggcgttcatcagctaaacagtacctgtataaaaaattagtgaggtctttcaaacacacagtaacttggagtattaatcggttaattgaatacaacggttctttttgtgctgctaaaatgaaatgcaatttatatgcgttttaagttttaacacaagaaagttatgacaatagagaatgttagttaatctggaggtagcaagaggcttactctcttacagcctcgatatccagccggaaagtgttttccagtagccttgcagtacagattaaattgcggtaacaaaaaactgtttaaagaacagagctgctacatttgttggattaaaaggagatcttgtgttctttcttgcctgaagagaaagagaatccgttacgcctgcttcacagaatggaacaaatgctaagtatgcaaaaagaagaccggcttcatatctgtaaaccgcaagaatgtgttaaacctttatcaaagaacatttgcaacttaaaagatgaaagactaagaaggaaaaagcactacatgtcatctgcaatcccaaaagctcttttctcaaaaactgtgtaagcaccagcagcatttgcccttcgccaaagttgctctgacagtgaaccagaagtggctccttcttccaagcatgaaggcctgtaaggtatgctcagtctattaacagagagttgataaaaagcaccaacattatcttcacaatgctagttccagtttaaacagcaagaccaaaaggcaataaaaaaaaaaactactatagctgaggataaaataatcaatcaggaagagatgagaagagtaagggaaccttatgtcaacagaaaaggctagatctcgcagcctcggtattaaatagatggcttctcgttccgctggtgtactaaggataatttcaccagagagaaaaatcgactgaattagtagagtcatgaggcatttatattaagagtgaggtgtgtatgctatcactttcacgtgctcatgggggaacatacttgagaacaattgaggatggcccgaggctttgatgtaacctgtcattatcatgcataaaggctagacccttcattgcaccctgaaggatcttaataacaaagtttctccttcgttttatcatctgctctttttcataaggattccatactccttgggagcgagctctggttgttttttcactcgcagtttgcgcgtagtcagctgcactatctttcccaccatcacgaaaagccagccactgtaagaatgaattgactcagcctatgttccataaggtatgccaaaatatccacaaactagtgcagcttagattcaacaaactacagtgccacatattgtaagcctgacctgttccccaagttgtgtctcaaagccaccaacaagtagaagcagattagcaggcaggcttttgctctgtatagacaagcagaataacaagttgatttcactattagccaccaaggagatgtaattgctaagaatctatttagcatttttgcatggctatttatccaacctggagaaaagagtgtgcattaagctcgtttgctgccatcatgtcagcctcaactccaccagcacgctgtccggggtagacctttacagagacaagtatgtgagggaaagaatgaatgcaaagcaataaaatatccaaatgaagttttgatgattctaataatgtaaggaggactcgcacagctgaacaaaatatgcccagataatgtagagagactcatgaaaaatggaaactgccttcaggaaaagaacaatattggctgagaagaagaaacaagattgacaaaacatgcagaatcaccttaaagacgacaggcgttcctcgaaatggaccctgagatattcgtccttgatatagtctgcatacaaactgctgtggctaatacatttttaacttgaccaaatatattaccatctaataaattgtctacacaannnnnnnnnnnnnnnnnnnnttaacggcaccttctccaatatcttgagattttaatcgcccaatatcatcagacgtatattcaaagtcagatcctgactgcagccctgtataactaggagtatagaagtggtgaaaagctaagtaaacgaagtagaacacagcggcagataaaagagtaaaactagaccaacaaacgtagcataatctagctaaagatgcacaataatcataagaaaggtcaatgtatcccaattcaaatacactaacaaaagtgatttttttgttaaacccttcgaataattgtcaagctcacgtatacattgcaatgagtgcataaacctgttgcaactacagattcacacatacacaaacaatttcgatataaaattagag

SEQ ID NO: 38039 - DNA, 680 bp, Arabidopsis thaliana landsberg
tttttttagatcaaggtttagttttgcaaacaaaaccagaaggaggattgatcccacaagtgataagagcttgaagtgcaagaggaatgaacatttttaaattgagaagcttaagccttatgggtgtgcaaagacacacggatggttctagctcaagtcacccttgtaacactggtcaacacacattgtgcaccggatttccaagtcctatatggatcaatcctcccaaaacatcaacacaggctcccagcttcatatgcattgatcggacacgtaggttgttttccgccgccggctcctcctcctccaccggaaggtggaccatatggtggatagccggaagatggtggtgggactgtgaccggaagtgggttaatgattggggggagaagtcctggaggagttgtgactggagggagaagctccggaggagttgtgactggagggaggagtcccggaggaattgttatcggaggaaggagtaccggaggagtagtgatcgtaggtggtcgaaatgaagggattatgatgtgaggacttgggcttggccgattactgaatgggcgcgcagttcttacgattcgtggagagcttatacttgaccgtcggttgcaagatcaaagcccaggtcaactaccttcatgagagacttattaagctgctcgttaacacatacgagt

SEQ ID NO: 38040 - DNA, 3908 bp, Arabidopsis thaliana landsberg
aagcaggtggtaatgtacaggcaagattctacagagctaagattgccctttttcaggggtggttgggacgttctatcggttagttccatttttcatcctttcttttctgaaagagttaagcaacaaggatagtttgagatacttttttttatgtttaaccactcatccagttcagttctgtttttttttttccattcgtgattaggtaatgggtaaaaatttatccaaaagagtttgttgttgtttgtatatgtatgaagccaagaacaaggaccgtgaagctgatttattgtcggttaagtccgttgacaatagatccaaagaaattgaagttacctctggctcaagtgaagaaggatctgattcaaatgcttcattaagacaccaacaagatggtcaagctgagacttgggatgttcacaatgatcctagttcgaaaatgaatgttgttgattcgggtaataacgattctcaaccaggtttggatcagattaggaaaagaacaaccaagagatgcgatttagaaggtttcagattctccacttctaactattttacagattctctgtctactgatgaacccattgccccagacagagctggactggtaaaaaaatagaataagctaaaagaacagcttgttcaacctaaagaacagcagatcccgagttcgtcttcaggattccaaaaggctccattgcgggttttcagctccgggaggcgtattgcaggtccttcctactaccagtattattcagaacccgaacctccatgtctttataacaacaacagtgatgtttctctacatggtccgatgcataacccggctaatgttccagcatatggtgaccctcacgggttcccaatgcatgaaagaactctgcagccatctcatctgcacaactctagacagtatattggtaataatggtcatgatgcttttgatacacaccctcataatgggatgtttcatcaatcaacttgctcttgtacccattgctatgacccatatcatagagcttcaggctcagtgtttcctccctcagggttgcctgatgctctgcgtaatcccggtctttaccctcatgagagaagttttgggtttggtacttcattgcatagcccgagaacctttattcctcctggatctcaatctcctggaccacagctccgaggaagatgcacgagtggatttaaggatatgcgaatgaatgcagtttctcgtgttcacccctctaaacctgtatcatcttcaggtggttctcgcctaattcaacctgtggctggtggtgcaccatttataaactgtataaactgcttcaaacttctgaaattgccagagaaaatagattctgctacgagaaagaaacagagaatgcgctgcggagcatgctcttgtgtaatagattattcctttgttgataagaagctcattctctctacagatcctgcttcagcaagaaaaccagaaactcatagtaggctgcgttgggaaactactgctaacttctcttctgatgactatgataatgctgcttacgaattccatgcaatggatagaggatcagccgatgtatcaactgctctggttttgatctccaacacagctcaagaaatgcagattacggatgctacttctcctagcgtgtctgaagacgagttaagttcagacagttcaacagttaggaaagttaatcttgcttcacctcttcacaaacaatttgaatactcttcgatcaatgtaagggaccggtctgggccaaggagccaaagctctcgttcagaacaggacagggtcacactgagcaaaacagccatgagacagaactctatgaaagaagcttcagttgcaattgagatggacgttaatgactactctcacaacaatgaagtgtcacaagattctgcgaatgactgtacagatgatcagggaagaaccaagaagggtggatttgcgagtatcatgaagaatagcttcaaggatctgaagaaatccatacagaacgaaggcagaagtgatgtctcaataaatggtcatcctgtagctgaacgtctggtgaaaatggcagagaagcaggctggaccaatccgaccaggaaactactggtaccaggagatccttcaatctcataaattttcctcacctactagccctaatgattctcttctattctgttgcttgttaccaggtacgactacagagctggattctggggagtactgggaagtcactgccttggaatattaccggtaaacatcagctaacaaatcatatttgtcaatctcttttcgtttttttcagtatgtgtactaaaactggcgaaaggtgactccttcctttcttacagcctttcattgaagagctcaattacccaatgccagagaattgcgctggcggaaccacaagagtctttgtgaacggaagagagcttcaccagaaagacctgcgcttgctcactgccagaggtcttccacgggatagagatcgatcctacactgtttacatctcaggtagagtcatagacgaagataccggtgaagagctagatagtcttggtaaactcgccccaacgtaagctttcacatagcctataacacctctctttttcgccttacctttcaagttctcatgtatctgagtttggtctgtgatgctacatggttagggtcgataagctaaagcgtgggtttgggatgagagttccgaggagagctacatgaagaaatataaagagcctctccattgtgttgttgtattctctgaacatccgtgttagattatcctaacattactaggctaaacttttttctaactttacagagccttatgatcaatgtaaagaatgagaaagtggaaaatgaaatatcattattagtaacaagaatctaaaaacaccacaaagatctgtgtattcaaaagcttacaaaagcattattgagcttatacactgcaagaactaaattgtatcaaatcacatgatcaccacattttgtagcatctctccatttgtcttctcacttgtttgttgagacattcttcttctgctcccctttcgttacctgatcatcagacaccaaaagtcagactccaaatctaaatctttggatcaaagttaccaacaaaaaaagatgaaattggtttatgtattcaaacatataatctccagaagatcgagaaagaagcttagtcgcctgatacggatcaaattcataacctttatcaacacacaaataaaggcaatcctgatccatcaacgaagactatgaaagaacacaaattttcaattaaaggttgttcctttcgtgcctcaatgtttcaaaaggccaaattactaactcatcaagagtatttgtgatccgaataagatcaaaggaggagcgcaacacatgaaaaattgtgaagaaggagagaaaaagcagccaatgaagatatagatctaacgaccaaacaagagaaagagaaggagaatacgttttgcaagacgaatccgacggcgacggcagcaattaccgctccgccgaggataaccggtgggccggacagcaaactccactttcggtaaatcatcttttctccttcttcttcttcttcttcggaactttcgttttcgtcttctccgactatctgaaagattcttatgatgatgaaatcgacagagtctcttctcgaagctgggcttgatagtttttatctgggctcatggcccataatgacgatatgttcttttcttagacaaaaagttgtaaatgaaaaaattatattcttttgactggaattaatttttacactgcttgaaaatttgaaagatggaagagttttccactttttaatctgttcatcctaataaattgcatcacttttacaaagcgttttcataagtcaatcatactaatgtgacatttgaaat

SEQ ID NO: 38041 - DNA, 1840 bp, Arabidopsis thaliana landsberg
catttgttctacagtcgcaagaaattatcgttctttcatttgtcattatgcataatgatttctcttttctttttccttgccaaaagtgcataatgatctcactacataaaaaaatctatcttacgattcaactatatttagtcccatgcactcgctgcataagacattactttcttcgatttagagtgattttcacaaccttgtttctgtattgtatatttagttagtgtttgtgattaccaaaaaaaaaaattgtttcttcttggcttagtctttttatcttttttttttttttttgcttcatctatttttcctcccatgacagatgaagacggcaagagatgcagcaaatctcatttatgatctatctgaagaatcagcgtcatcgatttggagactcgaaccataacaaaaagagcatcacagtttcaatttaattgctcctggcgcttcctatttcagcaacaaacattaaataattaatccaatagagatgatatatatggaaatttcaaaaccaaaaaaagaaactttcaaaaccaaaattgcgaagccatagaaatcgtggatcatggaattgcgaagaccaatgttgacatatgggaatttggtgtcccaatgagcagagatcactaagattggttttcgggaggaactttttgagttcatgatttgaagaattgtctcgcctataagctatcgtctatagtttgagattcatgcgacaagaagaaggtttgattcactttctccatttaattgaatcatcttcatagatatattttcatacttaatcaatgtttttaccaaaaaaataatgttattttattattttggttttatgtggtttgggattggtgtagattataaaccgattaaaccaatgtttttgtgttctgagatttcaaacttttgaactaaaaaaatatacgttttggggaatatccaatatcaatatgtatcatagtttggactctatctattccagtatgataattcccgtggaaaaatatatcatcgtctctattttatacatgcacttgcaacacaaaccagccataaagtgggtctattcttataatttatgacaacatggaacactatcattgggccacgatgcaaggagcgaaggacgatgcgagaaggtgctttactgatttgatgaacgtggaggtgattctgaatgatacgagatctctaagctgaatatataatagtatagtttttcgtaatttttttttgttaaattttttatcgctgctaaagattaaatggcgagtaaaactatactattatactttcaaagatcacccgagaaaatgatgactgcacatactttcaatagcccatagatgacatatctgttttatttccatcaagctattcatcgaaacaaaagcacatgacgattatgggagagaaacactactctaaaatcccgtaataagctgcaccacctaattttttgtgccttgaccaaaaaaaattcaatgttgcagttcaacgaggcttcttacggaggatctttaaacaaaatttatttggtacatagagaaaaatattttaatatatactaatttaatgcctcgcgatcaacgagtagagaaaaaatatgtcgcgtgtatcttcttccattggtcaataaataccaatgcaatgtttactacacaaatcattacttcagtctcactctcaggtcagctctctccacatctctctcatatgattgtactatgtataagatttggtaatatttgtaattacaagtaaacttcctaaatacagataatattcgtaagaggttgaatcaaacgaaagcaaaagagatgcgcccaaaagg

SEQ ID NO: 38042 - DNA, 2028 bp, Arabidopsis thaliana landsberg
caaatttccagtaaaaaaagacaactaatctaatgaattttgttgctaaaaagttcgttggtccaagtaagcctaacactggactgacctttgcataacaaagatccctctttgtaggtccaatcgcagtggcgacatttccaaattccttcatatacaaacaacaaaacatgactacgacttcaccaaaagaaacgtttttattagaaaatctaccatcctacactaaaaattcagactcaggcttccaatttcaggattacaagactaaaatcacaaataatccaaaaccttctttaggcaattaggctaattactctacttgataaggaaacaaaaagacgatagactcagctccaacaagcttggaatttcttcaagtgatccataatcggagatttagtaactaaccttgttctccgtcgaagaagacgatgcaattcttcccgtcttcatgctcttggtgaaatacaatttcagtttctagctccgggacctccaaatttactaaatcggtatgttctccatcgccgttgctgtggaaatcgggggtctcttccgttccaccatcaccggaaaagctagaagacgacgacgagctggtgttggtgattgtactactgtccacactagtatcgtgtccctttccatgacggaatgttttcctctccaaatcaacaatttgttcgtcatcttcttcaacttctattggctggtgaagcttctcggtcccggtggtgggctccgtgagttcggcggcggatcccatcagaaagggaaaagatgacaaagtggaagacaggaatggccaaataagggtaaagccaacaaaaaaggagagattctgagatctatctatagagaaggggaatggggtcgtctttgtctccttcttcttcctcacttgaacattatcaaatacataaatgatgattctgcttttaattattgattattgatggtgatttgtttgttttgacttggccgttgagcactactcctagttctcatatactagtactagttttatgcaaaaacttttcacgtgtttaaagctttttgttagttagttattaagggaatctctatcagcagtgagatattttctcaaaaaaaaaagaatattaatattttaataaatattaattatataattaaattttaataataaaataatatttaaccaatagatgatatacaaatgtttttatggatttctcaaagtttctcacttgagagactaattctattctctctcatactttttgattatactttatttttatattgaacagtttctggatgagaaaccgatggagatggtctaacaatcctaagtgacagaccaacataacacctagactttgagagtctaacatgtagagccctaaactggaaaccaaaataaagaggatctacgagttcttcaaggaagaaatcacgtcaaagtgatattaaagtcatgagaatgcttgtgtcgtgaatcagaaggaaaagacggtgtccatgtactgatcgggagactagatgtcatgggacggatggttcgatgatcagctacattcgaagaagttggcattaatggagaagacatgaagttgtggttatgcggcttcggtgtctgttcttgctggtttgttccacctaagaaagttcctacaaccacttgaataggagtggctgcaaccagcaagccagcaacaccaccacctactacacgtccatcagggctagcaagcgacacgctcatcccgcctgttctgcttcgtgtcccgtctgagtcactaggcatgaatgttccagatagtgacaatatctcaaaccgaccctttaaaaagcataagcactcgtcatgatcaacaagaattacatgaaaaccaaaagcaagggataggcaactcggttttatattccggttcggttgtttacattgatggtttattaatacagtttggtaacagtgttttcatctatgcaaatagtgattaagatggaaaccgtcctcataggtcaatgtccaccagatga

SEQ ID NO: 38043 - DNA, 3923 bp, Arabidopsis thaliana landsberg
ttttaaactcacttaattcttgtctctataattttttttccagatacattgtagaatgttatagcatttttaatgaggtacatataaattgggagagataacaacttctaatgtaaatgttggacttttaatgaaaatgttgacttttcagcagaggattaaaagaatctgattctttgaatatgaaaataaaagagtttgagatattttactatttgagataccaattggaaatgacatgccggaaactagcggaaacaactaggttagcaatttctgcaagatcttaaaccatttttgttgatgatatcagtttttttttttcctggtttggttaaccaaaccatttaattggtatagtatggatgttgaaaagcgaattgatgtgaaattactaaccaggcccaaacacattagccaggcccaccagtctttaatgtgacgagcaaagatttattttgtaacaatttgtttgtttagagagatcaagcattaatttttctgttatcttttatacgaaatcgacccacgaggtaagtggatatatactataaaaaagttgaaactatttgttttctttataacgtccacataaaattttaaataaccaattggaattagctattttgctagttaacatttataaaattattaatttttttattttttttaatgaaatggctaatcttaattgtttaaaatcttatatggctaatcgacattagccatttcaggttgacgaacaaaaattattttttttacttaatttctcatcaaaatttgagtattttgtatgtctatgatattaatcacatgatgtaatatacttcatatatgtgatcgtacaatacatatatttcgtgtagctgggtatacaatattatagttggcatgtgtgaccatgtattctcctatacttcgtgtagataacaatcttttttcctttactaaattactatgcataatagtaagtttactaaatgaacaattgattatgcaataaatcatatgaaacacaatatatatatggtgcttactagcttatcaaacacatagtagatatggagcttactatcttattcaaacttatagtaagtttttgcacaactcacatatatatatttactagtttatcaaacttataataagtttttgcacaactatatatatatatatatagagcatactagcttatcaaactcataatatatttagagtttactagtttatcaaactcactagcttatcacacttactagcttatcaaacttattatgtggcttcacaacaaaattaagttcaaatcatatcttttatttaaatttgttttttcatggctttaaataacattgtaaatagctctcattatcccaagaaaaaacaaacttatctttctctcatgagtaatcaacaacttctagtcatcatcgcaaaggaaaattcaatattatacaaggcccaatcaaagccttcgtagcggcgaattaaagagatcgatactatttttttagagtatatatactaactaacctttgacaacaaaagaataaagagaataaccatagacaaaaagtatgagagagaaaataacctttacacctcatttatgacacttttaccctaactaaaccaaaccgtacattaattttttatttctccgaaaccatcatcaccttctccataaccatctccatcacaataaccaccacaagctctagtaaatcatttgactatagccgttcacggtgttggttttcatcaatttggtggttcaaccattgagctcttccatttatttggtctatataggatttacctatttccgatatcgtttctttttagaatttgagatttgctttcaccctcaaaagtttaagattttctttcaatgttatgttatcatttcatatatcatgttacttttatattaggcatgtattttgtctaaaaacagtgtatttatttgacatgatctgcactttttaaataattcatgtcctctattgtaatcacgtatcttattcctacccatccaaacaataagatatgtttcttttgaataatgcatgttcattttatattagacatgcattttctaaaaatacatggtattatataaaagatctacaccttttaaatatttcatgttctctactgtaatattattcatacctatccgaacaataagatgtatttcttctgaataatgcatgttccttttataattgtcatgtattgttttaataaaatattaattcatttagatactatgttgtctgtaaataattcatgttttttattcagatgttaatcaactctgatttattatcactggcattattgtagaaacaagaaaatagaaagatattttagtatttattctactttaaaaaatgttatttatctaaattttctgacaaaaaattattttttcaattttgtttaattctatggttattttttatcattaacctttttttttatatcagctgtaatggaaaaatatatcaaagtaatattgacactattttttttttgaaattaaaaataatattgacacttgacagttcgaaattcaatactttctaattataaatggaatattctgtacccgtccaataaaacaaggaatttttccgttccagaacaaatattcgaattttttttaccataaaattcctttgaaaaatgtaagtcaaatttaatttattttaaatataattaatttattgtggatattttattttcagcaaattgacaaagacaaaagacaatttacttaaacagttctatctattacactcagaaattgacgcgactgataaataattccaattccagtcaaacaaaaccttcacaactcaattattcttccgattttggtttctctcttccaatcatccttcaagctcatctttttcttctacccaataacgaaagtctcctcctttactaatgggttgcttcagcagtaaacaccggaaaactcaaaacgacggcggagaaaaatcaatcccgatcaatccagttcaaacccatgtagtccccgagcatcgtaaacctcaaaccccaacaccaaaacccatgactcaaccaatccatcagcagatttcaacaccgtcttcaaatccagtctcagttcgagatccagatacgattgtaggtaaaccattcgaagacatcaggaaattttacagcttggggaaagaattaggtcgaggtcaatttgggattacgtatatgtgtaaagagattggtactggtaacacttatgcttgcaaatcgattcttaagaagaagctaattagtaagcaagataaggatgatatgaagagagagattcagataatgcagcatttgagtggacaacctaatattgtggagtttaaaggagcttatgaggatgagaaagctgtgaatttggtgatggagctttgtgctggtggtgaattgtttgatagaatcattgctaagggacattacactgagagagctgctgcttctgtttgtagacagattgtgaatgttgtcaagatttgtcatttcatgggtgtgttgcacagagacttgaagcctgagaatttcttgctctctagcaaagatgagaaggctttgatcaaggctactgatttcggattgtctgtctttattgaagagggtaaaataatcagacttttctttagggtttagtacattttgatgaagttggttgtctctaggacatagataggatacgtatcaaggttctggttatattggtatcttgtgtctcttggttccgtgaattgcatgaagaagttcagacctttcttgatatacggactaggctagagaccgctgtttttgttctctgatagagtttgatgtttcttactcttcatcatttggtgtttcttcttcttgtctttcaggaaaagtatata

SEQ ID NO: 38044 - DNA, 1970 bp, Arabidopsis thaliana landsberg
tccactattttcaatcacttttgtctccacagaaagtattcgtgagacaggagatttcgataaagatctgaagctcgagaacaactcagttcgtgtttcctcgagtaaatgaggaacaaaacactgagagtattcatcaacggaactaaatctgtctggtattgtcattatctgttacaaaaatacaaaaataagtaagtactgaagataaagctactgaagaaatggttaaaaaaaaaagatcaaagaccttttccttggagagatcttcgttgaggatatctttgagtgaccaagaacatagtctagcgaaaagacttgtttgctcgtttttttccaagagctttcgtatctctttagtgtccatcaaagcaacggtagaaattacgaaaaggctttacttgtctttcaagacatgacaagtaacttttttaggggattggtgcagaagaatcaatggagacgaagaagagagatctggtgtgactctcactatcagtttcggtaaacttaaaaggtaaaagaaggtgaaaggtccaaagagactttggaaaatgatgtcaaataaaaacattttccaagaatatcttgttaattgaacttcttctatcttagtcaatttaatttgaattatgtagagatcatgaaccatgcatgagactttgcatgcttgaagtgaacgcattcgtgtaaggagttattcttgcctaagccatttcaaatcatgacttctctttgttggatggcgagatacaaacgctaggaggagattccaaagcgcatggggaagaagaaggtcgggatattaagaacatcgcatatatgaactcgcttcttgacatagatacctataagcatatttgaattgatagtttaagatgtgtattgaggacatggtagggttagatatttactcttgcactatatcatagtgtttgactctttttataaaaaaaaattaaaaagtgaacaatttgctattttccgtttaaatgttcttgataagggaagaagaaataatcaaaatggttcaaaacgacccaagccaaaacttaagcaaaatctttcacaacttaacgaaccaataaagcaaaaaacagagtttagaacattcatcaaagtgaaacgaataaaaattaaaaaacataaataccataaaacatcataaaaatccaaaacagagttttgataggaaacacagaaaaacataaaacaagctcatataaaaatctaccacacatttcttcttccatggccattcctaatcgaaagagatccaagactcgaagacacatcctcaagcaaagcttcattcatggcatttcttagattcatctcatcagtagcatcatagaaacatccacgtgtcctagactcacttacaagctttttccaaatcgaaccactcagcgacaaagttctctcgttcccaatcacccataaacagtgccttgcacgagtcagtgcaacgttggctctttgacggttagagaggaaccctatgtttccgttacagttgcttctaacggtggatatgataatgatgtcttcttctcctccttgaaacccatccaccgaccggacattcaaagtgaaaaggttatctgatacggaggtgtacttatctccgattctctcttggattgcactaacttgagctttataaggtgaaataacaccaacactcatcttcgtctttgtctcacttgacactgtttaaaaaaataggcaaattaaaaagaaccataaagaaacagattacatatatatacaagatcaacaaatatttacctttgagaagattggttaagatctcagaaactactgcaatctcaaccatattcttaggactatgtccatcaccaaactcttctttcccaagtcctccattgatgaacgaaaaagagccaaacatgtttccttgaagaaacctcttttgataggtgctttctttaacagtctcaggatca

SEQ ID NO: 38045 - DNA, 1402 bp, Arabidopsis thaliana landsberg
tgtagcgggtgaatatttttgaaatatctaccttttagcacccgagctactaaagaatttagatattggtttaggcaattttaaaattttgaatatgtagagaatattgaactaaaatattgagtattaaacgttttcactttggaatatgattgattataatcgttctgtagtcttaaatttgtttctgtaattggatgttttcgatatggaagtgaataaatctcggtgaataaatgcagaattcttctaaatttgtttctgtaattggatgttttcgatatggaagtgaataaatctcggtgaataaatgcagaattcttctagatgggcgggagataaaaatgtgttgcttgacttggattacatagaatatttcaagcgagaaaatcttagcagtttaattaaatgaaaagaggactgacagaaattgaggttatgattgaatatttcagaaaatattatagtaagatattatgttgagatattctcatatattacgagttcaatatgatagataataagggaaagaattaatgacaactactgaatgctaataaccgaataaatcatgtacgaaccgaaacaaattagtagtcggttctatttagaataggttttattttctgtataatccgtgaaaccgaaactgaattaatcgatcggctcaaagtcgtatgctagttaggttctttgtttaggccgatggtaaccaaaaacacataccaacacatgccgacaaagacaaaatatatctagcctaatgacactgaattcaaacctcaaggtgccatgaataattaaagtgctaaaccatgagagagagtcttgttacaagttacaagtgggagccatgggaccgaggttcttatgtgggggacctacaagccgggcccagcttgaggtccggaggaggagccgaggaagtggtgtgactcttctctttgtgtaaatggtccctttctaaggccacgtgtccccgagccaaaggaaaacaccttctctccgtgtcttattcgtctacgtcgtattcgtatatatgtttttaataacctaacgtcgtcgaacatattatataactaagttatttttgttatattcactaccaattaatgtccacttcaacgttatatcaaccgtttttgtttcgtttggggaaattaattgtatagtgatgactactattattatgtacagttgtataatgataaatttgtagtaataccaaaaataaaaaaaaaagattaaaaccaaaagctttcatgattgtataggaacatggataggaacacgtactctaaattattcaaacttttgatactgtttcgtattaaaaaaagactatttttatttagtttttatgataaattattgatattcgaatacttaatctaaatataag

SEQ ID NO: 38046 - DNA, 11474 bp, Arabidopsis thaliana landsberg
tttcgtggccagtatagatttgaactttagcaccatacaagtatgatcgcctaattttcaaggcaaatactaccgcggccatttccaaatcatgcgtagggtaattcttctcatatttctgcaattgccttgatgcgtatgcgataacactccccttttgcattagtacacatcctagtcccactatggatgcgtccgtataaaccgtatagggctcaccttcctccggtaagaccaacaccggtgcattagtcaatatggcctttaactccaggaagcttttttcgtaatcctccgaccagttgaataaggtgtcttttccggtcagtcgagtcatgggttgagccatgctcacaaaactcattacgaaccttcggtaataccctgctagtccgagaaaactccaaatctcggtggcattccttggtcgtggccactcctttattgaccgtatcttctccggatcaaccgatactccttggtccgagataatatggccgagaaaaccaacgctcctttgccaaaacgagcatttacttaacttcgcaaatagctcatgttcccttagccgttccagcaccacccttagatgtttttggtgagtttcctaagatttcgtgtaaacaaggatgttgtcattgaagatgataacaaactcgtctaaaaatcctggaacaccccattcatcattttcatgaaggctgctagtgcattggtcaatccgaatggcatgaccacaaactcaaagtggtcgtaccttgtccggaaagccgttttcctcacgtccgttggtctatgcgaatttagtgatatcccgaggctaagtcgatttttgaaaaccactgtgcgcctccaagttgatccatcaactcatctatccggggtaagggatatctgtttttcactgtaactttattcaatcctcgatagtcgattcatagcctaaagctaccatccttctttttcacaaacaaaaccagtgcaccccatgcgtgagctacttggcctgatgaatccttgatccaacaactcctctaactgtttctttaactccgccattttcgccggtgccatccggtacggagctttagatatgggggttgtcccgggtttgagttctatcgtgaacgggtctgaccggtccggtggtacaccactaacggccgcaaacacgtccgagaactcgttgacgatcggaatgtctttcaactccgcactcgccccaacttccttggttgtgatcgtggctaaatatgcctcacatcctttcccgatcatcctttcagcctggattgccgagattaccaagcttcacgaggttcttcttattccttgaaattttaacataccttcgtccctcttgaattgtatccgtcctcggtgacaatctatgtgagccttgtacttccccaaccagtccatctctaagataacatcgtgtttctttagtggaacaatgattaggttcactacaaccgagatgccccgaacaagttcggtaggatacattgcctttctgccggccgctcgtaccattccataatccgtgtttggttctttcctgaacccacctgattgaaccaattccggactaacaaaacaatgtgtagccccataatcaaatagagtgtgcgtttctatgtcacctactctcaaggtccctacacattcccttagaatgctgagtagttcccctttcccatatgcatgatgcaatgcaaatgcagttattgaaataatgaatagggagttgtgagaacgtaccagtgatcgccctaaagttttcggcatcgttagcttcctcggacaactcataaactcgcggtgccacggcttgccgctttgggggaggcggcagtccgtttcccccgcgattgtccctttgtccggcctgcttctccgtagtcaacttagggctctctcgctttagatgtccagtctttccgcaatagaaacaagtccttgtctcttcaccgagaaccttggactgtcctggttccattctcgggcaactttggatcgcatggtccttgcttccacaccggccacatgcacctatggccttccagcaagttccgctgtggctcttaccacaggtcatgcattcccggtctaagcatcggacttggtgttatccaccttgtcaaatttctttttcttatccgcgggtttggtggattgattgttccggatcggtactttctcccggttcaagtacctctcctcctcgatcccttcctcaatcattgctgccctttcaaccaattcggaaaccgagttgaatgtccgaaccaaacaatggttgcggatctctatccttagtccacggataaatcggcgcacttgagcttgttcctcctcaagttcacgtcccacataacgccttaggcggttaaattcctcatcatattcacgcaccgtgcagttcccttgaactaggtcgaggtacgcacattcaagcctatcccaagcctcccgtggaaagtacttcttgttaaactcgtctacgaaatccgcaaaggaccggacctcgtcccctctgcgtttctcgacggttaaccaccagttatgggcgtctccttcaaggaagtggaccgcaatgtctctttggtaatcctcagggcagcgggtagacgtgaagttcctcttgagtctactcctccactcatcggccacaatcgggtccgtactgcccatgaagtgtctcgtgcccagccatgagacatgttcgagaagacttagatagtctcccctttttcgcccatgattcggttgcggattcacttccacaacttccgagtcatcgtccttttagttatccactctttggaccaccggatctgctacaatggccttggttaatgtggctagttgcgccatcattcctttcatcaaatcccactgttcttgggctgttggagtattgttccggttatccgtgctgtcccttgcaccgctactctccggtgcttcctcatttatggacttcttcccggcctcgggtccggccaagtctatcccatcgagcatcgtcccgactctcgttttctcgttgatcatcgtttcctcctcaaccaaaatctcctcgacaatgcccttgtccttcttactctttcccgttttgctactcttacccatctgcgaaacctccaaagttaatccacataactcctagtaaaatcgcaaaagagtaaagagcaactaccgcgagattctcaagccgacgagttgtgataccccttaacccaacacctagtcctagaaccaagcatgctctaataccaacttgaaaggccccgatccggactgcctaaagtccggacgagttctctcgacccaagccactaagtgactcggcccaaaccgtgtatgaggttctttcctagtttaatccgttccatatgattccgtgattcaatatatgacgcgaatagagtaaacaaacaatcaaatactttattgattaagcaaaggattcgatacaacctatgagtttgcatataagctattacaagtcatataatcgatccctacactatccgaactatcaccacccatcatcccggccttgagtctctcgcgcttaagccaagtccttcccacgatcaccattcgttcctgaaagtcatagagccataagtaatctcatttacttaatcatatgcaagtccatgcaatgctctatatgccatacactactcggatccgtggaggggaagatcgcgcatcagtccggcaaattcttggcaggtcagttaagacccgccggtcctccacgagccgcggtccccgcctcaaccgatccctacccggaccgagtcttgtgtaggatgcacatgacccggatactacccagccctctagtcggtcctttcaaggatccgactactaactcacatcctagaacccttagactcaaagtctaggatcccttaccttccttctcgaggttaggtcgatccgaccctccttctttattgccggccacagcccggctaccgaatcctaagactatttattctcccaagagggagagagttttaatggtgagtttcttgtgttttcggtgtgttgtcgtgtgtggaatggtcctgggcgcccttccttatataaggggcgaatggatgcttcccgaatcaacacatccgttccttgcacctttccgaagagttgcacctttccgaagagttgcgcccttccgaagagttgcacctttccgaagagttgtatctcttcgcccataaccgcccagttcgtccgtcactcgtccagctacctcgagctcgtccgtcactcgtccagctacctcgagctcatccgtcactcgtccagctgcccgagctggactgtcactcgacctgagtaactgtcactccttccagctgagcctgagctttgggcgagctgacccaagtgatttccttacgatcctagcttagcctgcatgatttcccctttgtccgagcttatagccagctctttctcacttgtccgagactccaccttcttctcccggaccaagtcctagccaacgatcctattgaggatcgcgggcgttacaaaacggttagtaaaccgtgggcggtcgtagtgttaaacgaccggaacggaaacatggatggttcgataagccgagggctcaatcgtccaccatgtagccggaggggcgtacgtttggagaacgaatggaccaataagccaagagcttgattcggccatcgtgaaccaagggaatcgtacgatccccaatctctatcgttgtacttagaccagtggggttggttggttgtatggctaagtaacgatagggattggttcatcaattcacgaccgatgacgagtcgttgaacgaatggagtaaggcgacaaacgggctaaggaatcaaatccgcatattgaccaaggtatgtaacgatctagcttattagttaagatagacgtttggtaattgaccgtgaaagtaggataaaggaatatgcgattgtttggcttagaatggttagcgaacatatgcatgtcttgaccgagtaaaggatcgatctaagtctaaggaacaaagacgatgaaaccggtacaagagttggttagaattaaaccaaggttagaaagacttccgctgtgtaataagagagcgattatagaatttagcctcgtaaaggcaattctatgttgaattggacgaaacaattaactatggtctcgtgccggggaggaggcgacgaaccttagaggtacctatgtcggcccggacagccagatactgtacgtggacggttgtcttacacgatctctcaaaaaatgattaagctttagtagaatgctaaaggtaagtcccaagctatgcatacagagataagatcccatctacccagagtacatcaaatgaagctctaatggtaatcccatctccaatcccaatataagaacttaactctaccctttgcattcatgaatcttttaagccctttttctaatcattcttttcttttctcttaactctaggagaagctttctcaacactttgatacatctagcggatttggatttctttaacaactaaggttcctgtttttaacattttaaaaccaagggcttttgcccatcttcaatagctaacaagaactctttcttttctttacaaatcccaaaacctttactagactttttctgcttctttagcttacttcacctagagtcttttaccttttctcatcaatgaatcaaccctttttttttttttaaaacacatcccaacccaaagtataagcgcccacctagtcctatctagtctgaaaaatgcgaactagaactacatgagacactatctctgtcgttacgaacctaacactttctaccaagcttaatcgcaataagacctcacaaacactcacaagtgatatagggcttgaaagaaggcttaggttagggtgtggggaaactgctctaaagatgagagtcagctatttggatcaacaagagtggtgaaatgaataagaagatccaaatattttaagggtaaccatgagtttaacaagaaatgcatagtatgataattacaagtcaaattatggttcaaattgatagggaatagcatcaaatcgcagcgagttccgactaaggaaggtcaagcatatgaattcaaaagatggtgcggttttgcttcaagttcaatcggttaagcactagccaactaacaccaagggcattgaaactatctagtgaacattgcaaatttacaaggctatgatcatcattatcccctatgcaagtgcaaaatgcacaatctatattataacattctaaaaacagccctattaatgcaaatgcaaactacatgacactctatttttttggaatcattttcgaaaattttcaaatttttacgggttttctatgtcttagatgatgcaaaaatttgaataagaaaacatgaaacaatgttagatacatcctgaactctcccccaaacttaaattacacagtcccttgtgtaataaaaattcaaatgagaattcaagagaaataacaagaaaatctaatatgcaatggtatttacataggttttggagttgatacctcaggttttaggtgattcttgacaactggtggaacagaggtggctatctcgagtgttgcactaagctcattgatgtcttactcgacgtttggtcgagttcgtgctctgactctttttaaaacctataaacctgacacacttaaacagaaacatcaaaaataacaaggaaattaagatgtatatacaaagatagacatgagacttcctcccaagtgagcttgttttaagtctctaagcttgactctcttactcattaggctcatggtggtttgttaaaaggaaacgttgtcccctttggtatgatcttttcaaccatataaagcctgaatctctgtccattcattttgagttcagcttttgctttgctgaccaagctggtggttccatcaggtggaatgtctttgatgctgaatggtacttggttggatttcccatgtagctccttgatttgaaccttcaactctctcacagtgtcaattagctctcttatggccttttcctgccagttacacttcttctgaagctctaaccaattatcagatggtagagtgttttgctctacatgcaggtcgagcttagaggtcgagtgtgagcattttgagtgagtagaggttgaactcgacctacatgtcgagttagatggtcgagcatgagttggacatgcctcttttgctgccataacctctgtttttgacccaatcacacctttaatgacatctctccatgctaccaccttgtgtgaggctaatgatttctttgagatcaagggctcactagaaagatacttagcttcagctcccttagttaaagaggtttggagttgatttttaacaacaagcccttccagcatttctagaacactctctttctgtatagtagtattgcactcttggctcaactcaaccatttcctgaacttcttgggatctttccatgattacttccttgggagtatcaaccaaaggtatcttctcttctagctctttgatacactttatgaacatcatcttgtgtttctggaagatccttgcattaacttgtgcaatcctttctggaaagtatggtttaggttcataggcaagtggaatagggattgggttgctcgggtcatatgctcgttcgacaagccgagcaaagaagtcgagttcaatctcctgtcttgattttggtctcaaaacctccccttcttgaatcccactgtcctcagtggcagaagtactcactgtggtgatagcatgggcatactcctttggattttgaacagattttccaggaagttgtccggggtgtttaggagctgaagtagaagcaatgtgtccctccatggtcttgactctagtgttaagtgcatctatctttatattcaggtcgttataagagcaatcaatcctggtggtgagttcagctagcttcttatccatggtcatggagcatgaggcctgtccttgcaaaagctgatgaagtagagtcttcatctctgagtcttgtgcagaagtttgctgtggctgctgggtgaagcctggaggtccaaagttctgcttttggttgtagccttggttatagggtataaagggcttagcttgaggcggttggttctgtggggggtagacttgatcttgtgggtttgccacattgttgcttctgtaagagagattagggtgagggggtttgtagttgttgaatcctttgttgtagccaccttgattctgtaggtagctcacctcctcaatagtaagattctccccttcttggagttgtgtaagctcttcttctgtaatgtagtggacatttctctgttgagcaagcaccaatttgtcaatcttatcattaagagctttgatctccttcttgtgcctatcctcagaatcgctactgcctctgttagtgcgatcgtagtcctcattgtaattcccatcagattgtgctagattttcaacaagttcccaaccttcagctacatctttgttgagaaagttaccattggaagctgtgtccaagagcatccggatttttggtaaggcacctcggtatagagtactgagtagggaggccttcttgaatccgtggtgcgggcactgagtggtatatcctttaaaacgctcccatgcctcagcgaatgattccgaattcttctgattgaatcccgagatctcatttctcaatctagccgttcttgagttagagaagaacttggcgaggaaagccttcttacagtcatcccaagtgtctacagaatcaacgggcaaagtcttttcccaaagatgagctttatcccctagtgagaaagggaataacctgagcttgaagctgtcctcactaactccattgatcttggtgagactacagagtctatcaaaattatcaagatgatccaatgggtcctccattggcaatccatgaaacttgttgccttgaatcatagagataaaaccactcttgatctcaaagttattgttctgaatagcaggggggacaataccagctctctgatggtggtttctaggtgcatctccagcaccaatgttgcctagcaactcattaacattcgcctcattagccatcactaatggatctaaagtggcttgttgttctctaagttcacgatgaatcctgtcgatgtcgtctctgtaccgcaggaggttatcagaaccttgagaacgagtttgcatacgttttgatcatactcggttgatgtactcaatgtgctagtcgagtatgtcaatacctacaagacaaaaacaagcaaatgaagaaagatgtgagtaaccagaaaaaaagaaatagaacttgatcttaataacttagaaatcctaaatgtaacaagaaaaacacccaaatggcaacggcgccaaattgatagtcgttatagtatagtggtaagtattcccgcctgtcatgcgggtgacccgggttcgatccccggcaacggcgccaaattgatagtagggttttgtgtgtcaattccctaaatgcatcttctgtcattgcaacatttaaggtgtcaatccaaatgggtgtaattgctatcaatcaggatatgatcagagaatactaagtcaagccaagtctagatgatttgagttatctaacaacctaagtgattatgcaagaaactaactatactaagcagaaattaaagaacatgagtgataaaagcaagaagtaaactacagaccaggaactctcaatgcataaacttaaataatgaactaagtagaggaatgtaaagatgctcggccgagtatgaacatgcaggtcgagtaaacaggtcgagtaacaaagtcgagcagaataacaaagtgaagcgagcagataaactaaactaaacgagtagaagagtaaataacacgaaactcaataaatctaagcgcaacagagctcttaagaatggggtaattggttctagtggactccccaatccatttagctaactaacaaactcaatcaagctatccctagacaatagattcagaaccgaatcaatccactttcgtgacaatgattctcataactctaccacttcctaatcgcaaatttcattgatgaaacatagcaaagcaggctttaaacaccaatctattaaagtcaataagcagtctaatcatccaattccttgggctagaatctacaaatctcagaaattagttggttcagacatttcatcaaacatcttttggatggagaaagtctgaaatcaattttcaattgatcagaaagaaaatagcattaagaactcctaaaacagaagggaatcatgcatataaacacttagctagctaaagaagagaggaatccacctaaacctaacccatcctcaagaactctgaagaacactactcaagaacactcaagaacatcatagaacaaaacccagaaaattcataaaactcagaaatcattataaacccagaaaattcataaaactcagaaatcaaagaaccctaaaaaccagcggacaaaacgaagatcctctgggcaaaaacataagaggtctatttataggccatcctaggttgccctaattgggaataagacaaaaaagataagtcggcgcaggagcgctcggccctaggccgagtagaaaagccgagtggcttggtcttggtcacacagctcggctctaggccgagtggcttggtcgagtagcttctcttcatccttaagtgcacaactcggcctccagccgagtgccttggtcgagtaggctccttgttcttcacgtgtgctccactcggcctccagccgagtacataggccgagtatacttcaaatccttccttaggtcccccgaactcgagtctgtccatcccttgtgctagaaacctccaagttgagtccaaaagtacctaattcatctgcaaaacactccaaatgcaagtatgctatgcaatgcaatgcaaaatgtgcaaaagaaggaaaagagactaagaatgcataaaaagagacttgaaactaagctaaatgcatgaaaaacaagggcttaaaaaggttaaaatctagtgttatcaaaaggcgtaagaactgtatccttgttagaagacacaaagcccaagacacatatggactttggctacaccatgaaagctttgagaaacaagaagaaggttggttagtgttttggagtcgaatatgacttgatgtcatgtgtatgattggttataacaacttaaaccgcaacctgatcttaaaagcctaagtagtgtttcgttgttagaagacacaaagccaaagactcatatggactttggctaaaccatgaaagctttgaaaagcaagaagaaggttggttagtgttttggagtcgaatatgacttgatgtcatgtgcacgattcagtataagaacttaaaccgcaactccatctttaaggcgtaagaattgtatccttgttaaaagaca

SEQ ID NO: 38047 - DNA, 5631 bp, Arabidopsis thaliana landsberg
  unsure (1)..(5631): unsure at all n locations
attagaagttcgtgaatgaattttcagcgcatgtaacctattaggcgtaaagagggacaaaaccaaagtgaataatctaataatatatgcgaaaacgcacgtctaatgaacactcatatgataccttcatggtgcgtagggcactagcgttgatgttatggaaaaaggaagtgtacttcaaatgcctggactccagcccacagctgtagcaattcaattgctcagaaacatccattccaaacagagaatgggcaatacatgagcgattggcacagtcccatgagcccgtactgttgctctcagcagattctgtgtcagacacgcttgaactttgagcaaatgagcgatgaaggcagtcgaagattacggccaatacttctgaagcatcgttcatctgagcctgtccaccatatgacgcccaagtttaggctcctttatgaaaacaaaaagcttaaactgtaaaaccagagattgattctttacctcttggaagaaactgctatcaggatacaagttacttaaagcaatcctgagagatgaaggagcaacaggttcttttcgtgtttcactcgaagcagtacttaaagctgtaaaaatcgcatacaatgagcagacaacacaaggatctccaaagtgatggtgctctagtgttgaactccgcaagaactcagcccgaaacatccccagattccacagagactaaaatcataccaaaatcaaaataaataaaaaaacggaaaacttttaagctggaaattatagacattgatacccaaaaaactaaacagtttatgagaagtgaagattacctgtatgataacatttaaaaagcaattgtattcgccaacttcattctgaagacctgtgccaaatatggcaactccgggcgaactctgagattcctttgtgacatcagataaaacccaatcattgttgtcttccagagatgtcctcaaacatgatgtcatatttctacgacctcggtacacatctgggttcaaacaaaatgtgctgatgtcagatgcttcatatcaagggcctttgtcaccccaatattatcacagaaaattctaaaagagaaggtagcagctgttggcataagcaaagcatgagaaaaaaaaaagatatatgtatatgtctacaagaaatagattaaagaatgtgtacagagatggagggaagtggtatatgtatacagtaaccatgctttatacaaatgcctgtcagacatgatatgtaaacaaggatggttgaaaacctaccaaggctttgaagttttgcccttttaaggtcagcttgaaatctttcttcttcatcgtcttcagcttgtaattgtcttaatgtctttggtcccgcatctacatcaccaggatacaatattgaatgctagatcaataatattagaaaaaaatagtgttgaaattaatgcaaatactgtcattcctcgttgacagaacgcaaaaatcaagatacacttgttgtagagatctaaactatttcattagttccaagttccgacagatagatccatatcatatcatctacaattcaaactatcaatgctttaaaaacaacgagacaaagagaaggatctaggacaataattggaaaaataaagtcttaccaccattgctacgtagagtttcagaatgtctctcgccgttggtgcctgacaactgagatttactattttcggtctcaggaggtgtgaccggatattttccatcagctaacttgtttgaagctttttggcgtctagttctcctcccagttcgttgatcagattggaaaataccagcttgcatagctgtgccgttaggcactactacaacaaaaaaaaaagaaaaaacaatataagtgcctcagaaaggtcagtagacacatattttcatattcgaaaccaatgctaacctttttgggattttacattctgcacctttgcagtatcagatatcgcagaatgatttgttgacgggaaaactccatttgtattcacactggctccttccaggtcatcaagtcgtccattccttttctcctggtaaagcaaagaaccccagaaattaatttcaagcgatgattgaaaaaacataactccaccaccttgtcactctattgttacctgatttatggatttttcttgtccttgtaaaactaaataatcaacttcattatctgtgcacccattatacactgtctttgcaacattcatgggaactgaagagctgtatttcttttgttgttctgccatgtgcttctccttagcttcatcctcaattcttctctgatactctagggttttttcaagttttctctcctcctcctctagctctatttggcgtttatattcctcttcctcttcttttaaagcttcaacagcttcagaaacaatgtcagcctctgaatgatcgccgacaggtgcaaccggaagggggctggaacaagaaattagcaggtaaatcaacgacatattataaaccaccaacattttcagaaacaaagattttccaggttacacccgcttaagtaaaaattatgaacaaggcagatcttcacctgtgttcaattgagtcaccattgaagcgatggtcgtttccaatagtagcctataacaaaacattagagctagttacaaatatagacaagaaatacctaaaaagtagacaacagattagttcgaaccttcaaattcttcactttcctagtgtctttaatctttttcttgtccttcgacttttccagcgtgttttttgaattatcatttcttcctcgagcctccttcttagaatcaagagctagctcaaaaagtaaggcttctcttgcagcatcagacttctcagtggcatctttctctgccaacgcctccaaatgtgcctggagagagagagagagggagagagangagagaagagagagagagagagagagggaaatggggagattaagatggaaatgccaattagaacctgaaagaacacagcaacacaatggaagaaaaagtaacaaggtcaaaagagttagatacttacccgcatgtaggacttcaccaaaggtaacaatactatctgataatcgttggaggaaactggtccaagctttagctctaattgctgcatcccagtgacatttcgcatcatttgtgcatcgattctgctaagctgtgatagcacatgtacagattattttaaaatcagaaaggcattaattgattattgcagtggtgttgcgtaaagatagaaaagcttacctctgcagacaactgctctttttgtttctgaatcgcaatctctatgaaactgtcagcctcatgtaaggaatcctttatcccccattcatcagcttcaccagattccagatcacgaagctgagaactagtgcagccatatgattcttcatatccaaattgattgtggttaagagtttcggcatctttcaaaacatttgttatagcatctaactcaaacctgctactgataaacaacaactcatggtcactctcatttagctcttctcttcgtttcctcagcacagtttcatagctttcatgggtaaattctgctgaagtctccctcttcccgccttcttcaacacaaagatcttcgacagtctgcagtgctccctcatagctcaagagctcgcattttctctcgcagaggttctgcaagtgatagaactccttctcaagatgctgcatgatctccagtccttgattagttttatcctcctttgtgcgcatccatgacacaacttgttcctcgctagagggtcctgtgaagatccatgaaagaaatccatccgcaccagaagacacatcatttccattagcaatatctccagaacttgctatagttacattattaaatgctgagcccatatatttttcttggatgcactcagtgccaagcaatttttcatccataagaagacatgaatcttcactatcaagaagaatctcctctgtgacttcacgacccaggtcaccaaaattaatctcatcgtgggggttactttgttcagaatatcgactcaatccacaggcctgagataagtcctgcaggaatttgaggattttgctgagatgggaagctcccaaaaagcagatgcataagggtgacttgttcaagccacgatttaagaattgcgaaaccgagggtagattctggagttcatccagcgtaaattgtatcaccttatcatgatggctggcagctaaatatttgtgtctgatcagttgctcaaaggctgcacggattttttcaaggagctttgcacgttcaggatcatcagatataggccatccatcaggaggaggaaacgcgatcgatagcttaacctcctcttcagattcattctcattccaaccgttgcaagtatctccatctggtgtagtatcattccatgcatccttgaagcaatcgtcaccaccatccatattatctccagagtgaaattcatcaaactcagaattttgtattttctgctgacttcgaagcaatttcagtgtagcagagagatccaatggtttccatggggacttaaaaagcatatcaatcctctcagtgtcgacaatttgtggcaaaaccatttgcatcttaggtaagacgttacccatgtgcgcctgcacaatatgatgcatatgagcctcagactctatgaagttttgactacaccggcagcaagcccagaacctccaagtcttattggcctcacaaaaggacagtgcctcgctaacaatctcatatgctagcccatcctttgaaccactaaagtgactcttaagatcactaaacttaactcttaggaattctttcttcatttctttgctcaaataatcccagtatgacctaacccgatcccttctatccgctgtggagccatttttccttgcattcccatgctttcttctctccccgcttcttggccccgcggctaatgctgaatctgatcccttgttgttaacagcttctacattctccgacggggaagactctgacttctgctgcaacaacctatgcgcagctaccctcacttcaatctccttcctcctctcttcattagtcttggtagattttttaatctcattaggcctcctggactgaatcaagttactctcaataggatcctcggccattctcctaagagggatcaacctaaatttctcttcaccatttcccaaggtctgcatccaagtggacaatgaataaatgttagacttctgtatcagtgacctgagctcatcctggaaatgagcaatacgagcctcaggtgtcaatatcttcagctgagtctcatcctgaagactctctctagcaggatcaatcggatattcgatggagagagcacggtggcactcttgcacaacctcctcgtactctctcttcccttcgttagcagcctcataaagcaagttggcataaaaatgcccaaactcaatcgagttaggagacagctccacagcttttctagcagattcgattgcatttcggagatacttctgtttcgtagcgagatcctcgtagacagcagcaaccttcacgcagatagttccctgaacacggtgaattagggcagagtcttggtggcgagagcacgaatcctttatcagacgaatcgccttgtatagctcccccg

SEQ ID NO: 38048 - DNA, 1255 bp, Arabidopsis thaliana landsberg
ttggcggtcgttgtcatccccagaggcagaatgggcagtgaagacatccttgaggtccccctcgggtgactgatacctgagttctcgttctcccgcggccacctcaccgtcgttggacctttccttaccaggccggcaacggggtggggagccgtccttggacgactgtttgcgtcgctcgcttgatggtctcatggcactccgaggcgctgtggcaagcattggggtgcacatggcacgagccgttgttgcctccctgtggccgggggcgcttgttgcgcttgctccggcccccagtcgcggttgcgacaatcagagcgatagaccacagcttctcatggccgcggttcttcttcttctttttgtcatcctgggcaacggctccggagccacccgtctgggtaactccagtgtgtggtgccgagtgccatgcaagggccctcagcagctctggcacatttgtcggccagagtgaagagcgtagtgacggtttccatgtcatgcgtcgccagtttcaccaatatcttcttatcacgtaccccctgtcggaaagcagtgataatggagacatcggagatgcaaggtatagtcccccgtaccttggtgaagcgggagatgaaagcccggagagtctccccgggttcctgcctcattgcatggagatgagcctccacgccatgctgttggtaagcgctggtgaagttcgctgtgaaccacgcacagagctcttcccaagagtagatcgatcctggggtgaggttcatgagccaagtctgggctggcccagacaaggctacatggaagtatgttgccatcacggtggtgtctccacctgctgccgtgatggcggtgacgtaaacctgcaaaaattccgacggatttgatgtaccgtcgtacttctccggcaggtgcggtcggaacttggatggccaagtcgtcgcgcggagacgacttgctagtgcggcgtaccacgccggccaatgggacacccgcttgggaccgggcgtccgttggaatctgcagtgcaaccgcagcaaagtcgtagtcgaggttgcgaccctcgatgttctatcggcactcacacgccctctccagagagacgcgggcatcctcacccacacgccttgcggttgagttctgcccgtaggtcatcaggcttctccagggaggctggagcgtcttctcccgcacccctgaggttgagtccgcccgcaggtcctcggtcggcgcatcccttactgaaggcgagcgcacc

SEQ ID NO: 38049 - DNA, 4724 bp, Arabidopsis thaliana landsberg
gatatgatacaagaatgggtgattgtctctatgtgacttgtgacttatgagagtagagtatagatacatcacttgtttgtcactttcgacgtggctactaaattttacattaccatcttatactactcggtagttactacttacggcagttagtttttataaagaaaaagttagaaataaaactatctttaagtgaagtaacatggactatgcaaatttggggggcatacaagagcatctccagttacgcatgtaacatatataggaatgagaatgtgttaaaccatgttaattttcattattgttgcttttttttttttttttttgcataaaagagcatctccaattttgttattgttgtttttttggttttctaattagcctcttgtgaactttggggttgtcccactttcactccactcatccccacttctgccgacccacttctgccgcctccatacttactcacggtcacgggtgcttacgcttatcttacttttcagttttattttaatacaactctctttttctttctccgattgtttttttaatacctctaatctactatttgtaataataacgaccagaacattacacctagtcagcactcatatacttttgttccaagcttcattgatttgaataaaaacatgttatactgaatagtaaatcaaaatacatatacatttatctttttatgttggacaaaacaatggttttatatacacgcacattacacaaaatgcagagtgtttttttcaatttattttcgatttcaggctgtaacaattcgattatttaggccaaacatgatatgacttctacatttcttttcctttctattgtgaccaaaataaatagtaaaagtatgtgaggtgatgtatttcttatttcttctcaaattatgtttatctacacgaacgtgaaaactcaggcagaaaatgtttgatgtgaaaaagcttcaaaaataaaatgatttatcaagagatggaacctctattgctttcttctcgtgaggtcgctgagagttttgcctataaaatctgaagtaagtcatggtactgagcgaaagccaagtgagactgaaacaaagaacatgttttaaagaggagacccgcacgtgatgaaatcgatatcgattgttatggaaacaagagtttgttacctctaatgtcacgctatatgctttccacaaccgtagatcataccggaaaatatcataaagaacctgtgttgtgacaaaataatgaaacaatctggttatatcactgtgaatgctttaaagtcgtgattacggtggaaatctaaaagatttttacctcagaccgttgtaaaagagtggcaagaacaactatccattctttgaatttgacggagcacatctgagccaatagaaactctgcatctaaccggttctgtagctcactcatttgcagctgagggatttcaatagttagacttcgatgtaagataagtttactcaaatatgcagacttttacgatgcgatagggatctatgttttagttatcaaattgtttcaagcagcagaatgagagggaaaaataacgagttttgaacatcaaagaaaccacaaggggggttgattctaaccttttgcccaatcagttcaagccctgcagcaaaattctgcagctgcgcacaaccatatctttctcgttgaagaaaatcctggaattttggtattgttagtgaatgactatataccttattggttccaagcatgaaaaggtgaatggtacaaattgtatacgtaccacaatatcaaactgggtgcctttgacgaatgcaacaagctttgaaagttctttaccagacatcaagtaactggcatgactttcaagtatgctctttacagaagcaacatgaggactttgctctttgaacgaggagctacatttagggtcacgttttacaaataaatattgatcagaagacagttgtatcactctagaaaatcaaaaactacaatcagagttgtagtttccacctcttatcgagtgatgatttcttgtggctggagccaaaaataagaaaaccgagaagcttaggcgataatgaatctgattctgttggcgcctgctcaatgtctcttccagatcttagtaagaacctcacctaacagcataattgtcatagaataacatcattagttaggatttaagctttgaattgcccattttaaacaaacaacaagaacatcaaatacatactagctctccagcaagatcatagagggactcgtcaagtgtcgcccgcaaatataaaaataaactttcttaagaacagaaagaacaaaattgacaagaaaggactcgaaagatataaattcaacatgctacagccgaaattacctgcaatagccgtaaagcacagtactgactgacagcaacaccttctagttttgcaatcacctgcaccatttctatacttagtgtacgatttgaaacataacctaatagatttcttcagtgttctataatagtaactccatgcgcttttttggtcccatgagcttataatcaaatgacacacggctctgctacttgcctagtaacaaacagaccactgcagatggattgatgcaacatctattcaactaaacatactcgagggttaagggcttctgagtcttacaaggatatagcaagctgcagttcgataccatcttcgctggaagcagtcctcaaacaatctagaacccaaaagagaatatcaagtttcgtagcacagaatacagtttactcaacaaaaagagcaggcaagattggtgaagtttgctatcttagcaacggctaactgctcacgtgtctagtacagtaaacaaaactagtttcatacacgttacaagaaacaaaagccaaacacagagatagagaaacatacgttgttgatatcccagcagcagaaaataaatcagcccagtgacgggcatcggtttttctggctacattcacaaccacatcatagtactcggggaaattttttattaaatcacaggcttttctcaaaagggataactttttaagatgtccaggtcctgaaatctggttcctgtttggatttggccttgaaatttggaagccacatgttcagtacaaaaaatcaattaggtgaagcaagacaagaaggttaagtataaattacaaagaacagagatacgttataaagattgataggaattggatacctagaaatctctgcatcaaaaacagtaaaaaagaagccactccagacaatgggagaagtggggtttctctgccgataattgtgctaagagtaacgcctcttcatttttatctctctgtccaaaataagagaccaacagaataagattctgagagatgaaaaaaattgcaaaggagaaatgaatacaggaagaaagaagggatcattctaacttaagaaaagagaagccaggaccaacaatacctgaaggaggtgacggagcaggcaatgtagtatagtctgagcctggggtgtaggctcaaaacacggaaactctgcgcttgccgaaaatgacattctctgagaaactccaacaacgacgcccacgtttggtaaaagtcccaagggatacacctcacgatcaaattccaactctggatccagctgaagaatggaacataataaaaatgcatttgaaacaatgaaaaaattagaaatttataagagggatgtgtttgaatgtcaatgtcgtcaaacaataatgttacagacaataaaaatcagaacaaaaagataagccaccaatggcggtgaaaatggactctactagcatgcatacctgcaggaaatcctcttgcataaaaggatcatcccctagagaaggataccaaacaaataatatagaatctcagcgttaaacaaatcaaaagttacaaaagacagggatcaaacagaggagttactcgccagacacttcacgggcagaggcaactcctatgacgtgaaaaagaatatcgaccgctggaagaccattcctagaagaagaagaagaatagtgagccttacatgcagctttgaagcagaggaattacctgcattcctcggtgtccataatctagccaagatacttcctcgacaagatttgtcttctcttccgattgaccacatgtcacccaaaatagttcaactgagtctgtaagttccctctctcgtccatcaaccaaatcaagaagtgaaagctccccatttcctttcagtataagacatctatggagaccacaaaggcaattagaatgacagcataaactgaaaggatattctactctattgatgattaccttgagggttccctttctgacaaatcagaagacaaattatcttcatccaattcgccttctctcgggtgctgatcaggaacaaatcgcattgctgctggatggctctttgcagtcatgatggacaactctcttactgtggaaagctgtttgtcatttaatcactttaaggtgcatgaaaagcaactcaagcgttcacatttggaagttaaaaagtataatttactgaaaatgatgcagagaagaaatgaaccggaataactaactacctgtagatctgctttgcttgaaggtgtcaattcaccatatatcttcacatggtagacgtggatgataaacggaagataagatacaagtatataatcctggtaaacatccatcaccattggtttgccaagcagcactttacgacaaagtaaaga

SEQ ID NO: 38050 - DNA, 9335 bp, Arabidopsis thaliana landsberg
gcggatcaaggctagaggaaatgatctcaacctactacttcaacagatttttcctagagattcttgatcctataagagaaggaagttttctttgatatggttttgatgtgatcctttctcagtgtactagtagtagtatatacagataaatgagattgacaacaaatttagtgattccaagctttctcgaatgtattcaccgagcttttttcctaaaaacgaattcccgctcttgtacccaaaaagattttaccgtttaccgctcttaggcgcttgcaattgaggatggctcatctgtgacaccaacttgtttaggcttctcactagcattatctacttgtttgctcggtttcccgttctgagacttcttctcttcgtctttctttacccgcactggttgaaactgccacaaaaaaaaagaatcaaaacttgaatgagtaaattattgtgtgaagtgaagcagaggttttgatttaatgaagaacctgatatatggagtatatcacatttcttcgtatttgagccatcatttccagaaatagattgtatccttcgagcttatactcgatgagtggatcgcgttgcgcatatcctctgagccccacagcttgttgcacgaacttgagtgcttgaaggtgttctttccataacctatcaatattgctcaagattaagaatcgttcggcatctttcattagccctggtgattgtttctccacgatttcctatgaatcataaacaagctttattaaccacacagctcctggtatcttataccaatgtgaaaaggctaagaatccatctataacttactcttttctgtaagtatgcatcgcggccacgggcacggagataatcttgcaacccttcataacttgatccttcgcttttcagcaaatcgggagtgagatcgttcaacaggtaacagtacctaagaggttgaatttttatgagagcttaaacaaatgtatagtgcttatgtatgtgaaatgttttcctaaagaagtataattcttactgctgaactttcgcaatgagcttttcaaaatcccagctttcctttggagtatctgggccaatatttgcctagtaatggtaaaacgagtttcaactgttggtatacaaagactcagggggaataacgaccttctttagctgggcatcaatatcaaacggcttacctctagaatgtcatccattgtcaattcagcatactcgataatcagaggctcaaggctgtccgacacaagagcacgccttctctctgtataaacacgatctctttggctattgagaacctcgtcaaattcgaataattgctttctgatgtcaaagaagtaattctcaacttttctctgagcttcatctagagctttagtaagcatcttggattcgatcggtaaatcttccaccctaaatgccctcatcataccctaagagttatacgacaactatgtttagatgattattttccagaagaatcaataaattgtagatacaaatgtcacctgaatccgatctccaccaaaaatgcggaatatgttatcttcaagactaaggaagaatcgggaacttccaggatccccttgccggccacttcgcccacgcaactgtatgaggggaacaaaacatagtgaagaaggtttatttcactgagaaaggaacctgaatcaaccataaatctccttgaaacaaatctattaaggaaacctgattgtctattcgacgtgattcatgccgctctgtccccaccacgtgaagtccaccagcttccaccacctgcagcagttcaggagaataaacgatcaacaacagacacttgacagagattcacatactgctctgctgtaacagaactaaccttcttcctttcttcatcagtgtagcccttatattctttcgctatcgccagaaatgcagtcctcagtttacctataacttcatcttggacaggaccctgagaaaaggaggaaagaaatgactcaaactaaaatttaacatatgaacatatacttccaggatttctcagttgttcaccttttcacaagaataggataaacgttcctctgcttcaagctcagttaacgatttcgggccccaagcctctacagctgattgtacagcttcttcagctagctttgctttctcatttgacagtttgcatggaaataacttctcattcacctgaatcgtcaaaaaattctacttagctcagtgtaaccattagaatctcatgtttaccaaaaccagagactctagaaaggccaaaccttccatgttctcttgggaggggccttcttcacagatacaaaaacaccatcagtaggctttaccactctgtggtaacataaaacgtaacaaaacttcagctaaaaagaaatcatgaactccaaggttctttgttacacaaagtacataacctgtagcaattttatcaatggtggataaaggatctttcttatgtggacaaaatgtttattagcgataataaagtattatttataacttcgaatgcttcatgcatgatacctgggcataagtatctcacgaagcttcaaacgtgccatgaactctgcgtttccaccaagaattatgtctgtcccacgccctgccatatttgtggcaattgttactgcccctaaacggccactttgtgctacaatttcagcttccctctccacattttctggcttggcattgaggacctttttgtgcaacatatatataacatcatctgtcagtattcttgtacaaggaatataattgatttgatttttttattggtttgtctttacatacaccatttgtttagatgtcaaaaaaaaaaaatttgaactaatactaatggagcatatgtatcttggattcatttttgcatagattacgcgtccaagatttattaatcaaaatgacatgaaagccttacctcatgagttattccagcttccctcaacagttgcgatagttcatcactctgctcgacactggttgtgccaactagcacagccctacctgtcttgtgcattctagagatctccactactactgcccgccatttgccattgactgccttgaaaaccacatctgactcatcctgaaagtgatttaaaaaggtataagacagggaaagagaaacgtttttttttgaaaagaaaaaatcaaaatcggaaactagtacagcatacaatgtccttccagaactaacatggatgtttaacatttttccactttaacagatctcactagaaggccaacatacacgaattttagatcttccgatggagaacaattgtgaagaccaacagtctaaattttgaggtacaagttcagagcataagataggagacaaacctttcttatcatgggcttatttgtgggtacaattgtaactttaagcttgtatatgctttcaaattctgcactctcggtcgatgctgtacccgtcatcccgcaaagtttcggaaactacaacataaaagatattatacattacaatgcaaacaataatcaaaaagtggaaagtatgcatttccaacctgcagaaagaagttttgataactaattgacgccagagtaatagattcattctgaataggcaagccttcttttgcttcaacagcttgatgtagtccatcactccaacgtcttccctgaaagaaataacttattcagtgggttcctacgtactgttttttttttaatctatgttgttcttgtggcctaagaatatttatcagcagtagccactgagatcactaaaatgataaatagtgatatttcttattaagatgaatataaacaagtacctgcattacacgaccagtaaactcatccacgataagaacctcctttgctcggatgatatagttcacatctctgagaaaaagttcttttgccttaatggcattaagaacatatgatgcccactgttcacggggatcatacaaatctttcacgtccaggatttcttctgcatcctcataaccctgttccgtcagtaaaacagtcttctgcttttcatcaacctgccacaccaaaaaaccttagtgaccagttagaattcggaagatggattgccaactccactataaaatttcacacaacaaaagaaataactgaggattcttacagtgtaatgtatatcccgctcaaaggctgaagcaatctttgcagctttgtaatattggtcactaggtttctctgcaggcccagagataatgagaggagtccttgcttcatcaataagtatggaatcaacttcatcaatcacacaataattgaaatccctcaagacgagctcctcaacactctgtacaatcagaaactaactcagaaaaaacatacaaaataaactcatacaatcaataatgacaggagaaaataaagcaagaattactttccgtggctagattgtctctcagataatcaaatccaagctcactgttggtgacatatgtgatatcgcataaataattttcctttctttgttcaggtgtcatattctctgtcaaagtaaccacatgcgtaaagcatctataactcacaacgagcaaagaagatgctgattacattgacaaagaagttcagagaaaagagacatacgttggattagaccaaccttcaatccaaggaaccgaggaacttgaccaacccattcacaatctcttcgagcaagataatcattgactgtaaccacatgaacacctttcccacttaatgcattcaaataagctggtaaaatagcaacaagcgttttcccttcaccagttctcatttcagctatttctcctttatgaagaaccataccacctgcaattagaaccaaatagagagtgcactcaaataaaaaattcttaacagtgaaaccataggaataacattccacagagattgtgttaccaattaattgtacatcgaaaggtctgagtccaagaactctcttggaagcttctctcacaacagcaaatgcttcctacaatttgaaatttccacaactgaatcaaaaacattggtgtcaaaaccaaaaactgaaggattcagaaaattacaggtaaaagtgaatccatggattctcctttctgagcccgttgcttcaacgcatcagtcctctctcgcaactccgaatccgagagagccgaaatctcagtctccaagcgattgacggaggcgacgatggatgcatactgttgcctagtcgactctccgttatcagaacccttgaaaatcccgccgagaagaccacctagtgaagcattcacactcgtgcttctcttccgagagcagctgctacatccagatactcccaacttgacggtatttccgaatttggtgccccaaaacgacgaagagctcagaagacgattttgccggaggatgattccatccgcgatcacgaactgagaagcggtaggtgagatcgaggggcggtggtaaagtaactgagagtcgcagagtggagtcaccatcatcttcgacggagagccgggagaatttccggcgggagcgaaaaacagtccggctgaagaaaacccgaaatctttgatttccggttttcgtgtgtcgtcgagtgaagagcacgagagagagaattgagacgttggggataaggtgatgttaattacgtttatacccctagactcaacttctggtggatactcttttttttgccacgtcattgagtttcttacatattttctagctttaacttatttcacgaattattttatatattcggcatgtatgtgcctatgataatgcagattttaaaaatttaggtgaccgattgatttgtaccatcaaataacttggattcaaaccaaaaaagtgctaagcatggatggtaaaaattgacacggcattacatcgactgtaaaatggtaaaaataaaaatcacggtcaacatctctacacattattttgctgtaacggacaaagtatataattcacttgagagaactggagatcatataaagagaatcctaaaaacaaaagactcacagagaacaaaaaaaatgttctgacagtaaaaggcggcaaaaaaaaacgatgaagcaagaataaaatgtatgactacctgggctcaggaggcactactttcaaactcctcatccattcgcagaaactggcttcatcaaactctataaaactactctttagtttcattctttgctctgtcgtcaatgttcttatctgtggaaatcttgcttcctgcacaaaacaattgggttcagaagaaaaaaaataaaaaaaaatggattaagatccgcaatgatagttttgtcttttctttctgacatggtttagtatgtttttacctgctcataaggagggtctttatgtgctggtataagccggcaaacaaaatatctagcttgggaacttccttcctgttatgtttcaatatatacaagattttgaattatgtttcaatggattagcagatagatattgaatccataaaaaaagaaaggttagaaagtgtgtgattcttttgagaaaaattgtataaggttctgaaatgttaaggaccttgaatgcgagaatacgtggagctggaaaccggaattcagttagctcttcagctaacgttctgcaagctgctaagactgcagcactcttcacctcgtcagctgacagttcggctccctaaatcaaccaaaatgaatgattaaactgaagtgatccgaaaataattaagacacagaatgaagacaagagtaacttaccaaccaaataaatacatctgtgccatggtcaagaataacagccttatctgattgcatagagagatcatacgctggtagttcctcgaatgtaccaccttcttggtgcatcaagcaacggggtgctaccatacgaagagacagatcgaaagatgcgtttagaaacaaatttcgtagcaccgatctttcatcttcatgaccaatgatgtttcccagtaaaggaccccttctaagatggaagaggagttctgggagggatgatagttccttagggaagctataaagctttgattttggcacttgtgatccgaatttcaaagcaatgtctttgattctttcgtctactgtagcacgcatatcgactgcgtccttctgattttttgctaataaaagagttctcttggagatgaggaccgcagaagcttcgtcctcaacactctgaagatatgctgagatgctatcaacagttggcaatttgaacgtaattacccgagacacatctgcttgataaacatccgaataatggaaagcaaactggaaaaatacatgatcgcttttgatgtccctcttattctccattgagagagagaagctttgtgtttcttcaacactcagcatctgaatagagagagccgcatcactcttaaacgtctcgtgagtttctgaatgtgcttcttcgccaggtccaatcacctgagttataagaatatcatctgaacatcgtacttcaagcagaccatgtgaacctgctgccctagtggctgccctctgcaagtccacaccaaaggcttcaccaaaatcatcgtgaagaaccaaaacaccacctgaagcttttgcaagtggctgcaggataggaactctgagagggcaagttccagcgcacaatatgtcgacgaccgtattgtgcctgtgagcttcacgccccaaattttccatccattttatggctgtcttttccatatatggataatttggatgactcattgaatgaggtaccgatccaggaccatatgtaatgggaccaccagcgcaaactatgattctactgttacctcctgctcttctgaccactccccgagacatttcggctgatggtccttggattatagccagagcagcctcaacggcagttccaaggcacctatctctagaggcttcaggtacattcaatgtgtatggtcttaaggacgagaatatctcatgcgctacctttagtgatgcatgcattggtgacaagtatacaccggtcccataaatcagcgctttcatcgactctgcagatggtgattttgcaccagaaataacatccgcagaagcaacggaatcttcagagaaatcatatattgaaacagtacgaccatacagtataatcccaagcctggtagtttgtggaagcgagtctacaaatgcatgcaaagagctctgcaagtgctgaagatgtggttcatctaaacactcatcaataacaaggacgacaggtgcagatgtccgcgaatcagaggcaggaacaaacccaggtctcttgtttccagtctgtacataatcaaacagaggcaatgaaagctctggaaagttttgcaactcattcttgctcgaagccacatattcacctttacttccattcatgttctcgcagatgacacactgccattggcctgagccaattaatatggagctatagggatttgaatatgctccacagttcaaacagcgatgtggatcacgttggataatctgaggaccaggactaatctccctcccagcagaaactattgctccaaaccccaagctagcaacatttgctagcttcttctgctttaaaacctacatgaaacggccagtgatggttgcagataaataaattacacaattagctaacactgacgcacaccaaatgtgaattgaaagttaagtaaaataccttatttgctgaaaacaaaacataaggtgagtctgcagctattggttcttccattctaacaacatctggaagatcacgctgagatccaacagatgacccgtttgagtaaaaggaaggtgtagatacgggcagagaagaattagctgaagagtatgccataggctgaggagtagctggagaggtacggaaaggcacagcagctggtttaaccggagtattaaagacaggaggaccaggcggagtactcaagcgaggaatgggacttccggttctgataccattcgcaggtgacaacaaacttggggatttcatcgacggtgaagacatctgatctggtctaaaacttggttgaggaaacctaggaggtataggtgaagctactactggaggagaatgagggaccggggttctatctggctgtggtgatggcctatttggctctagaggagagagagttcccgggtaattaaccgacgatttcggtaagttagccatcggattccgaagtttctacttaatccaaacaaagtaagatcagaattcacaagctgaaacagccttgaactgtgtccagatcaagaatctgcagagaatttcaacaaacaatccttagtccttagaatcccctaaaattcagctcaaaatatcaaaaaacaaagttcatagaaagagaatacaggactaatccgaag

SEQ ID NO: 38051 - DNA, 1574 bp, Arabidopsis thaliana landsberg
aaaatatgtgagatatgtatttactttttttttatttcttaattaaatgtctttgttgctaatattttttaattaaactgtagtattctaagatcttttattttaatctatataattagctctggattatataagattcatatatcaccgcgcctctagtattacgtatatatctttgattccttaaacttaataaatgaaaatatgtaatgtttataaccaaaatgtaagtttattttctaaattcttcaattttcttttctggttaatttgttataagaatgagtatatttactaagtctcaatagctcaactagtaaaatatgccatgcaaaacctagaggtcgtaggtttaaacccccaaaaaagttaataaactaatcaatgataattaaaatatttatacgcattacatttcaactgacagatggttcataacaacaaatgggacaaatcttctttgtctcaagccatttggttatacattcagagtggcatggatggtcacaaggtgggagaacgaccaaagattctctttcttcaaactccatttggcaaactacacaacgatcaatctcgtttttgttatgtgaaaatacgtatgtagatgcgttcaaacacgtagagatttcaataggagctagcccacggttttcgactccgatgaaatctccaagcgcaatcagttcctcgtaagacaattggccgggatcaatctcatcttcttactccaagaaatcatcctcctcctcaaagacggaattgctttcttgatcttcaagaaactcattgatttcgtcttcatctactccaaatccattgctatcgaaatactcgtagtaattctcattgatttcttcttcatcttcagattcttcgtcactttctatcattgaaagcattgagggagacgaatcatgcatagcatgggcaaaatgggaattagcttgggaggcagcaagagcaacttcagaatttgcttgctcaaagagggctagatcgggaagtttgtttggaggttgcttaggctcttcttcttggttatccattagagaagaataagtagattgtgttatggtcaggaagccgagctccggaattttatatgaaaatggctttcatgtcaaagaggttacttaagcaacaagaaatgaatattgtggacagcataaacgtacaaaagtaatacaaaagaaacatgcggaagttagggtatcctttttcgctattataagcaaatattgcataagttttaaatttgccaatcaggtatgcattttcccttaactttgggtttgcgaagaaagaaaagtcatatcttggacgatatgctgcatctacctaaaaagcatttctgagaatgcatgacatattcctctatatatatagaaattcacttgtgtataaccagcctaatagacaatcacattaaacttttgttctgactaaatcgcttgtactatatattattatttatttttgggcaaaatactatatattacttataatctataaagattaaaacaatataatttggttttggtggtatcgaacaagattattagaggaaaaag

SEQ ID NO: 38052 - DNA, 6901 bp, Arabidopsis thaliana landsberg
gtgagctactctagttataacaaatcaagaaaactttctacatcagaaaaagagcaccttacaaaaagagaagctgtccgtaattctcgaacttacggacttcacaattcggcaatgtacaatggagtttctcaatgtcttccttgtttagtaaccactgatcgcgtccactgcaatatacagtcttattaaagctacaactcagctgccagctaagaaattttttgacgaaaaaagagatcgctgaacttctacttattgaagcagggaagtttacaagtttattaacctcaaaagtataagtgtttgggctttgactgtgtacatgtgagacttagcagatgctgaagcagacttaagcagttgaagcttccatagaagtgtgtcctttggaaagatcctagccagagtctgtaagaaatttgttttcgtgagttaatcacatgaaaacatagctgaaacaacaaaatgaagaacaaacaagagcacattactagtttaactctataatcagcaagacaaacatgcatctatcatttgcttttctaaaacaaagtcttaccggcaggttaactgaagttgcaaagaggtctcctaatagccctccaccgatctgtgcggcatcagtttcattcagcatagtctcgaacattgctgcaaacggataacctatataataggaacacagttagctgtgatttgaaccaaatcctgacactggaaacccatcttggagatcgaataaataaagaagtctctgcatctcatttgtcttcgactggaagatatacaaggagttgaaagttcaccttgttcaaaccgaaaattctcctccaggaagctgggaacaccgtctggcaaaatttccaatagactcgataaaggctgcaacatgaagttgttgactcgtgtgactgcaacaagcaaaacaactggctttgatcatgaagttggtatttttctcatgagccatatttgagcttgatcggttgttcttgcataactttggcctagaatatctagagaaacacaataaaggatctcaatgatccagaaaaaacgagtcttgctttacctggattagctagaatcaagacaagatcaatgtcagggttactggctgcaacatctagagcaagacaagctccaatagattctccaactatgtatatgggtctctttggtaaacggaagtactctgacctaactgttctctcaatgagcttcacaagatctgaaaacaacagcaagagtttcatccacataacattaatccatttggtttgggatccgtactgaaacaacagagaatgctgacaaagaagcacctcgagcaggggtacgatcagtgactggaaagtgaaggcaccatatgtcaaatatcctatgatcaaaaagataatgagatcgtaaacaaagagtattcagtagattccttcttcttttgaagtcattttgtactacttattgataaatcgaagttttttaaacattgaaacaggacctgtgcacaatggagagcttatcttaggctctaaggtaataaagaagattgaatcaaacaagacttactctccaagcctcttatgctggcgaatgagccctaatccagtaccatcgatccctacaatgttgaattcttagttttgttaacttccattgttccaatcagaataacgaatcaatcaaacgagaattgatttcagccctaaattgaaaggacgaaccaggtaagtagagaagaagaggagattcaggagcacgtgcgccacattccaagggagagaaccaccgtggcggaccaccatctccgccgtctgaattaacgaaatctccagcttccgttaaaaaatccgtcaaactcttccgttcctcaggccgtacttcctctgtatacgaatacggattcaccgtcaccttcaacttcccgccgataccgaatttcggattcgtaagtcgttgggttgaattcgagtagagaaaatggagattgtaagcctttgtcgaagctgaggagaagaaggtgggagaggttccatcagtgaaacgaacagtagtagtagtaataatcgccatagacgatcagagaaagttggaagaaggtttttgttgtttagcttcttcatctctgataggtcgaacacgacaagctcgtgcacacgagaaaaacgattataatatgccacgttgattttttcagtttgaatattttcaaatttgataaatttgcttaaattaaacacgacaagctggttcggtttggttaaaccaaatctgggttagtttaactatttattaataaaactaacctcgaatattacacagtttattgtacattgcaatattcttcacccaacactcccaaaagttactcaattctattaaaatagaaaatagtcaaaatacacaaaccttcaaggcttcaacgtaaacgttctagatatgttgtaagaacacaaacttgcatgaatttttaacataacaccccgaacttactcaatttctacatcaacagacttgtacttttagaagttacaataacatatccaaattccacaaagttaattaagtcacaaatccagtaactaaaattattgatttcggaggtcaaaggttgggacttgggaagagaaaccatgtgagaagtgatagagggacctcgctaaaatgtttctataaggatcaccttctcttttgatcttcaaataggtcatacatctttctacctcagacttgacctgcaagtaaacctcatgagctttctctttatcatttagctcttcctctctaccttctgtgtaaattggtttcccaaagtatacgtaaaaccgtcccggcatcttgggaactattccaggcatatgcaaatcttggtttcctacttctccttcttcaccgttcctaaacatatattatcatcattccaatgttatataacattcatataattacatttaacagagagtcgaaaacaaaacaaagaaacaaaaactaaatacctcaagtaagtagagtcttgtgataactcttttataagattcttcaggaaagggatcttcatttgatcattgtaatcgaagaccacctgagaatcaattccatttttcaaaagagttttaaagaattccagatactgaaacgaaaacgaagaagaagagattttgcttacttacagagatcatcttctccaacaaccccaaaaggaacaattttggctccaaatttagatgcaactctcacaaactcggaccgttctggccaaaacagcttgtattcttcaccctgcaaattttgtttgttcattaaagcctctaaaataacaagtttcaagaatgcagaaacccggaaaaagtttacaaactatatatcacctttctatgcaaagcttcacggacacctccaggatacagaagcacatgagccttttcacgcagtagtttgtagatattgaaatgggagactggaactccacccattatcttatatttgtcaaacatcttcgtgtcgactaatgagtcttggagattcttaaatagcatgggatgtgccaaaccccgcatgtgaatgttcctctctgtcatgagtagacctaccattggagctaactcaaaccccaatatcatgtgatatccaacgtacacaaccggcccttgcgaaggtaatccttcgaggctcctgacaattgtaccgtcttctagagttgatagcattacaggtgaaatagcatccattagcaatctgcacggcggaatattccattcagtatttactataaccttttatttcttttgctatatacatatagaaaaactaagatatagcaattagtaaggcatttaccggtgctcgtctaatagttgttgtaactcaaaaggggtaggtttaatgtaatccgaaacgtaatcatgtgacttcccacggcgataaaaacaagtaagcttgatgatagtagccagatctaagctgtcctcctaacatgagatgtaaaagagagataattgaagtgtaggatatatagagatttcaagaacctatttaatagtagtatcaatattaaaccctaagtattggatgaagagagatcacttaccaaaagaggaaactgtccattgtcatcaagcttacgtacaatacaatttggcaacgttcgcgagtatctgacaatgtcttcctcattaagcagccattgatcacgtccactgagatagtcataatcacattacacttatgctccaagctataacatctctttgaaaaaagtaaaagagattcataatttctaaaacaaagaaaattattggaccttggaagtatcagtgtttcagctttaactgagtatatgtgagaatttacagaagcaatagcagactttagcatttcaagcttccaaaggagtgtgtccttagagaacatcctactcagagtctacaaatataattttcaaggtgttgatcgcattacttaagaacttgataagtgaaactgaaaatgtatagactataaactataaatcatgagttcctaagaaggaacacttactggaagattagctgaaactgcaaagagatctcttagcatccctccacccactccgcccattcgctggacggaaaattcatttgacaaagcttctaatattccagtcaatggagcgcctaccgtaacaaagagatacatttttgtcacgtttcaataagttcttgatctacaaggaactgattagttggtttaatttatgattcaagatagaatatgagaagagaacaaaagtgtaccttgcttaaaaccaaaatcaaagatatcttccaatagcgttggaagaccatcgggtaaaacatttagcattcctgaaataggatgcaccataaagttgttgacatgtgtggctgcaacaaaacaatgtctatgatgagaaacattcgtgacattcaccgacaaaataaggcgaacttctgtacctggattaaccaagatcagagaaagatcgatgttgggatttctggctgcaacatctaaagcaagacatgctccaatagattctccaactaaatatattggtctatttggtaaacgaaagttctctgacttaacggtttcctcaataagcttcaccaagtctgaatacaacagaacacaaacaataaggctttaactcgcattaactatcttctcggtagtgcttcgaaagggcaacgagaaggtacctttaacaggagtacgatcactgactggtatgtgcaggcaccatatatcaaaaatcctattcaaagacaatataaataaagatcacttacttcaaaagctacctaaaatcaaattttttggacaaaccaaaaggagaaaacagaggaattttccagaaacagaggaaccatattacttactccccaagtttcttgtgatggcgaataagacctagtccagttccatcaatccctgcaatttttgttaacttgaatagcttaatgtttcagagttccatggaatggaactaaaatctaaatccatagaaattggaaggctaaagaagatatagcggacgaaccaggtaagtataggagaagaggagagtttgtagcttgagcgccacactccaatggagagaaccaacgaggtggacctcctccatctccgacgaactctctagcttcttccaaaaaatctgacaacctcttttgcaaatccggacgcgccgcctccactttcgaatacggattctccaccaccttcgccaccgtggctctgttttcatcattattcttccgtctccgttgaacaccactagaaggggtaggaggagaagaagtagatgttacggattttatcgccgtgagtcgatggttcgaggcggaggtcagacgtcgtaggttcgatgaagatgcgacggcagagagaccggagacggaaggaagtactgtaacagccattttgtgagaagctctaaaagaaaagagtttttgtttttttgtttatagtcggaatacgacaaactattccgacaaagagccaagaaagtgcgcggaaattaaaactttattattacctttttgaaaaaaatacatttacgatattggacatgtcacatgtggtaattattggttaaaaatagacaatatatgaaataaatatagtaatagtagttattattgaaagaaaaaaaacttctgttggaaaatttcttagttatataaaaaataaaaagacaaaaaggatttttctgttggaaaataaaactttagtatgtcgtttttggataaaaatatatatatttgacatgtcacgtgtgtcatgtggtatttttttttgtttttgagccgtagaaactggtgaacaatttgattaaaagggataaataaattcttataaagaaaacaaatctagtgatgacatatatgattgaataaagagcacaagtactagacctgaatggtgtgaatggtcaggaaatgctttgggtatcattgcggacctatcttgttgttacttattcacgtgtaaatcatgcatgaaaataagagagttgtttgtaatcttagaaaacagtataaatattagagaatttaccaaacaatttacaaattaagaaatagatattcgtttgactaattaatttttatgaagtaagaaatcgtcaagttaatgataagtcaatattcttgtatggctagtcaaagttgtaaactgattgattaattagaacaatatactagcaaagtaataacatcgttgtccaaaaaatgataatgcacattatgcatagaatgtgtgtatggtaatatcaatttttcaaattttaaatgaattgcaaccttacaaatgacaactgacgtgggacactataatcgaccagccgacatcaatctaagccctggttcgatcgacttaaattattatactttac

SEQ ID NO: 38053 - DNA, 2744 bp, Arabidopsis thaliana landsberg
  unsure (1)..(2744): unsure at all n locations
agaaatcaggatcctcagaactatcaaacttcaggatcttttttggctcaagctccaggaaaagttcccataggtaaaggaaatgcaagaacaccagccaatgatttgcctcataataagccgatcagagttcggatcaaaatgggttctgaaatcttgtcccaaagtgtcgcgatggtttgcaaggatcttggtctcgatggttctccaaattcaccaccccgaatcagccaggatgatagtagcagaatgctaccgcatacatctctagggaagacaagtgaatctccttcccgcattcttcaggtatatcatatttcacattctttcgcttatacctttttttgtgtgtggattaattcgtttgacttgatgccaccttacttttaacttcatgaaacaggaaatgactgccatttctgttccagaggatctactgatgtcgcctcttcctgatagtctgctcctagtgaaggataagaagaagcaatatactttattagacaatcaacctatgatnnnnnnnnnnnnnnnnnnnnnnnnnnnnnnncagaacaagttctcggatgttttatgttgtgagaaaactccaattggaaggagaaggaaagaggtagactgttttgatgccaccacttggaatgagacgaagaagcataaagttttatccactggtcagctagccagggataactcagcttgtggtttaggtggggcaagtcttactactgatgggtttacaacaaaaagtaacttgcaggaaggttgtaaaaaggatggtgaaagtgatcccagagtccgaaataaaataaagtttgttgggttgcatgctgcgaaagagaaaaaaacatgtccgacaaagtcccaacagaaccgtagcaaatatcgtattggtgataaagttttatcaaagatgcctttgaaggatgccgcatatataggtcacaatagcatggacactgggtttgattttgcggttgcaccttcttccaccagtgttgacctagattattgggcccaatgtgagagttgtgagaaatggcggctactgccctatgacctgaatactgagaagctgcctgataagtggttgtgtagcatgcaaacctggctgtaagtatctgattattccatatcacctcgttttctaacatatgtcttttcaagtatttgtatcttgtgctctttccttgattcaagcactagccctttttagttgctattatagttagtttgaaataagtttcgtagttcgttataggagaaatcttttcgaccatgtgaaggtcttgttccctagaatggctgggtcaagcgttaaagttataaaattgtattgacaacgcttctacttactttctggatttggtccttcaactttgtgcaaaacctcaggttatcatattatcatatctccttatcgtctccctaannnnnnnnnnnnnnnnnngaatgaaccactgtggcgtcagcgaggaagagactacaaacgcaattaaatcctttcatgctagtgagggtcatggtcctgacactggtgttaaactcctctctgatgttcgtaatgctgataaaatctaccaacctttaacttctggttcattgcctaatccaattgaaaagaagtctaacgtagaagacttatcacaaggagtttcaagcaacatccttgttgatgctgcaaagcctatgagaagtaacccacatattttcaagataaaaaacatgaagctgccaggagaaacacctactgctactcagatatctgcagacctttcgcacgatttttttcaggataagattgaccagaaagcaaagaggagagcagcaggtcagtcttgccatctgacagctaactagtgtacattttcgccgcacttgggcttcttttatcaaaacaacttgttattattgtaggtgctggttgtcagataaaggtcaagaagaaaaaggaggctgacaaagaagaaagtgatggttccaagcatatcaagactggtgatggtaacaaacttgccagagttattaaagcagaagaaatacattggaatcaagatcctaaatggactccagcagagagaaaaagaaaacgtcatgacaatgatttttgcactttgaatgtagagcgagacccaaagaaaagattactcgtatctaaaaagaaacctgaccacaaacctcaactgataactgctagtggttccttgtgtacaaaagcccagggaaatatcaatagtactgtgaggaaaataaggttgatgggttacaagcagggtaaggatgggaaaaattcaaaattgtttgcagatggtgaggaaaacgagccctcaatggaaaaggcggtaacaactaagatttcagtccatgaatctaaagcaaaccaaagaaatgaattgtttcaggctgattgctttcaagaacacctgaatggtgatgcctcatgtagatatttctctggtggaagtgggcagatttctgggatagaaacatcaaactcgtcgaaggttttaggatcacataaaagtggacgaatgtatgtggaagaagtaaaagcatcccctgtggaatcagtttcctcttcccctgcaaggtcttcatgccccacgaatgatatacttcaagaggctgaaaagctgagaaagcttgctgactgtttcaaggtcagatttttatgccacctctaatgtagtctgaagcttcgagtttcatctgctagaaataaactaaagaaacaaatgatggtt

SEQ ID NO: 38054 - DNA, 5536 bp, Arabidopsis thaliana landsberg
taagggtggctaagtttaattatcgcaagacgctagcaaattatttatcgcaatcttcggttctggtggtttaatcattttggttattcagtttcgacaatatgattcttttcttttataatcaaataatcagattttattttaatttttgctgtgtcgttagtcacaataatcagttgagtttgagaacgaacactgagttctgattcctacagtctcctccatatagcccatataggactcgactaaaccaccaaatctttcatctgccaaaatctacttcatcagtgtcgttgccttgccattaccgtttatgttggttttaagagaaagacaaagctctgaatcaacactgaccaacatgtgtctcaaaaagaaacatcaaccataagttacagaaatgtgcgtacagataccaaccaaacgtttttctactgccgacactactacagtcacaatcattggaccagttccaaagtcttgaaagctatgcgttatttcttactccgaaaaactcaacacctctgcggattgactcgtgcttactgctaggttgccaaaacaagagccaatgggatcacataccatttaccattctcttcatctcggctgatcttctaggatctggttcttcaatcgctctctcggtcagcacatgcttaatgcggcacattgatctcctcacctatatttgtgagaggcaaacaaagttgacattcattaaaaaataatcataatctccctcggtaacaactaacataaccgttccttgaagaaaggattcatgtttcttttcatagtatctactattttgtcaacaacttaattgaatagagagtctattacctttggaatgcgttcagggttaggaaactgcatgttctgagcctgaagcatctgacgctgagtcatcaacatgtttttctctttgagaagaacgtaccacagcttctgaagatcatcccatgacttgagacgcagctctgaagctttccaacctcgacctaacaccagaagtttacaaatttccccccattaacaaaactaaacaatcctaattccaaaaactccatgggaggataacaaagttaagaagaaaaacgaacgattagcaagcttgactacagacctaagctacagtgaattactttacttcttcactgtacattctatgaacaatcccactagtaaactagtattaagcagatgagtggcagatacagagagaagctaccatagacaacaggtttatcttcgtcttggcttctgtcgaactcaaagaactcttggagtgaatttgttggcgtcccaatggtcaaggcagctgctgctgctgtagtggactccgatcgcgccgatgcagccgccaagaatctcctcccgacaaatcgcgtaagaaacattttaacaacaaacaattcctttgagctcgcagttatataatctgatcatcaacaacaatcagaaagagaaatcgagattggataacaaaatggtaaatggttaatgaaagtcgtacaaaaaatttcaggcttccaaagaagtgagagatcgtgtacacagaaaagcacatctcgcagaggaataaataagaactcaccggagatagagagaggagagctatttcacggcgacggtgacggccacagagaatggaaaaccctctctcaacgtttctccgagaataacaggtttacggagacggaaacttttagggcccaatactagctctgagtagtactgatactattattgggccaggtttcattttctcttttaaggcctaataagacccaacacttgcaaattattggaagacgaatgctgtttttgttttgattcggagctatccacgtcatcgatccgtcaagtaatgttaacgatgtataaccattggatcaataatcaacggtagatatgaaaatcacacggatcaacgcagttttatatattaagacattagttagccacttcatatccgtcaaattcaattgatcctctctccaaatcatcttaaaagtatcttcttcttctccatctggtttattgttcgatcgtcaattcaattgattgatttggaaatctagcgtttctgttcgttaccattcactgaataatttttcttctgttcttcacagtcacagatctttgggtatcaagtaaaactgtgaagtgatgtcgggaagaggaaagggaggaaaaggattgggaaagggaggagcgaagaggcacaggaaggttctgagggataacattcaaggaatcaccaagcctgccattcgtcgtcttgctcgtagaggtggtgtcaagcgtatcagtggtctcatctacgaagagaccagaggtgtcctcaagatcttcctcgagaatgtcatccgtgacgccgttacttacactgagcacgctagaaggaagacggtgactgctatggatgttgtttatgctcttaagagacaaggaagaactctctatggattcggtggttaatccgatttgggggattagggtttatgcaagtttggggatttcttcttgtttctgagatccgtgttaaatggtttgaattagtcaaaagtaaattcaggagtgttagctactgcttttgttttctattgtgatgtcgttgttagccaatgcggtgtagttgaaaatctttgcaaacttaaagctaagaaaatctaatgaggatgcacaatttactcgatatcttgtctcctcatctcttaggatagacactaaacaaatggttgttgaaagcaatcaaatctagttcaccatcttatgagatcattcatatgaggcagcggtaatttctctcaagctttgagtaggcttttagcagcgacgctagcattgctaaactacagtcaaatttgatatgggttcattttgagaggtgtttttaaggtatagacttagcagtcattaatattgcagaaatgtgtccaggagtgcaagcagagaatacgtatttctctcacatgataaagagattgaatctctgatctcttaaggttgtgcccaaaataaattaccatcagtcttaaaaaccaatttggtcgaccataaaagtttacaggtaaagaagcataaagaatcaaggtttggttgaaacattcatctttctatcacgggctgtgtccatgaaccaaagttagaaacttttctttttcaaaccaaaaattatcgtttggagaattaaatatagcaaggatgagtaaagcaacaaagttaatttcagctaaaactaagagtctaacaataatgccttttgaattattttcttactcctccttttgcttagctgagggagtgcgacgtgagtagcggtagccactcgtgcaccttcctacaaacttgagcacttcgtctatcaaaattaccggcagcgacacagccagcactagcagccactcgttcaagctcagtggcacaataccaaacacctgagccaagaatgggacgtacaatatcacaaagtggagtccaaatgagaccgccattgccaggagcagccacgggttaacccagggtggcatcgtcaccaggctgccatcttctgagagtgcattcagagagttgaacatttcaatggccaccaacaccgagagggagagtgtggatgccttgattttaccctgctgaaaatagtcgcaagggtttgagtcgaacgagaaagtctgagagcctgctgtgaaaggagacactttgaagccttcccatgaagagcattggccccaatttgcgagctgtgaatagctcacaaggctgtgaccgtcttggctcaggtctatgcccataaagctgttgtgtgtgtaccatatgatgaatactcccaccgttgctactcccacatacaaaccaatcacctgtaggtaggtacccataatagtcagttagaaaagccccaaaggataaaaaggagaaacaaaacgatttttgcataccatatagcggaagaggatccacgcagtgataagagagtcatcgctcctacgaggaggctttttcataatatccttgtcaggggggttgaatcccaaagcagtagctggaggaccatctgttacgagattcacccacagaagttgaacgggtatcatgccttctgggattccaagagcagctgtcaagaatatcgatgcaacctcaccgatgttggaagagatcatgtaccttttattcatcatagtcagatatataaggtttgtatgtataactcaagccacccataggaagaggcatacatatgtaacataagaagactcacctgatgaaggccttcatgttgttatagatggacctgccttcaccaacagctgcaacaatggtgctgaaattatcatctgccaacaccatgtcagatgcctcctttgctacctgaaaaattccaagagctttagaaagctgatagagctataatcatcccgtcctttcagaagggagaagagaaacaactacctctgtcccggaaatgcccatagccacaccaatatcagccaacttcagggcaggagcatcattgactccatctccagtcatggcaaccacttctccatcttctttcagtaacctgacaatctcttgtttgtgttttggttcagcccttgagaacaggagccctcctgtctgtcttagatgattcttctgatctttaacatccataaattcttttcctgtcaagcttctcgaggagatatcttcatctgcttcaaatacgccaatttcacggcagattgcttccgctgtgctcttgttgtctccggtgataaccatgacccgaatacctgctgttctgcagtctgcaatggcttgacgcacctctttccttggaggatccttcaatcattgaaaaggtagagcatgaataattattaatgaggaaccagaaagaacgaaaaaaatatcacggtgaccgtgactcacccttaaaccaacaaatccaacaaatactagattggactcaattgatgaataattggatgggttgagaagttgctgatgagcaggatggtcttcactgccatcataagtggcaaaatctgatggaacatctgagtatgcaaatccgagacatcttaatgcactcaaggacatatcacgtaggctttgtaaaatcagatcccttgagtattggtcaagctctcgagtggacccatcaagtagctgaatatgtgtactcctttccaatacattttctaccgcaccctgcataatttcaaaattggtctcttaggtgctgaaaaagaggggacaatggttttatcgactaataacatgcaagaaccaaagcagaagccacttgatttcccacgttcgaccccaggagtcaggatatgatcaatgatgacaaacagaccttgaccagtagcagtttgtttcctgagctggaatccaccataactcccattgatttccggtcacggtcaaactcaagggtggcaatccgttgttctagttcactccatagcccacaacaaccttcaataatgttaaaaaaggaaaagtgcaggaggttaggcatctgtaaaacgca

SEQ ID NO: 38055 - DNA, 4783 bp, Arabidopsis thaliana landsberg
  unsure (1)..(4783): unsure at all n locations
taaaaatcttcatatacgttcctaaaaacatgcaagaacatctttgaaaataaggaaacattttgcggcgaatttggaaatcttcaaaacttcaataagtggcgagattgaattcccgtcagatattggtgtcgatcgatatctacgcggttttggtgtgtagattgcttctacagcataagttgtctattttgctccaaaatgatccatagtctccaaatgtatcccaaatatgtaaagaccataaaaaatctatagaagactctagaaataacagaaagactgtaaaaactatacctatatcacaactaaaagcagtgaaaatcgaggtatatcaattccctagacttagcttatgcttgccctcaagcaaaacataaaagccaaacccgtggaagaggtttgaaaacgcaggaactcccaacattctctagcctattgccatgatcatctaaactaaatccacatgcctaacaagtctaatcaaatcctaagcaacatgtacttctctgcaagcttacacaacattctagattccattcctaagttccacaattatatccactggctttcatcgctgggtctcatcaaacaagctaacactcaagatccttctagactcattcatctactataccatgacaaatcgacctttttttttttttctttctttggtgttctttctcttccccagacgttattctttttagagagtaaacaaaggagaactcgcatactggatcgacaccctcggtatttttccaacatttgtaattgatcattccaaataatgtataataatagggtcataggaaatatttctacccctatacactatctgaaaatcctctcactctctcattattttttatttttttttataagaggagatgaacactttttctttatcacattggtctcaatatcaggtatgaaccaggagtcaagatctatgaatactaaccgtttgaagaggtgaaaggaagagcagtgagattagctccaaccttagtggttgagttggaaactaggatatcctcaagtctgttggtttgccatctagattttccaatagtcggattgactcgaacctgcaacactcatcaatcaggcaataatcaagagaaatatagatcatgattccgaactaaactaaacaaaacgttttttttaataaaagaaataaccaaatgaaatgcaaaacgaaaaataataagaataaaaaataaaagcaatattagtatgaacctcccccagacttaaacgacattgtccccagtggcattcaaatccagagaaagagagaaaaataaatcaaaaataaagaaaataaagaaagggaatgaaaaatcaaaccagtgggttgcctcccactaagcgcttgttttgagtcaatagcttgacttgacggagttcaagacgtggacggaggggtggaggacttgctgttgtgttcgcgccttccaaggcggtgtgtaaactgatccagtctgggcagctgcaggtgtcaatcgacactctcttcgtttccttcaagaacaacaggagaaaaaagctttcgaagaactctagccttgttatcttgtgaagcagactttgaagaatctaaaaaattaattgaaggtaaaacatgagaagagatagaatagaacttatcacagagggcctcaagaggtgtgggctgaagaaattgtgcagaatcttatgtttgtgaatcccgagggtgtcgatcgacaggagttgtggtgtcgatcgacaccgttgctctacaactctaattggcaagctgagctgatgggagcattgtgtgtggctctatctggggattctgagcagtttgaggaggtgtgtgtgtgctagaggcaattctactgatagtcttagtgaactctgaaccatccatgccaaactccatctccaaatcatacactttgagagagatcctacatctcttcacatcaatcctagtaccagctgtagctaggaatgctcttccaaggataagaggatccttgggttccttatcgtagtccagaaccacaaagtcaacagggattaaggagttaccaaccttaacaggaacatcctcaagaattccttcagggattcgtttggaacgatccgtgaaggagagagtgattctagtcggcctgtagttagtcatgcctagtatctcagcaacagacttaggcatgaggttgatgaatgatcccagatcacacaaagagcagctgaatctgcttgtggagatagagcaatcaagaannnnnnnnnnnnnnnnnnnnnnnttcgtagttgttagaccgggagtaannnnnnnnnnnnnnnnnnnnnnnnnnnnnnnnnnnggatactgcaaatcgatctagaagaagctgatgaagatgcatggtactacaaactcttttctgaaaatctgtgcggacaagcgcttatgtggttcacccagttagaaccaggttcaatgagtaattttaacgagctgtcagccgtgtttttgaaggaatattccattcttattgataaaagcatttcggacaccgatctttggaatttgtcacaagggccgagtgaatcacttcggactttcatcaccaagttcaagaatgtactttcaaaactcccaaggatttcacaacagtcagctttgtctgccctacggaaaggtttgaggcacgattcaagattcaaagaggatttaatacttcacaagtcggacataattcatgatgctcttttccgagtaaacaactggatggaagtagaagatgaaaaagaaagctttgcaaaaaggaataggccagcaaaaccggcggttacttttcctgccaagaaattcgagcccagggaaaaccaagggccaaggaagtttggattgcaaccttttaacaataacgtctagaagcagtttccaaggaaaaggaaagtcaaacggctgggtccgagatgaaagtctatactgcgacatacatagggtaaccggacctctaaccaaagattgtagtgtcctcaaaaggcatctcgcggaactatgggccagcgaagatctttccaaattcaacatagacgatttcgtgaagaaatatcacgaagctagggataactccgaagttcaaaactcaaaaaggccaaggttgaccaacgaagaagaaccaaggagttcgaaggggaaaatcaatgtaatccttggaggctccaaactttgccgagattctattagtgcaatcacaaagcataggcgaaatgttctacttaaatcaagtttgagtgaagaagttaaataccaaggcgcttcaatatcatttgacgacgaagaaacgcggaccttaaagacctcacgatgacgctctagtcattatgctggacgtggctttctttgaagtgtcaaaaattctcgtcgatacaggtcgtttggttgatctgatctttctaggtactttggaaagaaagggaattagtagggcagatgtagttggacctccgtctcctttggtacctttcccgagcgaatcagccatgtcttttggaacaatcaagttacctgttttagcttgaaaaatgtcaaagattgtggactttgtcgattttgacaaaccggcagcttacaacatcatcctcggaactccttggatttatcaaatgaaggcggtcccctttacgtatcatcaatgcatcaaatttccaactccaagcgtagtggaaacaattcggtgagaccaagaagcttcgtggacatgttatctaactagccaccgtttgaaggtccaatagcaattaacgaagcccgcaaagaaaggaatagtcccaagatttcctagtgggcagaagggggacgatgtcgacatcgaagtaatgttagaagaagacaaaccagatcggaaagtttgaattggagccactctaactggcgaaataaaagaagctttaatcgagctgttaaagaaaataaaagcatcatttgcatggtcagcaacagacatgcctggcatagacccaagtataatctatcacgagttgaatgtggatccaagcttcaaacctgtaaaacagaaaagaaggaaactcggagtgaacgagcaaaagcggtaaacgacgaagtggataaactcttaaaaataggatctataagggaggtgcagtacccggattgggtggcaaataccgttgtggttaaaagaagaatggaaaggatagggtgtgcatcgatttcacaaatctcaacaaagcttatccaaaagacagtttcccactcccacatatagatcgtcttgtggaatcaactgccggaaacgaattgttaactttcatggatgcttttttgggatataatcagatcatgatgaatccagaagatcaagagaaaacgtcattcattacggataggggcatctattgttataaggtaatgcctttcggcttaaagaacgcaggagcgacctatcaacggctggttaaaaaaatgttcagcgagcaccttgggatgacaatggaagtctatattgatgatatgctagtcaaatcattgaaaaaggaagatcatgttaagcatttagaggaatgtttcacgatccttaaccagtatcaaatgaagttaaacccggcgaagtgtacgtttgaagtcacctccgcggaattccttggttatatcgttacaaaacgaggaattgaggcaaatccaaaccaaattaatgcctttctcaacatgccgtctccaagaaatttcaaggaagtgcagcggttgaccggtcaaattgcggcattaaatcgttttatttcaagatcg

SEQ ID NO: 38056 - DNA, 309 bp, Arabidopsis thaliana landsberg
cacataagcaaatgttccaagcggcgtatgcaggagaactacaaaagacagatactgccgtaagcactatttcagaaccacatttaccagaaaagacatttcactaaagcattgccatctgctgggataatctacaaaatggggattgtggtatataaagaggatagatattaaccggtaagtcatcacacagaaaaaggtatctacggagatggtgatcttgttcaagcggatatgctcactctgaagttcatacatctagacatggctggagagttcgttggccgggtaagatacgtatcagggact

SEQ ID NO: 38057 - DNA, 4492 bp, Arabidopsis thaliana landsberg
ctacaccccattgttttggttttattaggctaccaatgctacaccacctattttatattagattatgcttagtctgtttcttatctgtcttggctttggttaccttatgccatggccaggaccacatataatgttgctgatggagatctgtgtagagtttttaactatcgaaatgcagtcatctcctatacaagaaaaacagatccgattaatcagcaaagagcaaatattagattcaagttctggttaagtacactgacctgtgctgacagtagtgttgtctataacgataccacgagagacgcttatgtgaattccatcagtattgggactagtagcaggagctatgacctttaaaccagagatggtcacacggcgacagctggttaaggcaatgtgcatttgttgactatcaatcacattgaggttttcaactctcatattcttgcacttgtggaatgttaaggcctacaaaaccaacatagtcttactttaatagagagtaaccacaccaccaataaaggaaatcaattggatgcttaccgttggagcacctcgacaaggctgcaaaagaaatggttgaaagaaaagtgagaattcccttttactctctgaagataacatgttgagaaagaaaaaagaggcaactaacgttggaatgattgtgtttgcaagatctttcccaccattcttgccccatcccgttaacagtgccgcctccttcaacagttaagcggctcaaaccatggaaatatagccattttcggcggttaagaccttcccaaacatctggatcattgggagcaatgattgtaccagagatctaatggccaaaaaagagagcagaaagcaatgaagacaacagaacaaagacaacaatctgaaaatatccacaaagattctaaatacccctgtggaagggaaggtttaacctgcagtgtgagtcttgctttacaaggtccagaaagatcaataggccgaaggagacaagtgtaattttcaggcaccaagattctggttttgactttggaagaacaagctgtcttccaagcatctgcaaacgcctgcgttccattatcacccgacacaaattatataagtatctaccgttgctgtctgatttcctaaatcctacccatagattcaagatttcacagtgaaaagaggtttctcgagggtttagcgaatcgttactttagtgtcgtcggtgacgccattgcctttggcaccaaaattgccgacgtggaggagccgttcggatctgggtcgggtcgagcgcgactgtctccgcgggagctggaggagcgattcgaacgaattcgcgtttgcggtcaaagcgagtgaggaggctacgagtagtagtaacaaaagagtgacaagagtaccgccgcgtgaataactcataatttagatttttaatttttaggaaccgaatggatttatagacattaaactcaagatactataattaggcttatgtatgattttagaataaacaaatgaatatagatagagtctatttataatcagaattacaacagatctagattccctcctctctaccttgagagtgagatttagttttcttgattgtagtgattatggtgaaatgacgttatgtttagccacaaagaaaaatggcaagatagtttctagttttcaggggatttagtaatgacattctttgaaaattttccatacattattgattgattaatgtaggtgatcaatcatataatcaaacagaaaattgcaagatgaaataaatgtatgtgttttgaccaaaaaaaaaaaaaaaaaaataaataaatgtatgtgataaacccttttatcactaatttagaaataaaaaaaaagtttgatggttatgggctaaagcccagataatcagggtattatatgttgcactaaactaagcccatatgattacgcccaataaaacttttacaatggatggactatgtaaaccttccaactttcaagaaacattctcatactggtatatgatcactatatctatatctcacacctcacgcaaactagtagttatttacgtatcaaacaaataaattaagtgtttattattggttgcaaaatatttgtatagttttatttttcacttttttttttgcaaaggctccaactttttggaaaaaaaaatagcagtggatgggtgggaactgtggtgccatgcttgatttggacataacacagaagcgagtccgtgagggatttgtatcggctgatgaaaaattaaaatatatgtaatcagaaattagagatgagaaaatggcattggtcctttatcctaggaatgaagaatctgatgttgttgcaactaatttgtcagaatgtcaggctcaggtccactttagccgccgcagtcagctgcccagttttgaattcattaagattatcaaatttaattactcgatggattaatcataggagacgaagaagattgttgatcctctgctttaatcttacttggaaatatttggaattctctcgggaaagaaagagagatagaataaaacaagaatatacatgaaaatctaagatcagtctgcaacgaaaacaaaacaaatataaacatatatatagtctctgagtttaaacagttttaacattaaagcacaaacaaaaaaacacaaacaaaaacagaaagaaaaagattcataagaagcagtataagtatatatactctctttttgttttgttttgttttctcatctttgtgtgtgttcttcttctttactttagactttagttcatgcctatctggatctacgcttcgctggccttttcctctgattaaccttcttccccggctgtttcttcccgaaggcagagcagcacccaaacgccgacagtctcggcgacggcgggtccaccgccggagacactctccctgtgtttcgatggtggcggatggctcctcctccgttggatcgactcctctccatacctccgtcagttctgataggtttgagtccttctccggcgataggtttggttgtctgatcctgtacttccgacgtaatcagcttggcctgttcgtcctgttgtagagtctcgcctttccggtcgttggccgcttgttggcttagctcggcgatgagacgatcgtcccagactatacccgaagagccctgtcgacggaaagagatggtggatctctgaagacccgccatggacggcgctaactgttcctcctccgtttttttcttcttcttttactctgttttcgtcgtttttgatgtgtgttgctaaaagtggttcatcattgtgtttcagactagttcatttcttcctcctctttcttatctctttattagaaggcacttgtgtcttttctaattaattttcttttgtcgtcttattatttcaattttatatgttttttttcttctggttctcgaattatccaaccaaatataatcgcgattatcatgtttagatgcgtaatcattgtattttatttgttacgtattttaaacgggagagaaaaaactgggtcaaagcagcgggtaattatgggagtagaatagtacaaacaacgtttttgggtggtatgtgttgaaatttcaattatcttttttttttaacattaaatttagctatagccacttaattatctgccaaaaatgattatttttcttttcatgtttcaggcaaagatcatcgcatagcatatagttttatcaaccataatccagcatggcttaatttttttaaatatttcttaaggaaatcaagcgttggtgactcgtcgttgttcatgcttgatttggttagttcaaagttgaaacttacaagtattagtagatgactgattcatcgagttttaaaataataatcacgcaaaactcgaacctaatatttcctgaaatataatggctcaactttgagaggtgtggattattttattttgtaagatatcttgctatatggcttgctggaccatcccatttgtgtaatgtggagacaatccattcatgtgctacttttttcatatggacaacaaaatttgcgtgttcatatcgtaattaatccccaattaaatctacatcgcaaatctaatatacccatgcatttcaaatctcgctacaattatggaagtccttgagttgattattgaagcagctaaaacgtaagcatgcgaagaaaacggcatttagctttaaaaatttgatgattgtcagaaagagaaagcaaataattggaaaaataagagcgtcttatccgtaagtgtagatttgatggaacaccaaatattttctatcaatttttttttggtgatggttattttggcaaaaccaacatgatcaacgggtttttcttttgttaattgttagccatctaaagatatagtgcatataaacaaaacaaaataataagaataaaagaaaatgacatgtttatatgcgcacaatgtcaatcgcatcactaccagtcaaatgggtggtcttggggttgtgccccaaaagtt

SEQ ID NO: 38058 - DNA, 3559 bp, Arabidopsis thaliana landsberg
taacattaaattatcattttatttataaatatagtaaatatattatttattatgataattattaaaatatttaatattttacaaaagccatttagatctgggaggactgacatcataggagatatctgataagtactggaattctgcgaaaactaggtcagtttggaatagtgcgataaccccggttttaacacgaaatgcatgcgttgataagaatagtgcaagcgaattccagccacgaggaaacaaaacggttgaaggaccgagaagggtaaacctaaatgaaggtgtaaggatagaggagccgttaaacgcaacacctattagagcatcggtacccagacagtctgataacacagagaaacgaaaggcaacaaccagcgagaaaggccaaggacatgttaccgaggcaacaaagtttcaaaatgctcatgctaatggattaccatgtaacaacatgtttgaggcagcacaaacctccacaaaagcggaagttgaggcttttcgaagaacctatgtcgcggaagtgtgccaggatttgtttgctaaaaaggaacagagacggcgagagcattgaattttagggtaacaatatcacaacaatctcctgttgaagacgaaaacctacgactgaccctttagggtgcatccattgcaacaacccaatcaaccatcttgatgttgtcatcatcagactcttcatttggcacaccaaattccccttcaactagtatttcgttctcaaccgaggagctaatggatacagagatcggtagcatatcgcctattggagtaaaaggttagttatccgacaactatactgtatttggtaaagatttaagtgaaatatggtaattatctacatatacatttttttagtcattttagtaaataaatcctcaagttggaacttatttacaaggaatgtcattggcattaattattatcatttaaataatattcctaattattagcatttccttatttaatatatctccatcaattttaattacttttaaaaagaaaaaatcttaggattttattaaagataaatattatagttatttaaagtttctaaaatgtttagaatatttaacgaaaaacgtttagaatatatataatatatgaaatctataaaattaaataaccatttcaaaagaaaacttttaaattgctttgagttataaatctttttataaaaatattattagaacaaaaaaaaaatgtttaattttaccaaactggattagatggtgggacggatttagaatattacaatgtatggattttataacaaataaataaccatttgaaagaaaaatttaaaattaatttaaattatatatcttttaaattaaagtattattaaaaacaaatatcaaatacaaaaattttattttcactgaacggggcagtaatacgagacggtataccacgggtgaaatccattagatatgtttagtttcactgaatgagattagatggtaggacgggtttgggtccatagtaatacaagacgatataccacggttaaaatccattagatatgcttagtttcactgaatgggattagatggtaggacgggtttgggtcgataataatacgagacggtataccacgggtgacatcttagatataacaatcaaaatacaattgtattatcttaaatactaaacaaaacaaataatattaataaaatacatatacttaaaacttaaagtatgtagttatgatctatattttaacttaatgaactgtacgtgattgtttttatatttttaaaaagtaaaaatcaaacatagtaattgtatactaaaaatctatagatataagagttgtacatttagaaaatacaaaaaaaattgaattatatatatttttaatctactaaacatattaaatttttattttttaaaaaacaattatagccccttggtgtaccatagattataatcgagtatatatatatatatatatatttatatagatattaacacaattcctttaaacaataacaaaaagaggttaaggaggaaaactagattaacatagaaaacatttattacctgaaactagtaagaagaaagaaagtaatatcaattggctaaaaaaattagtagaggatatggggcacaatgaacaaatttatttcatgtctacgacaaattttatgtttgtttttaataaaaaacaaaaattgcggtatattacgggttaaaatctaatttgcgtttaaaacttaagtaaactcgatattcaaacccataattgacccgacccgaactcccaaaagtgaagttcgaatcacaacatacaaataattggaaaacgtttttaaatcaaagcggagaagtaaataaaattctgaacgttttcttggttgactttcttgctctctcgatgggaaagctccaacatggatctcatgagtgcgagttgacctcgcgggggatcgtcgcaaacgggatctgcaacatctgcttcaaagatgaacctgttgaattcgcctgtgacccttgcaatttcgatctctgcaaagcttgctcagatcttccccagaaaatgtcacaccatcttcatccggagcaccctctagaatttcgtataggcgaagatgatcagaagactaaacacatggtgtgcgtcgtgtgcggaaacatgtcttctggagccaaatactattacgagtgtagcaagtgtgagatctacctcgatttgggctgtgcacttcagaagaacatagcgacgagttgggaagccaaagaaatgctccattacagccatgaacacttacttaaaaggtgtaggccaggaccagattccaaagactcttgccttctctgtgagcaacctctctccttcactgcaatatgttacggttgcgttcattgttacttgttttttcacgagcgttgccttgatctaccaaccgagattcaacatcccgtgcatcctatgcaccctctcaaacgccttaattatatacaaacttttgacggtgagaaatcttgtaatgcctgtcacggccaatttgttggtgtcccatttggttgcttaggatgtgggttttaccttcatctgagatgtgcagatgccttgttgcggggtttgttgtataagtcccatgaacacaggctattttatgtagaaagtactcgtcgtgttgctgatgaaagagtaaaacaaccatgtctaatatgcaaggaaaccgtggtctatgacagattctattatttatgcgtggaatgtgatttgaaatgtcataccaagtgtcttgagatacctgaatatgtgatcaagaaatcctatcacatccataaacttagatatataagagtcggaggggaggacgattttttggagtattgtggtgtttgtgagactatggtaatttcacgatatcctgcatattcctgtgaagaatgtgattttgtcggccacactgaatgcattctacgcgaggtaattaatatttttattacagctttattttttcttataatgatgacgatatccgttgacgaaaatgatatgagctaatactcttcttactcaata

SEQ ID NO: 38059 - DNA, 1653 bp, Arabidopsis thaliana landsberg
gacagtggagaagtttttttccttctttttcttttctttaaggtctccaaggtgaattcaatgtcaccataatagatttctatatcatatgtgacaaaacatccaactcaaattcaaaataagctagggataagagtggctcaactagatgatgcttaacgtcgagcccatactttaagggtagaagaaagcatgtatcccatgttggaaaaaacgaacaaaatgatgtttatcaaattattacactctcgaggttaaattatctacaaaaattgtatgcttcgaaaaacatcaccataacgatttaaccgtctggtaaattcgaaaatttgtcccgaataaatatacttaactacttattactaatgtgtgtaaattttttattcttaaatctctcaaatgggataaatttagactataatcattccatgattttagatcaatataatttattgttgtgcattagtgtaaatttagaattccaaaactattttatttagattttgttttaactataacgtctggtaaatgtatcactttttttaatattaaatagtaagataaaatcatttaactctgtgtataatttaaattcgagttattataaacgaaatgtactaagctaaatccataattacattagctgcaggaagtagcccattttgattaccacaatctcctaagattatatcacacaacataaacttctactagctcatcataagtagcatgcgtttttataaatcgatgtgttgtctttttccttttttatcgtcgttatgagaaaacatgatatgcttttatggaatttctaagcatttgcccaaataattgttccccctataatatattccctttctctacctccaacagctattctcacttttttctttactaacttttttctctcattctagtatttatatttatatatacatttttgcagctattttgtgaaataaatcatgtagttgatatttatttacaatggttgccactggattttaatatttgtttttaataattagaaaaaaaatcttcgaattaaatatttgacatttaacaatttttctaaaatttctctacattaactacacgattggttactaaaataaaactttcaaaatatttaatatcatttaattactacaaaattatcattattaatattggttttctgcatgactattacaatttaattataatcatcaaaccgcagagatatttgatagcatttaattactacaaaattacaaaatatttagacaataattcataaacatatgataaataagttcaacattaataaaataaatgagttttttttactggacgggttggcgggacgggtttggcaggacgttacttaataacaattataaactataaaataaaaatattttataaatagttacatagattgttacaaattgtaaacttttatatatactaattttaaaatataaattgttctcgcagtataccgcggatgaaaatctagttaagttaagaaaaaaagaataccgatttacagacttttggtggaataaacctaacgacatacccataggttcctttcgtcttcaatttaaaatgaaatcgttttgtgataaagacattatttttttgtaagaattgatcgccttttaccac

SEQ ID NO: 38060 - DNA, 1770 bp, Arabidopsis thaliana landsberg
gactatggttacaaattaaccaaagttcctcttctatgtgataatgagagtgcaatcaaaatggcggataatcccgttgaacatagccgcactaaacacatagccattcggtatcactttttaagggatcatcaacaaaagagagatatcgagattgcatatattaataataaagatcaattagccgatatctttaccaagccactagatgaacaaacttttagcaaacttaggcatgagctaaatattcttgattctagaaattttgattgttgatttgcacacatagctatttttttatatatacctttgatcatgtctctttcatgtgctatgactaatgtgttttcaagtgtatttcaaaccaagtcataggtatattgaaagggaattggagtcttcggcgaagacaaaggcttccactccataactcatccttcgccgtcgctccgagccactctccatctttggtataatcttcactcatatgttttatttgccaaaggggagatagtagttagacaagggcttatatctcactcaatgtatccgtttttggcgattcatgccaaagggggagaaagtaagagcccaaagcaggaggtgcgcgaccacaacagttttcaaagatttgagttgagaaaagatttttcaagtaatgatttttcaattggtatcatatttgttatatagtttcaaattggtatacccccttcaaagttagtatctagaagtctcttggacgactaagagaagaatttcattcatggggagttttatttagttaaaggaaaagcatttgaaacagggggaggaattttaaatcctaaaaatgcttcttgcaaacttatttatatacctttgactatttgcaaaagactttgaaaagatttttcaaaaagatttgcagaaacaaaacaagtggtgcaaatgtggtccgaaatgttaaataaaagaaagcaatccattcacatctagtaagattatcaattggtttaattccaagtaacccatgcacttaccttatgcaaactagttcatttctgcacttcatatatttgctttggtttgtgttggcatcaatcaccaaaaagggggagattgaaagggaaataggtttaaccgtttcctacaattaattttggtggttgaatgtcaacacaagtatatgaactaactagtttgctctagaattcatattttacaggtgcacaaaggttcaacacaaaccaataaatattcaagttaggacccaatttaaaaggagcaaaaaggacttgagtgtgctgtggtctggacaccggactgtccgatgtgccaccagacagtgtccgatgcatcaagatcgtacagagaccaaccagccactctcgggaaaacaccggcgcgctccactataattcaccggactgtccggtgtgccagcgagcaacggctatatagctcgtaacggtcgactctaacggatgaacagtgcagcacagtaccatggcagaagtctgagcagcaagtcagagggcaccggactgtccggtgccgcaagaggacaaagttccaatggtcgtccgagctccgaaccctaacggttgggtgacgtggcggcgcaccggacagcctacagtgcctgtccggtgcacccatcgacagcagccttcccaacgactaccttggtggttgagggctataaatacccccaaccaccacaactccaagcatccaagatttttgaacatcacattcaatacaagagctctagcattcactcctaga

SEQ ID NO: 38061 - DNA, 3160 bp, Arabidopsis thaliana landsberg
tattgtaaacttggcaggtgagaccttaaccgagactgagtccggtcggggtgtgccgtgtatttatgttgcgattgtagccgtggttgcgatattagtcacccatcttaggacggctcgagtcccaacgagtttagctattgtgactgagggtagggtcaagtcagaggctgcaagggaagagttgtatgacgagcagctttcaccggtgtagttgagaacgactggagatgatccgttgataccacagagaaacttcatgtattcattgtaacctacatttgcagccacatttcatatcagtgattgatctcctttttcatatgctcaaggtaaaataatatgaacattgggggttcaagaaagtatttacctatgtcaaaaatcaaaccagggtcaagagctgcagttgcattaacaaatccgctacccatatcaaacggtgttgcaggggactgactaatgtcggggtttaagacagtgcgttgcgccattatatgctcaccctttctgtctgatagagaagccgttgttgaaagtgcggatgcaatggctgcaggagtgaaatgtgggaacttctgcttgatgagcgccgcaatcccggttacatgtggagcagacatgcttgtccccgattccatcgcaaaacgttcacctaaatatcgccaattcaagatctcaaaaagactactagaaacacataatgagtaatctgataaagagaaatgagggtatgtgtaccttgaaaatcatttgtaccaatgccaagaggactccaagctccccatatcgcgtttccgggagctactaagttgggtttcattatatcagcatcaacgaaagaatcatcttctgggtcaggtcccctagcagagaaatacatgaccttgggagctgtaatgccataggtaggcctcatgccaccaacaattttagcaacagacgcagacccaacaatcttccctgaaccattttccctcaacagagaagaattgtaataccggagtaaagcctgcatgtagaccataggaagagctaagttacattcttgttcagagtttaatacactacttcacattttaagactttgattatacctgagaatcttggggggaggatattagaattcccggtatatccattggacttgaagtcatctgaaaaccggtggcagaaggatctatatagaagacaaggcctgctgctgttaagttcttagctgtaagtaatgcttgtttgatggttgagacaccgagaatgaatcgtactgtataactacagacaaggatctttccttgcaccagcttctgatcgaagctacttgaatcttggcattccccaacatatatagcatccataacagttgtaccattgcgaagcgcatgtgtagctaaaacaagtttatgcattattcttgtaccagctaataaaacatgagaaaccggttaggtcaggtctagatggtaatcaagcaagaagaagctaagctataatccaaaatggacttacatgcgagtccaacaccaggaatagtgacattatttccgaggattatcgagttactatatactctatcatgagatgtagctcctactgtgaagatccatggactgaaggaagacatgctcttaggagctggtcctgtgtttccagctgcttgcactacaaagatcccggctttcacagctgaaagcaatgccatatcgattgggttaaagaacgtagcgataccaggaggacgtctatttggtgtgattgataagtttattatgtcaactccatcttgagccgcctgcaaaagaaaacatccataaccatgtcaaacataagaaaaactgtttatcaaagtttctgttacaaaagtaacatttttagttacctgatctatggctgcaatgatatctgcagcaaagcctccaaacctcttatacaatgccttgtagatagcaatactaacaagaaaagacaagacttttagtttctatatgaattgtttccatagtgaacatcattccgtggtattgacttactgagcacgaggagccatcccgctagcatttccaaggcgatgacccgcaactaccaccgggatcccgtgattcccagctgcaacagaagctgtgtgcctgaacaaatcaaccaatatcagacataacaacttgggtggtcaattagttaatcagcatctgagtggataatatacacttacgtgccatgcccttcaccatcaaatggtgaagcatcatcctgagatgaattcaagactcctctactgagagcagactcagcaaaatggcgtgctccaatgagtttcctattgcaagaaccgggcgggaaaccaatggtaacttcacagacgccagtaaagtgaggagggaccgaatatgtatgccccgagattttgtcactgaaactaggatgagtgggatcaattccagtatcaataaagcctataacaactccttctcctgcatattcagagcctccatcacggagccaagctccacgaggcaaacctaagaactgtggtgtgtgagtagttgctttctcgaccagaaagtccagaaccacattttccacttcttctctagctgcaagtctatcagcctaaagaaaaaacaaaccagttttcaaactcaagagctcataacaatgaacaaacactaacatttagacattcatatactgtttccaagacaatgtaagtacctgttttcgagtaagaaccgcggaaaacccattgataagatagtggtaactataaagcttaaggtaattctcctttctcaatacatttctcagcaatgaatcgtgaactctaataatagaagcacttcggttcctatatatgtataaacaaagagattataatcatactatagcataaaggtttcagcttgaaggcattagacattaatgttaatagcttcgtttaacaacataaaggtttcaacttggagcacgaattcaacaggcatgcctatatatccgtttagactttcaggaaaagaccaaagacacaagagacaagtaatctgggacccaaaattgacgaatttcaactaatgtcggtctatgaagattgagaaaaagaccaaaccctcccggaaaaatcaacagcgattccacgaagaaatcaaaccctggataaagattgaaa

SEQ ID NO: 38062 - DNA, 1714 bp, Arabidopsis thaliana landsberg
ttataagagttagggatgaattaggagtgtttagacatacagttttacccattttctcctaaaagaggctgaaaccagcaaaacttgcttagaaaaggtcaatagatttgttagtgtttctatggtcaaaatatgtcacaatccaatgcatttgacaaattataagagttagagacgtattaagagtgtttagacaacacttatacccattttctcccaaaagaagctattataaccaacaaaatattgcttaaaagcagtaaatagctttgttagtgtttctatggtcaaaatgtatcacaatccaatgtatttgactaattataagagttagagatggattaagagtgtttagacaacacatatacccattttctcctaaaagaagctattataaccaacaaaatattgcttaaaagcagtaagtagctttgttagtgtttctatggtcaaaatgtgtcacaatctaatgaatttcactatttataagagttagatatggattaggagtgtttagacaacacttttacccattttctcctaaaagaggctaaaaccaacaaaaaattaaccaacaaaaaatttcttagaagcagtaaacagctttgttagttttgtatggtcaaaatgtttcacaatcgaatgcatttgactaattataagagttaaagatgtattaggagtgtttagacaacacttataaccattttctccgaaaagaggctaaaaccaacaaaaaattgcttacaagtagtaaacagctttgttactgtttttatggttaaaatgtatcacaatccaatgtagttgactaattataagggttatagatggataagcagtgtttagacaacacatatacccattttctctcaaaagaggctaaaacgaataaaaaattgcatagaagcagtcaatagctttgttagtgtttctatgatcaaaatgtgtcacaatccaatgtagttgactgattatatgagttagagatagattagaggtgtttagacaacacttatacccattttctcacaaaagaagctaaatccaacaaaaattgcttagagcaataaatagctttgttagcgtttttatggtcaaaatatgtcacaatctaatgcatttgactaattataagagttaaatatggattaggagtgtttagacaacacttatacccattttctcccaaaagaagctaaaaccaacaaaaaattgcttagaaacagtcaatagttttgttaatgtttctatggtcaaatgtgtcacaatgtaattcatttgcctaattataagagttaaagatggattaggagtgtttagacaacactaatacccgttttgtcccaaaagaggctaacacaaacaaaaaattgcttagaagcaataaatagctttgttagtgtttctatggtaaaaatgtgtcacaatccatttcatttgactaatcgtaagagttagagatggagtaggagtatttagacaatatttatacccattttctcccaaaagaggctaaaaccaacaaaacatttattagaagcagtgaatagctttgttggtatttctatggtcaatatgtgtcagaatccaatgcattggactaataagaagagttaaagatggcctaggagcgtttagactacgtttatacccattatgtgtcaaaagaggctaaaacgaacaaaacattatatagaagcagtcaatggct

SEQ ID NO: 38063 - DNA, 3048 bp, Arabidopsis thaliana landsberg
  unsure (1)..(3048): unsure at all n locations
gaaaccataatgttcaaaacaccaaacccaaagaaacaaagaaaacgaaaagtagatagaaagagagatcttcaggtaagcatcgtcgatggtctcactgatttccggtgacgatggaagaaaactcaagacacaccactcaccgggtgccgaagcagcaaaggtacgttaagaaagcaatcgtgaggacgacaaaaatcaaacccacgagcagctgcacgtcgcactcttctcgtacttttctcaaccgttccagttccaccaccatcggagcaacaatgattttgagaatcacaagcgtaaaagcaagatgcgcccacaagttgaactctatcgcccaagaatacgccacgtgtccggtcatcgtcgggtttggatctgagccagcagctgctcttttgcagactcttgtggacagttcaagcaacactgcgacgacaaaacgaccgttcaatctacgaagctcttcacgtccctcgtcacgattctcttcacgtggctcaacaactccttccatggcgagagattcttgcaggagaaaagaaaaacaagatttgagacgaagattgtgaaaatgagaacagattcgggagagaaaatctatataataagggtttttggagtttataagcataaaatgtttcttttatttaaactaaccacggttaaagtttgaccggggaccatggttatagtaatcgtacgtttttgtaatcgggacgtgagtggtgatgactgatgacctggaaggctggaaaggacctgacctctttggtacacaattttcagtcgttgctgaaccggatatcaatacttttggttagacaaattggaaaaagatatcggaatggtttagtaaatcgtttgatatagtaactatacatcacaaattcagactatatttgtaattgattttagaatattagtactcttttgtttttactgattgtcttttatcacatttctaacatttagaggtcaaataggcttcagaatttcccataatccccatttagtcatttttaccaaacaaaacttaaagcaattgcctcatctcatgacatgtggaacgaaaaattttatcggatggtttaaaataagacacgactattttgtcttaaacttaaaactcggtttctctatgcaagattttaattattgggattaattctatctttaccttccaaagtgtgggatcaatcaacaatctacacaatcattttccacagtttacgactataacgttctagcgaccaatctacgtttagttatatttacatatgtaaaatgcaaaatagctttttaattaactgatagttttattttgataccctgtaacataagatacttgttttcttcattttttcaaatttgatacgtgaaatatttaaggatcaagttataatgagctcgatcattaatgaaaaagataaatcttgttacgagcattcatgttatcaaatggtactcatatgttcaatgacttcaatcccaagccaaagaaacagattataagaaaagaataaaagagaagaggataatcacactaaaacgacaccgttccatagaaaaaaaaaacagaggatgattctaactccacgacgaaccagagaaaggtaacccaagaaagagagagctagagattgaaaccatcggcgatgagaacgattaacaactcacccaccagcgaagatacgccataagagagagcgagatcgttacgcaaattaaacccagcaaaagcttcatatcgcagtcttctcggaaacttcgcatacgtcgtgccaataccaccaccgatgcaaggatttgaaaaatcaccaacataaaagagaaatgagctgttttgttgaaacccgatgcccaaaagaacgctctgtgttcgttctccgtcttctccgttcccgaatttggatctgaaccttcgaaaccagctgctcgtttgtagactccagtgaaaagatcgagcgccactgcgacgacgaaacgaacggccattcgacgaagctcttcacgtctctcacgttgctcttcatgtctctcaacagctccatcatccatggcgaccgaaattttgcaggagaaatgaagatttgagaccaaggttttgaaaaagcagagagaaaaatttgaagaggggttttggagtttgttaaaaagaggaagaagggtttaatgttaaccttaccatggtttacttttaagttttaactattaacaatggttacaataaccgtacgctttctaacggcgtcagtggtgatgatctggacaattttcaccgtgaaatacacanatttcattcgttactgaaccggnaaataatacttttcgttaaaacaaatttggtagtggaaattatactatgcctaattttgtttaattatgtttttactatgttcttagtcactttgaaaaaaaaattgaggtaatgaggttcccataatccccataaaccaagaaaatagaagtatagttgcatttgtcttatgacacgtggaaagatagattgatcggatggcttacaataagccatgtctattttgtcttgttctaaagtacgtcaaacttgaaaaactggttcctgctcctgcatgcaagatttttattttcttgggatcgactaaatagtttgatttcttcattgtttcaatattttgctacattaaaataatttaaggatcaagttataaactaaacatatgattaaaacataccgagaaaaatagaaatttaacaatatgcaacctagcattttaattgataccgagaaaaatagaaatttgatattaacgagggtgtttctagatgagctccatttgctttagttaactacgagtatgattggtttattgaagttctagttacatattttatctattactttacttctgatttctgaattctgactagctttatggacaaaattgcagtttttcttaaacctatttctcatataaaaagaaacaaaaaaaattggaacgcctcaaaacgatcgcttattatccaaaaatattaatcgtaaagttttaggtagtcgatatataa

SEQ ID NO: 38064 - DNA, 689 bp, Arabidopsis thaliana landsberg
ccacaaccgtttctcggaacagctccactcatgttctgttctctatctcttcctcctcctccgccatctccctcatacttctcaccacgaggcattgagttagaagcaatagacatctcactctcattaccagcagcattgtctctaacattaaccgcccgtcccgctctcctcgtccctctaaacttccgtcttctacacccattaccgcgcggtctaacattacaagaaactaaatcatcactatcaccgccaacctcatttaactgatcagaaagagtcttgacaatagcctcattaaccttcttattaatcctatctttcgacaccgatttcaccgaagcaacactataaacctcattaacatcttctactctataactcttcctactcgacctatcaaacttttcatcagaaggagtaactttagatgttccaaaactcacaattggagaagaaccagacaacctaagaccagatcttcttcttccctcacgtgaatccttatgatcttctttcaaattcgggctcgctgatgggtcacgaagtgatcttgatctctggagaacgacaagatctctcataagaagagaccggtcagttaaaaccggactctgtttattgttgttgtgcatatgattcttcaagtgaatacagttggttaagtgaatatggttacgaagatgctc

SEQ ID NO: 38065 - DNA, 2671 bp, Arabidopsis thaliana landsberg
  unsure (1)..(2671): unsure at all n locations
gttgcaggtcgactctagaggatcccccaaaggataggttgtgactcaagtgttgagtttggtctcttcctcagattaagttggttactatagcaccccgaaaatccaagtctcgaaaatttctcaaactcactctaaatttaaaatgaattttaaattttgtttcaaaatgtttgtttgcaagttgatctcaacaaagaaaatatagtggtctatcttctctccaaaattctcctcaaaatatcctacaaatatttccccaatcatccccctcaaattctttccagaaatactgcctaaatgttccaccgatatttctccaaatattttctcctgagaaatacctttggaatcatttctaaaacccctacaaatattttcttaataacgtttcttatgctcataagtatatatatgcattcagtgtcatacaatgagctctacaggctaatttcatttatctactgctaatacatgcttatctctcactaatcctcgcctcctccccctaatcccccaccttgtctataaatagaggggcaagggcctcccttcaagccaccccaagccatttcatggcaactcacccccccactcccactccacctcccacacaagcacccactagcacaaggatcattcggtcgttcttcgattgttcgtccccctattcttagtttgtttgttcgttcgtccgatcgttcgatcgttcgtctgatcgttcatggttcgtttgtccgatcgttcgatcgttcgtccgttcgttcgtccaaataatctttttcctaccgttatgctgccgaaattccgatcgttctttcgttcgatcattcgatcgttcatcgttcgttcatagttcctattcatcgattcatcgttcgttcatagtccctattcatcgttcttccagataatctttgtcctgtcgttatgctgccgaaattccgatcgtccgttcgtccgatcgttcgatcgttcgtccgttcgttcgtccaaataatctttttcctgccgttatgctgccgaaattccgatcgtccgttcgttcgatcattcgttcgttcatagttcctattcatcgttcatcgttcgttcatacgaactattcaccatcactattttaccgttactatttaccgtcactattttactgttactatttaccgttactatttaccgttactatctaccgttactatttaccgttactttttaccgttactatttaccgttactatttaccgttactttttaccgttactatttaccgttactatttaccgttactttttaccgttactttttaccgttactatttaccgttactatttactgttactttttaccgttactatttaccgtcactattttaccgttactatttagcgttactattcatcgatcatccgatcaccccaagtttcaactactcatccatcatgctgtccagtccacctaagacctgccagaccaatattccagttatacgaactccgatgactgtgattttccttccagtgggaacttcccatctggtcacccatcccagatttcnnnnnnnnnnnnnnnnnnnnnnnngagattccttcgaactaggcttccaaactaagattccaataattcttgtttctaaattcctatcaaattattccctatccaaccatgtcatcccttgaacatggttcatattccagaaaactcccaaaatacccttgtcccatattctgcctataactctcctgttcaaactaagtcagaagattcattcgtcactattctcaccaacagtgaacttcactgtgctacaccacatacacccagctataaatacacccagctaccctctccctctccacacacactcaacaccctcagccaaggcaaacaccccacccactcagttactccgctctaccggctacacgcacagtgtcgcttcgcctccagtccaccctcctggtaagcacctccgctccaccaccagtaatatcacaacaccacatgacacagattctactcaagactctacccattgaaagtcgcctagagggggggtgaataggcggaatctgaaatttacaaacttaagcacacactacaagctagggttagcgttagaattaaaaatgagtccgaaagagagggtgaaaataaatcaaccaagaaataaagcggatgacacgatgatttgttttaccgaggttcgcttcttgcaaacctactccccgttgaggtggtcacgaagaccgggtctctttcaaccctttccctctctcaaacggtcacttagaccgagtgagcttctattctcaatcaatcggaacacaaagttcccgcaaggaccaccacacaattggtgtctcttgcctcgattacaattgagtatgatcacaagaagaatgagaaagaaaagaagcaatccaagtgcaagagctcaaatgaacacaacaaatctctctctctctctaatcactaaagctttgtgtggagttgggagaggatttgatctctttggtgtgtcttgtattgaatgctatagctcttgtaaggtgtagaagtgtagaaacttggatgccattgaatgtggggtggttggggtatttatagccccaacaaccaaaatggccgttggaagtgtgctgtcgtatggcgcaccggacagtcctgtgcg

SEQ ID NO: 38066 - DNA, 2802 bp, Arabidopsis thaliana landsberg
  unsure (1)..(2802): unsure at all n locations
aaaacacacagtttatatattccaaattaaaagtgggataaaaaaatataataattctttgacaaaaacatacgaatagttaaatactattcaattttgtatatttttcattatttttcagtatgacatatttctgtttcacagtagataaagtcaactccataatttttttttgtagaattataaacgaacattgtgaatgtaaaaatgtcgagtacaaagaaaacagaaacactagaatgcatacattattacattcgacacaaacaagtcaaaaatatatataaatctgcctaattttatttcttttcacgtacgtattttaaagcgacatgtatatgactttgatttggctctaattgatagacaacacaaaacggtcaaacaagtagccggttgatattgtagtcacatctctaggaactaaatgtctatacgagctattcataaactcaagaacgtactgatatttaatgtatatttatctctttaggtatagttgaacaatctacggtcagaaacttgaatttgtttgattccaaaatcgtataaggaattattataataagatgtgaatagagagtgaagtgagaagcgaagagagtgggggagaaaataaaaaaggagtcagagaggacacagtctctttctctctctcaagtctcaacatatgtatcccgtcgtctccggggtaccaaaatcaaagcactctctctttttttattttatttttttttggttataatgaaactttttatttattttagaataggtcgtgtgtttgtttttttcttcttgttatttatttatttaatttaattttggcttttgctttgactatagattagataggacagaagagagcgaccctttattctctctcctcttgtactcttctccaacatttttaattattattcttcatgataatctgtgaacattattattttaaagatcaattgagtttttgatttattactcaaattgttaacctctttaatccatgataatcgtattaatttttataattaaaaaaagtatgcttttcatctatgaaattggtcgattattaaatacactttacatttgaaaatttcatctactaaattgatagaaaacaagatttattttgctattattcttcaactttatctatggaaatcaaaatttcagtagtttaaacgaataaactaaaacatgaaatcaattaatctagccgtaaaataatttatattatattgatagatgggttcacttgttgaaaggtgaaaaagtcaaattaaaattccatcccagaataaaataaaaagcttccaatatttggaatatagcgaatgacaatattaccctttctcaactatcgttttccaagatatactctcgaggaacaacatctcacacatacacatacacatacatgtacatgaacgaacacacatatatctctctctcttacctgtttttaattttcctggatttagttttattccttttttctcttctgcctttgcttcacaacacacatacctctctctatctctctcttccttctttttctctctctctgcgtcttactttgagcatgtttgtttcttcaagaagatcatcactcaacttctctctcttcttctaagcttctctttaacttcatctctctcactttctcctttctttctgagatatagagagagaaagagaacaaaaaaaatatcaaatctttcagacacccttttgacttctttgcctaaagaatctctctgctttctcttctccttagagaaaatcattttaaattcctaagcaaaaccttcaggagaaaaaaaaaacaaaagaatagtcatcatcatcatcaccagcatcatccttatcattatcaacaacttcagtggcagcaatagcaagagaaaggtttctntaattatgtctatggaaggtgtttttctagagaaaaccaaaacanacacaacaactactctccctgatctatctctccacatcagtctcccagatattcatcaataccatcacaatgaatcttctaaagaatcttcaagaagatcctcccaactcgaaaacaacaaccgatcgtccaactttgaactctctttatctcatcataaccatccaacagcaagaatcttccattgtcctgatcgaagaacccttaatcttcctcatcagcagcattacaacaaccctatcatcaatggtgttcatcaaagggtcgatgaatccgagattagtaatctccaccgtccaattagaggcatcccggtctatcacaaccgttcattccctttccaccaacaaaactcttcattaccttctcttggaggaggagacatggatcaaatctcaatcttaaactcatcttccggctacaacaacgcttaccgatcattacaatcttccccgaggcttaaaggtgttcctttgcatcatcatcatcatcataatcagtatggagtcgttggatcttcagattcgtcttctcctcatcaccataaccatcatcatcatgggatgatcagatcaagattcttgcctaagatgccgacaaagcgaagcatgagagctccaaggatgcgttggactagtagcctccacgcgcggtttgttcacgctgttgagcttctaggcggccatgaaagtacacatttatatcataatcacattctaatgatcattcccatttttcttcactttattctcaaagtcttaaatcttttattcttgttgttgttgtgattctaggagcaactccaaagtcggttcttgagctcatggatgtaaaagacttaa

SEQ ID NO: 38067 - DNA, 2435 bp, Arabidopsis thaliana landsberg
tttgttcatcacggagagaatttttttagaggaaaggaggttatttttatgatccttcattcaagctcttcttctttgtctactctttgtttagtgtgatccattgttcatatttcaagctaggttctttttttctgtctagaccgatgcgcttaagaagctctcttcgaggtatcaagttgttgtttccacaggtggaggtgcagttataagacccattaactggtgtgttcccttcatcctgttcaaagtataatgatacaaaactcggttccttgtttaacttgtttggtaatctgatgatattatcaggaagtatatgcataaaggaatcagcatttggctagatgtgcctctagaagcattagcccatagaatcgctgctgttggaactgattcacgaccactgctacacgatgaatcaggagatgcatactcagtggtactgattctgactgttgtacaatcataagccttggatacttcaaacaaaacattcatctttttttctgtttgtgcttgtgaatgaattactcgtaggctttcaaacgtctctcggctatttgggacgagcgcggtgaagcatacacaaacgcaaatgccagagtctccttagaaagtatgtcttcttcatccatcttatctgccatagcctttgttcaatctgtgtaacttcttctggaaattttgctctccttccttgtacgcgaatcatcagatatttcagcaaagcgtggctataaaaatgtctcacatctcacaccaactgaaattgctatcgaggtaagccaggtcctttctcagttacttcatcattaatcatttcaaatcaaactcaacaaagcaaatgactcatcatcaggcctttgagcaagttcagagctatttagagaaagaagatggtatggctagaccagatggactctagttccagaaagttatgtttccccgcaacatctcatgaatttgtgcctagttttgaatgttgtatataaatgaataatactctgtttgagcacattgtcttcttttcaaattgacccaaaaaatgaaaaggagccatttgcatttttataaaaagacggtaagaagaaacccaattttctgcaacttcatcagtgagtcattaagaaagacaaagccaaattatgtgtacactagacgaccaaacactcctcaataaaatgtgaatgtcttagatttacttgttcttcccataggtcttttagcagcacaagataagcaaagcatcaaaggtttacagcattcagctaaaaacaagagacacaagcatccaacaaaatgatacgatacacgcaagaaacaaagattcaccacattcacgtcttgtctcatcaaacggtaggggaaagagcatacacgacttcatatgacaagggaactgtaagaactgcgtcatgccactcgaccttcccccaaatctcttcgctgttgcgcctttcaagcgcaatcacagcacacaaaatcatcttgttcttacatccatcatcggaagtcacaatcttgtcccagaaaaccgccatctttccaccataatccgccatttttccaccacatctggcaaacctggggagtcctttcacacccttgagatccctccagagtcttgccatagtgtcataccatttgaagactcccttatagtaatagtaaagcacgttctcaacaactttttaagaataccatacccaacctatatccatggcccatttcatcctttcccacctaccttccttgggtttgtaaatcaaaccatgagagtttgcaatcaagatttctccttccaccactgcgcttttatgtatgctacaacctccaatctctgcgccagggctcgagacagactcccaagtttgggttctaggatcgaaaacctccatccagttggaggaattgctgcagtctttgcagcctcctgttacatatatctttccttcaacaacattagccgccggatatctccgctctactctcatgcctggaccctcgtgccatgtgtgagactgacagtccaggaccgagacgatagacgagtgtgctttgtcgatgggtcctccaatgttgtagatattagaaccaacggcaacgagacccgaccagtacgcaggacgagaatggagaactgggattgcagccagaacatacccacttgacatcttcttcttcttcttcttcttcttcttctcagtgatatcattggttagagttcgattaggtttcagacagagagtgaaccaacgagggttagggtcagaatctttctcctgtaaacgcacatagagacaactctcagtgcgacctaacaaagatcgggtcttgtagagatctggtgaagcaatcaaggatcgtaagctcttggatactaaggagagagttgggtgatacagtccctaaacgcaaaataccccccccac

SEQ ID NO: 38068 - DNA, 6295 bp, Arabidopsis thaliana landsberg
  unsure (1)..(6295): unsure at all n locations
ccgactgggacgatctggtcaaagctttcgcggggaacttccaaggcacatacgtgcgccctgggaactcgtgggacctccgaagctgccgccagcaggaggggagtccctccgagagtacatccgacggttttcgaagcagcgcaccgagctgcccaacattaccgactcggatgtcatcggggctttccttgccggcaccacttgccgagacctggtgagaaaactggggcgcaagactcccacccgcgcgacgaagctgatggacgtcgccaccaagtttgcctcgggtcaagaggcggtcgaagccatcttctagaaggacaagcagcctcagggggagccaaagacagacgcccccgaggcgtccgtccagcgtggctcgaaaaagaaggccaagaagaaggcgcaagcaaagcgcgacgccgttgacgcggatctcgtcgctgctgcggagcacaggaatcctcggaagcctcccggaggagtcaacacgtttgacaagatgctcaaggagtcatgccccctatcacaggtgtcccgtcaagcacacccttgaggagtgcgacatgctccggcgttacttcatcaaggcgggaccctcggcagaaggtggcaaggaccaaggcaacaacaagaaggggggcgacaaggaagaggagttctcggaggtccgcgactgcttcatgatctacggcggacgggtggcgaatgccttggctcggcatcgcaagcaagagcgccgggaggtctgctcggtgaaggtggcggtgccggtctacctggactggtccgacaagcctatcaccttcgaccaagctgaccaccccgaccacgtgccgagcccggggaaatacccgctcgtcatcgaccccatcgtcggcgacgtcaggctcaccaaggtcctgatggatgggggcagctgcctcaacatcatctacgccgagaccctcaggctcctgcacgtcgatctgtcctccgtccgagcaggcgctctgcccttccacgggatcattcctgggaagcgcgtccagcccctcggacgactcgaccttcccgtctgcttcggaacaccctccaacttccgaagggagattttgacgttcgaggtggtcgggttccgaggaacctaccacgcggtgctggggaggccatgctacgcgaagttcatggccgtccccaactacacctacttgaagctcaagatgccgggccccaatgggtcatcaccgtcggccccacgtacaaacacacgttcgaatgcgacgtggagtgcgtggagtacgccgaggccctcgccgagtccgaggccctcatggccgacttggagaactcttcaaggaggtgccagacgtgaagcgtcatgccggcaacttcgagccagtggagacggttaaggccgtccccctcgaccccagcggcgacgctccaagcagatccggatcggctccgggctcgaccccaaataggaagcagtgctcgtcgaatttctccgcgcaaacgctgacgtcttcgcgtggagtccctcagacatgcccggcataccgagggatgtcgtcgagcactcgctggatattcgggtcggagcccgacccgtcaagcagcctctgcgccgattcgacgaagagaagcgcagagccataggcatggagatccacaagctaatggcggcagggttcatcaaagaggtattccatcccgaatggcttgcaaccccgtgcttgtgagaaagaaaggggggaaatggcggatatgtgtagactacactggtctcaacaaagcatgtccgaagttccctactctctgcctcgcatcgatcaaatcgtggattccactgctgggtgcgaaaccctgtctttcctcgacgcctactcagggtatcaccaaatcaggatgaaagagtccgaccagctcgcgacttctttcatcacgcccttcggcatgtactgctatgtcaccatgccgttcggtttgaggaatgcgggcgcgacgtaccagcggtgcatgaaccatgtgttcggcgaacacatcggtcgcacggtcgaggcctacgtcgatgacatcgtagtcaagacaaggaaagcttccgacctcctctccgaccttgaagtgacattccgatgtctcaaagcgaaaggcgtcaagctcaatcccgagaagtgtgtcttcggggtaccccggggcatgctcttggggttcatcgtctccgagcgaggcatcgaagccaacccggagaagatcgcggctatcaccagcatggggcccatcaaggacttaaaaggcgtacagagggtcatgggatgtcgtcgggccctgagccgcttcatctcacgcctcggcgaaaggggtctgcctctgtaccgcctgttaaggaaggccgagtgtttcgcttggacccctgaggccgaggaagctctcgggaacctgaaggcgctcctcacaaaggcgcctatcttggtacccccagctgatggagaagccctcttggtctacgtcgccgctaccacttaggtggtcagcgtcgcgatcatggttgagagacgagaagaagggcatgcattgcccgtccagaggccggtctacttcatcagtgaggtactgtccgagaccaagatccgctacccataaattcagaagctgctgtacgcggtgattctgatgcggcggaagttgcgacactacttcgagtctcatctggtgactgtggtgtcatccttccccctggggagatcatccagtgccgagaggcctcgggtaggattgcaaagtgggcggtggaaatcatgggcgagacaatctcatttacccctcggaaggccatcaagtcccaagtcttggtggactttatggctgaatgggtcgacacccagctcccggcagcttcgatccaaccggaactctagaccatgtttttcgacgggtcgctgatgaaaacaagggcaagcgcgggcctgctcttcatctcgcccctcgggaagcacctccgctacgtgtgcgcctccatttcccggcgtccaacaacgtggctgagtacgaggctctggtcaacgggttgcgcatcgccatcgagctaggggtcagacgcctcgacgcccgtggtgactcgcagctcgtcatcgaccaagtcatgaagaactcccactgccgcgacccgaagatggaggcctactgcgatgaggttcggcgcctggaggacaagttctacgggctcgagctcaaccacatcgcctgacgatacaacgagactatggacgagctggctaagatagcctcggggcggacaacggttcccccgaacttcttctcccgagaactacatcaaccctcagtcaagaccgacgacacgcccgagcctgagaaggactcggccctgcccgaggcaccctcggctcagcacaaggcgccctcggctcagcccgaggcaccctcagcccccgagggtgaggcactgcgtgtcgaggaagagcggaatggggtcccgcctaattgagactggcagaccccgtacctgcaatatctccaccgaggagagctacccctcgaccgagccgaggctcgcggttggcacgacgtgcaaggtcgttcgtcttgctgggagatgggaaggagctctaccaccgcagcccctcaggcatcctccagcgatgcatctccatcgccgaagtcaggaactcctacgagagatacactcgggggcttgcggccatcacgcagcacctcaagcccttgttggaaacgccttccgacaaggtttctactggccgacggcggtgcttacgccactagaattgtccgcacctgcgaagggtgtcaattctacgcaaggcagacccacctgcctgcccaggctctacagacgatacccatcacttggccttttgccgtgtggggtctggacctcgtcggccccttgtagaaggcacccgggggctacacgcacctgctggttgccatcgacaaattctccaagtggatcgaggtccgacccctaaacagcatcaggtccgaacagacggtggcgttcttcaccaacatcatccatcgctttggggtcccgaactccatcatcaccgacaacggcacccagttcaccggcagaaagttcctggacttctgcgaggatcaccacatccgggtggactaggccgccgtagctgaccccatgacgaatgggcaagtagagcgtgccaacggatgattctgcaaggactcaagccacggatctacaacgacctcaacaagttcggcaggtggtggatgaaggaactcccctcggtggtctagagtctgaggacaacgccgagccgagccacgggcttcacgccgttctttctagtctatggggccgaggcatcttgcccacagacttagaatacggttccccgaggacgagggcgtacgacgaccaaagcaatcgaaccaaccgagaagactcaccggaccagctggaagaggctcgagacatcgccttactacactcagcgcggtatcagcagtccccgcgacgctaccacgcccgaggggttcggtcccgagacctccaggtgggtgacttggtgcttcggctgcgacaagacgcccgagggcgcacaagctcacgcctccttgggaagggtagttcgtcatcgccaaggttctgaagcccgggacatacaagctggccaacagtcaaggcgaggtctacagcaacgcttggaacatccgacaactacgtcgcttctacccttaagatgctttcaagtcgttcgtacacctcgttcacatacaaagtctagccatcaaggaagggtcagccttacctcggcaaagcctgaccctccctcgggggctagaaggggggaacccctccgcgtcaaaattttcctcggaaaagatcttttctgtcagaacgtctttcgtgcttttcgactatttagaaagtgggatcctgaaaacgacggagtacacgtaagcagccaaggctgactgagccgagggactcctacgcctccgggatacggatacctcactcgtcaccttgacacggggcgactcacgcttggtgaagcggttcagataaccaacaggcgagtcttagtgctcgaaattgaggaaaaaacacggctccgtgccgaaattacatacatgttcaggcctcgacagccacaatgaacaaaaacactggcattcaaagtgccattacaagcggaactccggttccccctccgcaggtacgaacaaccccactcgatgggggagggtctacggagcaacagaagaccgacgaacggcgcgccgtcgcccagctccagcagcagcgacgtcgacgacttctgctccggggggctgaacagcggcacanctgacctcagggcgggtgctgctgccaagaggccccgcccatgcccaaactcgtgaggcaaggacgagcagaaggcagtagagttggaggtcggccgtgggcggcctggctatctcgtcggcggaagaacctcttccagctgccgtggcagaagccggcgccgagagcggctccaaagccactcgcgtccgagagccaggcacgcggcagctgccagcgccacggacaacaactgcccttccccccgatcactgagggaaggagcgagccacctcacacgcagggccgaccccaactcggcacactcccctccccagccctggtgatgaaaatccttgaggctgagggaggggcagaggccgcggcccggtttgctttcccccgccatcgaactggaggtcaccatcttgggtgaccgccggcggaggggtgcagccgggctgcatgatgaaaatccttgaagccgaacgatggctgaaaggtaccaactcccactgagttgcgttcctccaatgacgaggcggaaagacggcgggtatcccccatcagggggcttggaaggtggaaagacgcgatgcatgagggagcgcgaagacatggtcgccttccgaagggggtcaccctccttttaaaggcgactctccctacttgcgcccccagccgtcacgggctgagtcttctccaacacgctccaaggccctcccctgcggcgcgggggctgggtctcgcatgccatgcaagccgacacagagcagaagtcgtcaaaccgctttcgcgctgagtgcaacgcccagtggttacaagtgaccctccactttggcccagacgaacaggcgaaaggggcgggcagccatgcaggcggcatgtaacgcggccaagtgggcgcgcttctccgactcccaacacgcgcacattggagcccaggcccacgcgtcatgcaaccggcgcgccgaa

SEQ ID NO: 38069 - DNA, 5753 bp, Arabidopsis thaliana landsberg
ggagccgcgatgaacaatggaaacaacggagtcaacgcagcatcaaagaaagtcaaccaaaaacagagcaaccaaaaccagatcactcaacaagtaatggcggctatgagaatgagaaccgccgggaaaatgagcactggtgttgaagccaacgagattggagctctcatgggtcttgctggcttcaacggcgcaaccaacgcagtgaatcaccctccaaatgggattcaacaacagcttcaagctccaccgttaaacaacgtcaacggcgtcactaatcacaacctcaccaatagtaatggaggcatgatgatgaacatgaatgggtacaataatcatcatccaatgaacatgcagagtaggcaaatgatgcatcagcctcagcaaatgatgtaccaaagatcatctttcgttccagcatcaagcaatgggtattattacaattatacccctagtccctacagttattatccttattacccttacgcaagtgatcagtaccaacaacaaagtagtcattcacatgcaacaaatatgtctagtgaagaagacgctggtaataacaatagctgcaacatcatgtaaagtgtggatgcttgctaaggaagatatctatcttttgcttttggaaacaagacttaaaagtttaatcttttctggagtgtgatatattagtgtttggtttttctttctctttttttttggtgtgtgtcatgtagctgttttggactgacatgaagttgtgttggttgatatataaaatcctagaatgttattgatgtttcttgtgatatgcttttgtttgtcttggttctttttcatgagatccggttggtgcggtcgaaacatttgtagatgaggagcgtttaaagcggttggttttgtcacaatgtggtttgtgtgtatctctcgaaaagatattctctctatccactcaaaaagttattccacctgctctcgcttgcctcttggtaggtgtctcgttttacgcgtcacctatttttattaaatgcgacatggttcaaaattttggacttgtgaaagtaataatgctaagccggtcatgcatcaatcagttctttgttttaaatttgatatatttccaagatacaccgatggaaattggtatttgcttaggaaaaatgtttatcagattcgaaccatcttttgggccacatgaatttcaagaaacattttggggtaaagccccaactttttttttttcaaacgtatttaaattctttagagcctacacaagattccccaaccagatgacaaaaacatgcaaacgaaaatgctaaacattttgtctgtttatttttgacaaaatgggaagaagttttctcatttaaaagttaaaatgcttttaaaatcgtaccctaaaaattggtccaaaataaaataaagatcgtaccctaattttgaggtttagttatgatttctcaccacaatcgcttgtccaaaattatacatgtgaaataatcttatttaccaattatgatttaattaatttaattgttactgaaaaatacattatacaatcactatatgaaactctaaccacaaattaatagcagtgcaggacactaaaattataagtaactagaaaacatttggtacgagtgaaaataactctatgtaatgttcggtccatttgcatgctatagtaggtttatattaataatgtggtttgtgcataataatggattaccaaatggacacttaaacgtaagaagcatggagtttaggatagtggaccattctcttaaattcttttcacacttgagttcctactttttacgacacgagccgtgagatgtttgcctttgtttttctataatcgaattttatcttgtagattacaaaattatcgagagactcgcttgcctttagtttctgattaagtggttataaaaagagactaagaatacttggataaaaagagagagatagatttaagtatgatttctcgaattaacaattttccggtcccttgaatgtaattaggtgctttggtaacgcgtctaggatactagagctttcgtatcacacaataatcaagaaaattagtgtgattatttattcaactataaataatacgaggtttaatgcaataattcgagatattttgccacgtaaaaaggtggtatctggatacatagctaaatgaaatttgctaatattttatcgttactttttagtattgcctttctttgtattttccctcgtcaatgtttgctttctctgcttttctgcggatgccattgtatttaatttgtaatttagtatacgtcgctactagctttttcacctgtgaagccaacacaaacatattatctttggggagaatcccaaaaaaaggaaagttgaaaaagagtaatcttttaattttgatttcttaagactcttaaatacttggaactgattgctaactgacaaccaaattaaggattttaagatctattatcgatcaaagactcatagttatacgtactaatcaacctacctaacctacctccctcaaataccattgtaagctaaaaaggatgaatcatcgagttaggctctcatttgtcattaagcttcttctttgtttcactagtcattaagcgttgcacattatacgcaactttcattaaatgcagacttcgataaatccggtactaaagactatagagtgtgacaaaaaaaaaagagtacaagagtgaaatctcataaaataatacaaagacaaacaaaaattcccaaaacaaacaatttggaaagaaaggtcactgaataatgaaaaaggaaaatgccatctgcacatcatgcaaccattaaaagaaattttttataccaaagttagtttaatgatagaataaatttgtaacgatactataacaaagactcatgggtgtgaaccaaagacaaccacgttctctcaaatactcacacacacactcctatatataagtatctaatctaatcaagaacttaatttctctcacccgaagttaataattcagtcagaaacacacacacacacacacactcaaaactgaattgacttgtcagaaatggaatctctgttgtgtcggaggaggataaagagagtcatggtgctaataatagcgttgacatggctccgtagcacgtgcggagagctcgaggaccaactattcgaagtaggaaagcttaagatgttcgtcgacgacctcccagatatgcccagactctatggctttaactcttttcatggtatcatcaaaccagcttctcttcaaatcggcatgttctccactaaatgggtattgttcttttcctctttcaatttctttttcttgaagattcttatgggttggtgactggtgagaataatcttatttcacttgtttacgtaattacgtcttagtcgttttgggaaaaaatgattagattcgttttgcgtttactctcaagtcttcacctaaataaagtgtttttgatgatttttttaaaaaaagacataatgggctttggcccatattctgttaggcccaattagaattgttttttttcctatattatagtaagaaaagaacagaacagaacagaacagaacagagtatggttgtggcgtgacaataaatttattgtaacagaaattccacagagatttgcctgcgacgccagtgtttgcatacggtacatcacggagcaaggcaacagttcctggtccgacgattgaaaccgtatatggagtagacacatacgttacgtggcgaaatcaccttcctaaatctcacatccttccttgggaccccacaatctccccagcaactccgaaacacggtggaattcctacggttgttcacttacatggaggaatccacgaaccaacaagcgacggaaacgccgacgcgtggttcactgccggtttcagagaaacaggaccaaaatggaccaaaacgacgttacattacgagaacaagcaacaacctggtaacatgtggtaccatgaccatgccatgggtttgactcgagtcaacctccttgccggtttggtaggcgcctatattcttcgccaccacgccgttgaatctccctttcagctacctactggcgatgagttcgaccgtaccgttgatcatttttgatcgtagctttcgtaaagacgggtcaatttacatgaacgccactgggaacaacccatcgattcacccgcagtggcaaccggaatattttggcgatgtgataatcgttaatggaaaagcatggccaagattaaacgtccgacgtaggaaatacagattccgtatcataaacgcaagcaacgctaggtttttcaagtttttcttctccaacggtctagatttcatcgttgtggggtctgattcagcgtatttgtcaaagccggtgatgaccaaatcgattctcttatctccatcagaaattgtagacgttgttgttgatttctcgaaatcaccgtcgagaacggtggtgcttgctaatgacgcaccatatccttaccctagtggtgatcctgtcaacgaagaaaatagcaaggtaatgaaatttatcatcaacaatgaactagaagatgacaaatgtacaattcccaagaagctcatcaattatccgaatgctgacgtgtcaaacgccgttctcacgcgttacatctctatgtacgagtatgtgagcaactctgatgaaccaactcatttgttagtgaatggtttgccctatgaagctcccgttacagaaactccaaaatcagggactacagaggtacgttgttaattaacagtctaatctataaatttctttggaaaagtttaataataattgtaaaattaatcaggtatgggaagtgataaatttgacggaagataaccatccgttacacattcatctaggattgttcaaagtggtagagcaaacggcattactggcggcaggattggaggagttcaaggagtgtatgacgaaacaaaacgacgcggtcaagtgtcaaattagcaaatacgctcgtgggaaaaagacagcggtgacggcacacgagaggggttggaagaacgtattcaagatgatgccgggacatgttacgaggatacttgtccgcttttcttatatccacactaatgcatcttacccattcgatccgactcaggaaccgggctatgtctaccattgtcacgtcagtaggatttcaaaatatttttaaattggtaatcgttactacagaaattgtttttaaaagcaatataatgtttttgcattgcagatattggaccatgaggacaatatgatgatgaggccgcttaaggtcatcatttgatatgtcaaggtctaatgatcgatctctgcgaagttttgatggtgcaaaaagataaaaactaatcagacatcataaaatgaaactccatattgagaatgtcacatagtctttactttaataattcctagtaggaattctaaaatttggtactggcttatgttgaaagaaccattctttcctgattttgttatgagtccaaattcagaaataataagtactctctaaattgatcatttctgttgagttctatgataacttgataagcctttttttgtctaaacccaagttgacgcataaatgtttttcttgttattggtccaatgtaacttatttgttaacagaaaataaaacatttttgtttaccacagctctgttttgcaaaatcaacaaccggttatgtagtggagttaaattgaggttatcaacatcacctctttaatgtctagttgagtac

SEQ ID NO: 38070 - DNA, 1501 bp, Arabidopsis thaliana landsberg
catgcttatgattcttatgccatgactgcttctagttcttcctatatgcatggtagaagtatgactaggagaaatgctattcatcacgtgcctagaaagaatactattcatgctcctaggaaagtagtaaatgaaccttctacaatttattgtgctttaaatgcttcctttgctatttgtagaaaggataggaagatagttgctaggaagttaggggcaaaatgcaagggagacaaaacttgcatttgggtccctaaggatatttgcactaaccttgtaggacccaacaagagttgggtacctaagtcccaagcctaaatttgccttgcaggtttatgcatccgggggttcaagctggattatcgacagcggatgcacaaaccatatgacgggggagaagaaaatgttcacctcctacgtcaagaataaggattccaagattcaattatattcggtgatgggaatccaggcaaggtaaaaggtttaggtaaaattgcaatttctaatgagcactctatctctaatgtgtttttagttgaatcgctcgggtacaatctgttatctgtgagtcaattgtgtaacatgggttataattgtttattcacaaatgtagatgtatctgtttttagaagaagtgatggttcgctagcttttaagggtgtactagatggcaagctctatttagttcattttttgaaagagaataccgatctagatgcatgcttaatagctaagaccaatatgggctggctttggcatcgccgtctagcacatgttgggataaagaaccttcataagcttctaaaaggagattgtcggagaggaaattctccggccgggtggcggaatgcacccgccctaaatactaagatgaggaggggcctaagcattttgcttgttagttggaaaatggggagaacacaagaacacacaaggatttagagtggttcgggccgcctgagcgtaacaccctactccactgtgtgatgtattgagtttgagagcttgtatgaacttgtgagtttgagagtctaagtgagcttgagtgagtgtgagagaacttgtcttgtaacgttgcgtgccctcccttttatagctcaaggggggcacgtacaaggatgctgagccccgacatgtgggcccaggggcaaaacggaaggaagtaactaacgcctgtcatgccagggtgatctccgagtgccataatgtccgtagtgcatattgtattgatatcacgcgccgcttcctcggtaacgcgcgagtgatgatgagcatagtgtacgccgcagcacgggcgtactgcctgccaatggaatggacaggcacgctgcctgcgggatggccaggtcgccgcctaccagcggagtggatagggcacattaaatgctgaggcggcacatcgcctaccagtggaatggacatggctcattaaatgcaaggcggcacatcacctgccagtggaattgatcagcggtgcgccttatccgcaataaatgcagag

SEQ ID NO: 38071 - DNA, 4323 bp, Arabidopsis thaliana landsberg
aacacaatgtatttgactaattataagagttatatagggattatgtagtgtttcgacaacacttatacccattttatccgaaaagaggctaaaaccaacaaataattgcttataagtagtaactagctttgttaatgttgctattgttaaaatttgtcaaaatccaaagcatttgactaattatatgagttagagatggattaggagggtttagaccacatgtatacctattttcttccaaaagaggctaaaacaaacaaaaaattgcttagaagtagtaaatagttctgttagtgtttctatggtcaaaatgtgtcacaatctaatgcatttgactaattataagagttagagatacattaggcgtgtttagacaacactttaacgcattttgtccaaaaagaggctaaaaccagcaaaaaaataattagaagcagtaaataactttgttagtatttctatggtaaaaatgtctcacaatctaatatatttcactaatcataggaattaaagatggagtaggacgttttagacaacacttatactcattttatcctaaaagagactaaaaccaacaaaaaattgcttagaagtagtaaatagctttgttagtgttgctattgttaatattaatcataatctaaagcatttgactaattatatgagttagagatggattaggagtgtttagacaacccttatacctattttcttcaaaaagaggctaaaatcaacaaataattgcttagaagtagtaaatagttttgttagtgtttctatggtcaacatttgtctcaatccaaagtatttgactaattatatgagttagagatggattaggagtgtttagaccacacttatacctattttcttccaaaagaggctaaaaccaacaaaaaattgcttagaagtagtaatagttttgttagtgtttctatggtaaatatgtgtcacaatctaatgcttttgactaattgtaagagttagagatagattatgagtgtttagacaacatttaaacccattttgtccaaaaagaggctaaaaccaacaaaaatttgtttagaagcagtaaataactttgttagtatttctatggtcataatgtgtcacaatccaatgcatttgactaattataagagttagagatggattaggattgtttagacaacacttatatccattttcttctaaaagaggctaaaaccaacaaaaaattgtttagaagtagtaaatagctttgttagtgtttctatggtcaaactatgtcacaatccaatgcatttgactgattatatgagttagagattgattaggagtgtttagaaaacacttatacccattttcttccaaaagaggctaaaagcaataaaaaattgcttagaagcagtaaacagctttgttattgtttttatggtcaaaatgtgtcacaatccaatgcatttgactaattatatgagttagggatgaattaggagcgtttagactactcatatacccatttattttcaaaagaggctaaaaccaacaaacatttgcttagaaacagtaattagcattgttagtgtttctatggttaaaatttgtcacaatccaaaacatttgactaattatatgagataaagatggattatgagtgtttagacaacacttatacccattttgtttcaagagaggctaaaacaaacaaaacgttgcttagaagtagtaaatagctttgttagtgtttctatgatcaaaatttgtcacaatccaaagcatttgactaattatatgagctaaaaatggagtaggaatgtttagacaacacttataccaactcgtcctcggtctgtgtaggcgcagatcctgcagcagaacctctctatcgcctgctgcgtggtgcgacatgcagaagggagggatcgggatgaaagcctatctcctcatgctctcctataatctatgtaagtgcagggtgtggtaattgaatcatgtgctgacttgtatcatctctgaagcaccacagtaggttgcctttaagccaatgagagttcttcaggtaagtctcatccatagtgaaacgcgtggtgttgacttctttgccctcaaagctgatgcggaaatgctcgaatatgggagtgagaagactgccaactctctcagatttgtgtcctctatctgtaaaaggcttggtcttgagagaaaccaagtaatgagcgaacacaacaccaaagttgacattacggtcaacctgctcaaatccaaggctgtcaggaaagaagtcatgaagagcgtgatagagcagtaacaactcagagagtctcatcttgccagactccatcttgcacaacattgtgctactaatcagcctaacctaataccgtagaacagggtggcggatctctgagtgaactgcgtcctggaatcaaaaattccattaccaaacctgcaccagataacctgagcatccttaaactgtccaggcagggaaactctagtgagatcaaaatcaaaaccatagatgtcacacaaatctctcggtggtagactctatctgacaccgcgaatgaagtagataagagctccttcctgagcattgcgtttcctgtcattcacatagtagaccctaacaaaaaccatgaattgtctaactagctcaggatacaaatcgtactgcctacaacagatggttcccaaacctatatcatctagcagtcctaaaacagatttctctatctgcaaacgctgcattaaaccaaaatccgcaaaccgagtaggcaaaatttctacactcatctaggcattatagaaaaaagtatcataataatcccaatctggagaaaaagggcgattgatatagtcacctttagtgaattctttgttgacatccttctcccaaactctttgagaaggaattttttctgttggaagctttggccatggaaatcgatagatgggaggttcaggcactgcagctggtggttgaggttgggaagggcggaggccggcggcggtggagaagctcctgcggtgttgagcaccggcgcaggaggaaggtggaggaacgctcttccttgccttctttttctgcccagccatcttgcagattggtggaattgatacttggggaagatagaggatgaaattctaatgagattagagcctgaaatcacaagaaacggtgaaaaatcgaaggatatagaaagaaaagagtgattttgccggtttggaaaaaactgaaataaagaagatgaagttttaggttaaatcgacttacctggaaaatgaggatgtcgatcgacactatcgcgtttttggtcaacacacgtttttttttctttctgaatagtcctataaaataaaaaatcttaatgttaagaatcaaatgaatgaaatgaataaaacggagaagtacttaccagtgggttgcctcccactaagcgcttgtttatagtctatagcttgactctgcagttgcttaatcaacaggtgggtcctgaagatccaaaggcttttctactagaatctcggcttcagcccagtagtgtttgactatctgtccattcatagcaaatggtttttcattgttgtttttgagaatgactgttccatatggcctaaccgagtggactatgaagggatctgtgcaacgagaacacaattttccaggaaatattgtcaatctagaatcataaagaagtacctggtcattaggctcaaaggtccgagtgaggatcttcttgttgtggtaagcttttgtgtgttccttgtagagcttcgagttgtctaaggcgtgaattcataattcatcaagctcattcaactgaataagactcctttctccagttgatttgatgtcaaaattcatcatcttgactgcccaagctactttgtgctctaatttcactaaaagatgacaagctttaccatatagaagatgaaaatgtgtggtcccaagcggagttttgaaagctatcttgtaggcccacagtgcatcatctaacttgtaggaccactcctttttcgctttacccactgttttctcaagaatctctttgatttgcctgttgcaaacttcaacttggccgctcgtttgtggatggtagggagtagcaacccgatgctgaactccatactgtaaaagcaatttcgctagaatcttgttaatgaaatgcttacctttgtcactaatgactatgcgtggcactccaaaacgagggaagatgattgccttgaagagtttcatgacaatcgctaaatcgttctttggactagctatagcttctacccatttggagacataatccacagctactagggtgtagagattgttgttggatt

SEQ ID NO: 38072 - DNA, 6350 bp, Arabidopsis thaliana landsberg
tagggctgaatgttggtgatcttactgtgcaatttgatatgaacaagttggttaagaagccgattatagaaggtaaaacgtttctgatagattctttcgcaccaatagcttcaaaaagtatttcagagatagagactggtattatcaatagaggatatcgcagaattggacaacaaagctgctagatgaaacccaacatgtgatgcaactaatagtccaagaagatcttccatctacgaccccaaaactgatttctaacgccgataggggtctagataaagcccctaagattgagctaaagccacttcttttagggctaacgtacgaatttcttggtaaaaaatcttcctaccctgtttttgttaatgcctctttaagtcacgcagaactcaccctattgctaagcaagctgcgcatatatcgcaaagctcttggcaactctcttgatgatattacaggtatgcatagaatctatctcgaggatgagactaagtcttcagttgagcattagagaagactaaatccgaatatgaaagaagtggttaagaaagagattatgaaactgttggaagcagggattatctatccgatttcagatagcagttgggttagtccagttcatgtggttcctaagaagggaggtgttacagtagtcaagaatgagaaagaggagttgattcttactcggacaatcacaggacatcggatgtgcatctattacagaaagctgaatgctgctaccaggaaagaccatttccccttaccatttatcgatcagatgttggagaggttagcaaatcataagtactattgcttccttgatggatactcaggattctttcagatcccgattcatccagatgacaaggagaaaacgactttcacctgcccctatggtacatttgcttatcggagaatgcccttcggtctttgtaatgctcctacgacattttagagaggtatgatgtctatcttcacagagatgattgaggatatcatggaggttttcatggatgatttttcagtttatggatcatcgtttgaggattgtagagaatctctgcaaagtgttagcgagatgtgaggagaaacatttagttttgaattgggagaaatgtcacttcatggtacaggatggaatagttctcggacacaggatttctgagcatggtatagaagttgatagagctaagattgaggtcatgacaagtcttcaagcgcctgataatgttaaagcagtgaggagtttccttggacatgttggtttctacaggagattcatcaaatacttcatcagaatcgcaagaccattgactgctttactttgtaaagaagttaaatttgagtttacacaagagtgtcatgatgcctttaagcagataaaacaagccttgatcagccaccagattgggatttaccttttaaggtaatgtgtgatgcgagtgattttgcagttggagctgttttaggacagaggaaggataataagcttcatgccatctactatgcaagtagaactcttgatgatgtccaaaggaattatgcaactatagaggacttgttagctgtggtgtttgctttcgagaaattcagatcttatatcgttggatccaaggtcattgttcacacagatcatgctgccttgaagtatttgatgcaaaagaaggatgctaagccaagacttttgagatggattttgcttcttcaagaatttgacatagaggttagagataagaaaggagttaagaatggtgtagctgatcatttgtcacgcattaggattgacgatgacgtccctataaacgatttcttgcctgaaaagaacatatacatgattgatacatctgaagaagatgactgcaaacatgataggttgcagaatcgagcttcactatcgatcgacactcccattatgttgatcgacactcacatttcagaggaagtagacagtcaaagttgtgcgatggtgtcgatcgataccattgcacttgtcgatcgacacccttctaaatagacaagaaattggtcaccaactgagaattgcgccgtcacagcggtcgagaaggattacctgtggtatgctaatattgttaattacgtagctgcaaatgtggaacctgataatttcacagattacaacaagaagtgattcctaagagagattagacgatattattgggatgaactttatcataggtaattagcgacaacataaaaggtagcttagtagtcgctgaatcaaataacatgactatttggcgactaaaacacgtagtcggtaatccatgcgtcgctaaattaattagtcgccaaatcgtgcgactgttaggcgacattattgccactatatagtgacactttggcgactctttagtgactgatatatcgactgttttgccactacatggcaactgttttgtttaagtattggtgacttaattgaaacaatctgacgattgattacaggtgtaattatctattttacattctattttatgaaatactaatgttaagaaattgtatttaacaaacaaagttgtatttaacaaacaagctttatttaacatacaaagaaccttgattcaaacacacaacattcctcaaacacattcacaacataataatattcaagctaaacacaacataattcaagtttgtaagtttgataagaaaagaaactaaaagaaggggaaaatagatgttcactcctggggtggatcttgtgaagcagtagcagtttggacatcctctgtttgatcttctaaagcagaagcagtagcaccagcagactcgaggaatgcgagaaacttggggtctctttctgtcaagtacttcttaaccatcctcaagtgtttgatctcttcttgttgctcattagcatcacgcttgatatctgcttgctcagctttcacccgcaatgcctctgcctcacgatgtgcctggagagtcgcttgttcttctatcttgcagttggcttcctcaagctgtgactgcaaggtagtgaaagcagaactgcagcctgggtacttccgctttccattgatgtacctccctaagcttctcattctaaagtatacccatctctcgtttgtgacagttgactgcaaacaaaagacaagaggattattgtagaaaagatgaagcaagtgataatataaaaaaaagacaagaggatcaagaccattacctgaaggaagacctcatcatcctcctcttgagatagttctaatcgacgggaagtaccatcagacccttcatcattctcacgggcagccaacttagcttccttgttcttcaaatatgcctcatgaatttcctgcgccttcttatcaacaaaagtcccatcttttttggtatgagtcttaacgaatacctcaccaatagtaggtggtcttcctagctcaattttctgaaatgttgttcacaaaacaattcagactcttaataaaaatcattcattaaataaataaatgtaacttaccatctcttgctcaatctgtaagaaagactttggccccgatacatgtttgtgaggaccaagaccattacggtcagacattcgagctactgatgtggttgaacttctggcaatggcttcttctgtgtctcaatacgcacacatttccttccacaatgtcttctcaatccatggcggtcgctcattggcacgtcttgcgcaagccttagaaaccatgtccttcatacgcgtttgacatattttaaagaactattattcaactacaccggtcactgatggatgccatgtgtgtgtactctacaaaacaagaggagagtttgatgttagtgatcaaacaaccaaaccaaaccaaatgtaagagattaataggagatagaagttactttattgcgaattcgaggaagtatatgtgtcttctttcagtaggtacacagctccaactgtaaaatggcccattaaacttgtttgtgaagacctttgtgatcttccgggtcagcttaccattgtcgtgaccaaacctacaagtacataaaccaattagcatatacaaacctaatcaacttagcatatatacacacattactcaatattaacgcttaacctaatcaacttattaaatatattacacacctaatcaactttgaggatacacacacacattactcaatattaactcttattctaatcaacttattaaacacctaatcaacttaataaactaagcttaccatagggtttcacacacttaacacacacatattacacacctaatcaacttagcaactctccctaatattctcagcttaccatacggttagaggctcaaatgtgggagagatgaccgttgtatacttctcacggcctagctgggcaagcatgtcatgtagatttgcaagcaaagcttcagggagagttgattccctttcaaaatcagcctcaaactcagcatcatcatcttcatcttcctccgcgtgtgagttttgagcttgagagctgtgatgtgatacaaagactcgaggtggaggatttgaggcttcctgaagtagaggattggatgcttctcgttgaaccgccgctggagactgattggaggcttcaggttgaactgcctctggagattgtttcaacgtggaggctagatgatgaatagatcctcgagatctaggttgagtcgagccggatgctcgaaacagagtcgatccagatctgcgaggagaaggagatccccgaagagatctatatccacaaggagatccttcgcctgactggaaagttgcgtcagaggaggatagtccctcacggtttgacttgttggaggatgtgcaatcggatctcgttcagaatcttgaagcaggacttgacgattcgccggcgtgaactcgtactggctgggaagccccctggaccgtcgattcaactccgtgctcttcatttcaactcgatttggtgggaaaaagtgggtctatttgggggaatcttctatacccttccttttcctctcttgcctccaccacgagtcttcatcacttgaagctaagaaacaagagattgagaagattgaagatgcattgatgcataattgggatcaaaaagggattagggttaggttagggttcgtcgagagtgagagagtgaagagaaggggattagggcgataaaatcgttaatatagtctgggtaatgggctctcgttactggatcagtactggatcaagccggtaaaagcccaattaattgcccaaatagaatatatgagtcgctaaatggtagctgtacttggcgatctattagcgaataaattaattagtctcacattcaagactgattagcgactaatgtataatatagactaatttgtcgctaataaatcacaatctagttgccaaaactagcgactacataatcaatttagtctttaatacagtgttttcatgtagtaggccccagtttaagacaatcaatgctatcaagaacaaggacaaaaacactttggttctcaaagactttagaacaagttactacaatttttctcttcatattagattcgccacaacagaggatctttaaatacacaagaatataaactaactactaattaaagaacatgaaacatgggaaagaaaacacatttcggcaaactaattaaaataactaaaactcttggccacgtcatcttcttcctcaagttgcatctcatcattctcaagaaggtagaagcaaaatcacttttaatttactagaaagccttagggcaaggttacacacaaggtcacaaacaaagaagcaaaaataagaaagaacgaagacaagcaagttgatcgacgcaggacctaagaagtatttaagactaatcctagattcactacccagatattcacaaagtgagtgaacgtggaaagagaaagtacacgaagccaacgcctgccacaaagtggtgcattgagatagtcttactttgcgagaggagcatggagcccaatcacatgtttcctataagatatttgaatttttttcaacattttaatcatccatgcatacaaatgcgcttaaagagtttactgatggctattgtaaagatttttttagttgctacgttgtaccttgatacaaaagtattacccgtcgtttttggaaacgttccaggataatccatttttatacaatatcttaattggttttatacttaaaccatggaaaaatctcttagtatatcctatgattatgtaacgatgtcaataaaagatgatcatactccctaaagatactcccactgggtcgtgcaaagaaatatagtaactatgcatggccgcatgggtatgtgcatacccacgaatggtgacaaaagtaatggtatgctgaagtcttttatact

SEQ ID NO: 38073 - DNA, 7526 bp, Arabidopsis thaliana landsberg
agaagaagggagctacatcaacaatcaaggtggctacaaagggtacaacaactttaagatgaacaaccccaacctctcttaccgcagcaccaacgttgttaatcctcaggatcaagtgtttcctccacaacaacaacaaggtcagaacaaaacttttgttccctacaatcaaagttatgttcccaaggagcaatttcaagggaactaccagcagcaaccaccacctgggtttgcacctcagcaaaaccaaggtcctgctgtacctgatgctgaaataaaacagatcgtacaacagctgctacagggacaagcatctagctccatggaaattgctaagaagttatccgaattacaccagaagatggacaacagctacaatgacctgaatgccaaagtggaggcgttgaattccaaagtcagatacttagaagcataatccgcatctacatctgctcccaaagttacgggacttccagggaagtcaattagaatcccaaggagtatgctaatgttcatgctatcaacataaggagtggaagtgagttatccactagagagagacccaagtcagtcactaaggacagtgcataccaagatggggaggatttcagtctcaataaagatcaagttgaccagtcactcgagcagccactcaactagtcacttgagcagccactcgagcagccactcgacctctcactcgagcagccactcgaccagtcactcgagctcccacttgaccactttactcgaccgaccttcccagcaacatcacaaactgctctgaaaccagttgctgtcaaaaacaaataaaaagttttcattcttcatccttacaagcccccacttccatttcctggtcgacacaagaaagaattagaagataagtacagagctatgtttgccaagaacataaaacaagttgaaggcaggatacctcttgttgatgctctcacgcgtatcccggattcccaaaaattcctgaaagacttgatcatggagagaattcaagaagttcagtaaacaacaattatgagccatgagtgcaatgccatcatacatgagaaagatgaaccagagaagctaggagaccctggttcattcactctaccattctccctaggttcattgacattcaataaatgcctttgtgacctaggagcatcagcaagtctaatgccactctcagtagctaagaggttgggttttaacaaatataaatattgcaatatctccttgattttggctgatgggtctgttagacaaccgcatgggttattagaagatttgcctatcaagattggaaatgtggaggtgcctacagacttcatagtgttgaacatggatgttgaaccaaaagatcccttgatcttaggaaggccctttttggctacatctggagcaatcatagatgttaagcaaggaaagattgatcttaatatggggaaggattttaaaatgaagtttgacatcaatgatgctatgaagaagccgacaatagaaggacagaccttcttagttgaggaaaaggatctgctagttgatgaacttctagtggaacttaaagaagcaaataactcaaaaactgttttgaccaagagtggtaaagctgggtatctccctagtgaaactttgagttctgagaagtcattagactcacacaaggcaacagttggctcaaaggtttacaagggcttgatggggtctgacacaaaggttatgaaagctaatgaagtaagttcaacacatgctcgaccaactgattccaccaacaactcgaagaagcctccaacttgccatgaaagctcatgctcgaccaaacaactcatggcaagcactcaaacgtcagatgattggttagaactcaaggagagatctaaatggcaggacaaagccatacaagagctaacacatattgtgaaaaagctgaaggatcaaaacaaggagctcaatggaaaagccaaccaagtaccactcaatatcaaggacgcccttgacgatggagccactattcttgtcagcaaagaaggatgtgaattcacatcggaatggtgtagaggagaagactatcttgatattgaaagaagctcactatgaggacatggcctctgagtacccaattgcagacctgtcaagaaaccctaatgagtatgatgatcactctactcaagaaggagaggagaccacatttcctctctgcaacccaccctgagcctaatgagtatgagaagtcaagcttagagacttaaaacaagctcacttgggaggaaatcccatgtctatctttgtacatatctttatttttccttgttgattttgatgcatttggttagtgtcttcaggagataagtataaagagccgagtgaaatggattctgactctgcgagtaaagcagtatactcgaccataaagcaatgaaaaatactagaccatgttttagcttatccacgccaggaggtcactcgaccgtggtgctggccgcagcagaagaagagaggtcgagtatcctcaagcggtgctggccgccacagagctgatgagatcgagtacccacatgctagagctgatacagaacagggcgattcttctatggcctcagagcaatcacatgcaaccattgacgaccaacttcgttcattcttcgactgaggtaagcgcctcacttctccattgtattatatcatctcttgtgatttgttctttattttgtttctgtgatttgatttgtcctgagtactctcttccaagtttagtcacacagtgaactgtgtgatttaagtttgggggagggttcaggaagtgtgtgttgcattcttattcattttgatcactcttgttaatccaagtaactgactctccttattagatcagttaacccgaacccaaacataaactttctttcaagccctatatcacttgtgagtgtttgtgaggttttattccgatttagattggtagaaagtgttaggtttgtaacgacagagatagtgtctcatgtagttctacttcgcattttctggactagataggactaggtgggcgcttatactttgggttgggatgtgtctaaaaaaaaaaagggttgattcattgataaaaaaggtaaaagactctaggtgaagtagctaatgaagcagaaaaagtctagtaaacgttttgtgatttgtaaagaaaagaaaagggttcttgttagctaatgaagaagggcaaaagccctcggttttaaaaatttaaaacaggaacattagttgttaaagaaattaaaatccgctagatgtatcaaagtgttgagaaagcttctcctacagttaagagaaaagaaaagaatgattggaaaaagggtttagaagatttatcaatgcaaagggtacagataagttcttaatttgggactggagatgggattaccattagagcttcattggttatactctgggtagatgggatcttatctctgtatgcatagcttgggacttacctttagcattctactaaagcttaatcatttttgagagatcccctgttactaaagcctattctgcaagggaccatctttgtctcttgacctataccttagccaaatgagttaattgatgatgcattccttgattcacgttccagaactaatgaatgttaaagggattggtagatttgaaaacatgtataggtcaagcataagaggcggattgattaataataaggcatggctaacgtttttgagtagaattcaatcatatcgcagcttagaactttcaacttggacattgatttcatctggtttatctagtgctttggctctgagtccctgctttcaaacctcacctcaagcttgttcttaattgtttgcttgagggcaagcaaagactaagtttgggggagttgataactgtgtattttgcatgtttagagcatccatttgtcatcactttagcatcatatcatcagtgttttataccatttctcatcatttgtcatcactttgcatgtttaggatagttttgcatgcatgttgcatatttgtgttgtattgaggtgactcggagctgttgacgagctaattggaacaagcggacccgatcatgccaaaccactcgaccccaggtcgagtagacgcttcacaacctcaacagaccactcgaccccctggtcgagtagaggacatcaccatttcacctcatcactcggccctgaggtgatgtgttttcacctccaccacctgaccatcactcgatctcatcactcgaccccgaggtcgagtgtcttcacctccaccacctgaccgtcactcgatctcatcactcaacccctaggtcgagtgtcttcacctccaccacctgaccatcactcgatcacgtcactccacctagaagtcgtgtatctccatcaccaccactcgactacatactcgatggcgagctccagagtcttctccattccgcactcaactataccctcgagcacaaggaagaaaagaagactccagctattcaatcgacctctcactcgaccaccttggtcgagtactgttcttaatccgtctcaatactgcgtcgttttaagtattagggtttctgaatattttgctataagtagcatgcactttacattttcgaggacaagtttttatctaggttttattccgtagacattgtgttcttgaccttttgtaatccggctttctctttatctattcagtattcagtattcagcttttgttcttgatttcgtttattgtttttcatcctgttatcattctgctattacattgttgttatcatgttttcatcctgttcaacgtttatgttttctgttatgatgtctgagtagtgaataggtttctgaggatgggttagagtagtgtagaattctcagtatgctaggtgattgagtatcgatatatagatcccttctagattagtttttcttaatgcctattgctttctgataaacttgaatttgagcccagacatttctgcgcccaaaaggtgttcgatgaaatgtcagaaccactagttccagagattcgtggccatgtaccaaggtaatggttgcagggagcattttggctttaacttgttgattcgtaatgcatgttaggttagctctcgtcaatggtgattgagtctgggactaggttaacttgagggtctctgttgtggtggcacttagatttggttaatgaacttgttatctagggataatttattgagcatgtcaatcacctgtaaactgagaaaatgaaacttttcaattacccccatcctcgggaattctttatctgattgattttattgtttactctactatcgtttactacatcttgttacctattgcttagtttttgcatttctctgctgttactcgaccacccagttgcctggcaacagactgtgcagtcgagtatccctgttatattttctgtctcttactcgacctgtcactcgaccacacccagtgctctacaacgagctgtgttggtcgagtgttttactgtttctgcttgattttctgtttcctgcatgttcacttaggactgctagaacacaccaaaacctgttattgcttggcttgacttagtgacttctgatcacatcttgattgttagcatcacacccatttggattgacaacctaaaatactacaacgatatgattggtgttttaggataattgactaaaaacttattatcatataagaactaaaaccacaactggatcttaaaagcctaagtagtgttaccggttataagatacaaatccaaagactcatgtggactttggttacactattaaagctttaagaagcaagaagaagcttggttaatgttttggagtcaaatatgactagatgtcatatgtacgattaagtttaaaaactagaactgcaaccatatcttaaaagcctaagtaacgtttccttgttagaagatacaaagccaaagactcatatggctttcagctacaccattaaagatttgagaagcaagaagaagcttggttagtgtttaagagtcaaatatgacttgatgactgaaatatccctattttcactcattttatctatgttttcggtataggattttgagtctttatgttgtttctcgagtctttttagtgtcttttcaggtattctatgcaatgagacaacaatggagatgaggagacattttagatcaaaagataaggaaaagtaagctaaggacgattttggattcaggaatcagagagagtgttgatcgacacactcatggtgtagatcgacaccagtttcggcccagcaagtccatgccgttttttaagtttatagaagagaaaatttgcctcagaagacttccctatttgcatcattagtccctttacgttttatagggtttatatacattgttttagacccttgtttcgattatcaagttctttgcaaatccctattttcagagacataagctattcatccattctattcaaagattcattcagttttcaatacagtgaagagatcatttctttccctcatctttattgatgtgtttatgctttcatactcaattatgttattttcttcaatcaatatgtttgagtagtctgcttgtaggaatagggtttctcattagggattcatatggtttagtaatttttcccctttgctaggttatctgtagaattcttcatctttgattatgcttaatgctagatctagagtaattaactagatcttgaatccagacaatagatatgtccaccataggtatccgtagttggatctattatttgatgagcctggtttataggtgtgtaataaaaattggcctatctactaaggtgaacaatcgaactcgttaagaatgcatatttaggttaataatctctcgggttctccggttattcttagctataattatagggagttttgcggaacaccaccggttattccataattagagtttgagtttaagaatggttcgataacaacctagctttcattagatctactaaccaatagtttcatgagaataccctgttcctagctttttatttaatcgtttacaacgaaacaatctactgttttcttcctttgttttcttattatttcgatcatacccttctagcttaatcttgacattgaacttattgtttgaagaaaagaactttgtggaattcgatccttaaataccgcaatggatctcttatttgagagagtagttcttagggtaatttgaaccatatcaagatacacgctgaaggaatgaggatatgcgagacataccaagtagcttgtatgatagagaaacttcctccaggcttgaacgacttcaaaaattacctcaagctgaagagaaagaggatgagtctcaaagacctcattgttagactccacatcgagtcaacgaatagaaaataaatgggagttggtgtgcagattgttgaccccaatgcaaatgtggcagagcacaacacgccaaaagaaaagtggcagaacaaggtgaaagggaaggttggtccgcaaaaatactcaaaagttaaaaaaa

SEQ ID NO: 38074 - DNA, 3938 bp, Arabidopsis thaliana landsberg
  unsure (1)..(3938): unsure at all n locations
caaagtctttgacagtgaaaccaatcttctcaaacttcccttcttcattactctgtctgaacttcaggtactccgaacacttaaacgacttgtagcttctttgttttccctcacccacaatttcttgaggtgcaagtatcactttctcatcctcaaaacagagaaaaaacgccagagagactctgttcaccaactttctcaatacaactcgatgttcagatgatctcagccgtccattactccatgcttgcataaggtctccaatattaacaacaaggaaatcgttgcacgggtttatatcgatccatttcccttctttagacctcatctgaagcccaccaacggaatcttgatagactattgttatgcagctcatatcagtgtgcatcccgagaccttcaacgagctcttcttgcttctccacgtcgtgtggaggtgtgtagttcactagccttaagtatccatgacagttgctaaagtcagtttggtagagtctctttccggtttcatctcctaaagtcatcatcaagagaatctttatgagtcttttggacaattctgccattttagctccgtattcttgcattgtttctctgaacaaaaaaagaggagaggtaaaaggttcaagccaataaaaagatgtgaaacacacaatatgtaaaaagaaacactgatttgtgttgtaatgacaaccttaactctggtttatgatgatcttggaacaaaacatctgctgaagctttggcagaatcagagaaatcaggtccagagacaacaaggctttcgaaataaggagaggcgatgtaccgaggagtatatgaaatgggaccaagcttgagctttgattcaagaggagctttgaaaacatctctggacaaggaacaaattttgctgaacatctctttagagattccatgattggtgacatagaagaatccccactctttacaagcctcagagagagaagacagtatagaggactcaattggttgtgttaagtctaacacaggaagctgcagagaagaatgaagttcagacattatattatatatttagttgtctaaagagtttagaggttatgagtaggggcaagctatgctatggatagggatatatatatttaagacatgattaaaagaggctttagaaatgtttcagacaaatgcagtaacagtagaacccacatttttggttatcattatgtctgtattagaaaggattgtaaattgatgattagattgtgacatttttacaattaggcataaacatcaaacttattgcaaaaaagttgtgaggattcatggaaactttattattcatacaaacatatataagatttatcttgtaactctgcatatcatatattatgtccaaatgcatcctgcaggacctccacagtaaatagctcttaaccaaggatccttatcatcatgaacatatgtgactttgtaacatttttttgcagttgagaatgagatttttatttttaatgtactttaaggtgagttagctatcaatctatgctcaataaactatagaaatttgtgctgaaagttgtgaatttctaatactttattattatttattagagcgcaagtaatgcttagatatatttcaaatctgttgatttttcctatagcctgtgtaaaattaaaatcttatgatattgttactctttatctcgtagatcaattaccctatgcaccctccaggacctccaaagtaaacagattttaaccaaggtttatcaacatcatgaacatatctggctttgtaacagattggtctgctctcatgtaccttcactgtcccgcgtcctggattataaactttcccgtgaccatcgaagagtttgaggccactaataaaagcagctttatgaaagccctcactaggccaatgaccacttcccataggtggactcttctctctgatagggctatacacttgccctccccaagatgcataatttnnnnnnnnnnnnnnnnnnnaggacttgaacaatgatgctggccagtatccaataatctcctctttaaatacaaaccaccaatttcccgtgccactatcctgttcccaattttgaaatatgaattcaaatgactttaagagaagtgataaaaagttgagtagactttacctgaaacaagcctaaacgcaattcatattgtcgaccattatagatggaaaatggttgaagaacggcaccaactggtatagtcttgctaacttgcacaaatccaggacatgacatgccgtagcagccgccagtactgcttccatgtaactattaacacaattataaggaaacatatacataaagaacttataagacacagacaagttgataaagaaactattggtgtaagctcttactagtataattcaaaacttacagtccagtaggcgtataaacgaacatgatcaccatggtgcatcgatggattcacctgttgtatatacatatttcaaacttttgtcaactttaaattcatgcaacttacagttgacgaacatggtcacttttgctaaggaaccagaattaacttacaatccatccaactgaaatgctggcgaaatcttcttcaataggccccccactaactgccatgtatccaatactaacttgatcttgcaagatttttggtttccatatgttaatgtttcctgcaactccagcaaaagggttcggtccataatcagctcttgcatcctaatatccataaagaagaaagaaactcagaaaatgaaagtggaaaacaaaaatggtggttgctatatatactatcaacttataagggttcttacgtagaattttccattaaaattcatgttgtttgtctctgtgagaaaaggtctcgggccctcgaatcccatggatttcaaacgttgtgcatgcataagatcttgcattgtagtcctttttacaattactgtgccatctggacagcttataccttcttgcaaaagactaaaactctctgaaatgttgtttccagtgatatattcaggtactgttgttggccttagctgcatatacaaagtcagtcattctctaaggagaggcatcttttaattgaaaagacagtagataaagagagaattaaatatgtataaaatcaaacctgaacagagtggttttttagtaggtgatgatcaaatgctagttgtttgtgaatatcgatacaatcgaatatatcaccatgttcagtctgttcataagaaaaaaaagttagatatgaaacaatataagcatggaagaagaaggaaggctaaaccaaccttgaaactcttgattgcaggcttgttgatagctttgagttgtctcttcatttcattcctttctgcctttgatggtattgctcggcgttccttagttgcttcagcggatagaataagagtgattattaacagaagcagtaacacaaagtggttgaaggaagccattgatactatgaaagaggctcttatctttattctttcttctacaaacaagaaatgaatcaaaatgatttatttataatgtagaaaatcacatgaaaactaatttcattgacacaattagttcatgcatttttgtatcatttattatctttcattcaaataaaaagaatatggactaatgaccttgactgacaaataattaacaaaataacatttgaccaaaatagtttccatttgttacagatcttctgtgactttttggtctatattaccattttgcttacttcttctttttgtgtttcttttttccttcttcgtcaccaaactttagccagaactctttctcattgaatttctcttctgtctttgccagaactcatgccagattcattacccagtctcctttttctttctcattctctctctataaagtcctaattaccaccagatttatttttcttaatatatcaataaaggtaactaggttttaattt

SEQ ID NO: 38075 - DNA, 2993 bp, Arabidopsis thaliana landsberg
ccaaaaatgctgttaatttggacggttgagatgcatgtaggcaagggttagccttttgcatcgttgggtcagtgtgacgtcatttaactaaccaggttttttgtattaatgtatttccttaatttttcgaagctatttgttttttttgtaccatagaattatcaccgtcgatctttctgaagatatgtattgtcgtctaggactgaaatcggacggttgagaattaaggtaatttgtttcaaaaatatttgacaaatatatgatagtaataaaaaaatgtacacttctgatgtacattttaccaatcagttgattatttcgtttctttagtttgatacagtttaatatcttcgaataatttagcttatgatttattataaaaaaaaacttttacaattttttttttattttttggaaagaatcccgggggtgtgagactagaatttgactcatttgttgtttgatttaataacagctcccctaggaattaaaaaaaaaatgttctcgaagaaagtcgaattttactgattgatcgtggaagaaataacgacaggtaaacaaacagaaaaaaaaaggaggaaacattttacgagtgaaaaacagtttcttttcactcaactgtaacaaaataaagattcaagatttgtgtttgaaaaaaaaaactcaagatttgcaacattagattccattgaaacgtttactcaaaattcccatagacgatttcgaaaaccaagcttggaacaaacataaacatctattgacgcctgaagaatttgatcgtagctaaggtcgtaaacgctccaatcgctcatgcctatcgccttctctagccttactcctctataacccaaacattctccaacaaccacctcaaacgaacgacccttcaagccccttcctctcgaatctacaacgtgattcctcaaatccaaaagctctgcaatctccaaccgatgtctagatctctttagctttcccgcatcttgactattccaaaaacccacgaaggtgtgatttcgatccccgagaaacctacggaggactctagggacgcggtcacagtgagaaagctggatgatgatacatcgattgccaacgcatagctgcagtgtatccgccggaggatcgtagtaaccaccagatgaagaatcggagtaataactaaccggtggagaatcggagttttaaccaggcggtgtccattgcacgccgactccgacaacgagagggtgagaggagaagcggttgttggagagaacgtcgtgtatccattggccgatgacggaaggatccgaagttacggtgacggttaactcttctccaaagaaattgacagagaactttccctgagtggcataacttccgattgttctgattctcggagccattgattttacgtttactttggagaaccagagcatagaaagataatgattctgcttgtatcgtcgaaggctacttaaagtgtagtactggtgctcagtgctctttgtcaccgtttgatctttgtgaaaataaatgcggttaaatttggacggttaagatgcatgtaggcaaaggttagcctttcgcatcgttgggtcagtctatcgtgacatcgtgcatagtaattcgacgtcacaaactcacaattactgattcgttaacctcaaacctaaataattactgattcgtattcagaaagattttataaaaaacttgaaatttgggaattaaggaggatgaataatttcagtattagttaatattagtatcatcctgtatcaagattaggattgaaaaactcaacatagcaagcattagatccaaattaaagtaggaaacatatttagcacagcactatgcgtttgtaagttcgtttccttattttgataaaatttagcttatgataaaataaaataatacttgtattttacaaaatactcatggaagaaataaactactagtttttaaaaaaagaagggaaatttcactcacaagtccacaacgaacaaacgagataagatttatttctctaataagtaataacaaaccaaaaaaggaaaagattcaaacatttgcaacattagattctaattgaaacgtttaccgattcttttcttcccacagatggtctagaatagcaaggctgcaacacgcataaacatctatcgacgcctgaagaatctgatcgtagctaaggttgtaaacgcgccaatcgctcatgcttacctctcgatctagcctcactcctggataacctaaattttcctcaacaatcttctcaagcgaataattatacatcgatctccttccactcgaatctgaaacgaacttccttaaatccaaaagcaccgcaatctccaactcatgtttagatcgtttaagctttcccgcatcttgactattccaaataccgacgaaagtgtaatcgcgatccgccaggtaattacggaggacctgcgggactcgttcacagtgagaaagctggatgatgatacatcgattaccaacgcattgttgtagagtatccgccggaggatcgaagcgacgacgaacccgtggagagtcggaacgataacgaacctgtggagaatcagaacaataactaaccggtggagaatcggagcgataactaactggaggagaataggagcgataactaaccggaggagaatcggagcgataacgaaccggtgaagaagcagagtaataactagagggtgtccactgaacgccgactccaacaacgagagggtgggaagagaagcggttgtgggataggacgtcgtgaatccattggccgataacggatggatccggcgttacgatgccgataaactcttctccaaagaaatcgactaggtacctttgctgagtagcgtaagttccgatggttctgatagtcggagccattgattttgcattcactttttgaaggaaagaaaatgatgaaactgctttcttctacttttgctatcgtcggaggtgcttaaattgtagtactggtgctc

SEQ ID NO: 38076 - DNA, 2028 bp, Arabidopsis thaliana landsberg
agtctcttgagtgagcgtaagtatactctgaattgttcctcctcttcttctttccccttctaggtggtgctggctgctaatgagctgccatctatcaatgacataacatataccgagcttacagaaatcttgtcacaggtgaataagtgatgaatgagtaattcgtgatatacacagcttttaaaagcgaatctaattttttagtctgaatttacagttgaaggatgaaaatggccaattgctaggtgttgatacttcgaagcttctgattgcaaattcggggaatgacttaccagtaagccattagaagctccctgaaagatatatagatggttttatacttttattcattggattcttactttttttctccctcccaaaaatctgttttaggttatcgatctctcaagagtatcacaggagcttgcttacctttcatctgatgccgacttagtcatcgtagaaggcatggtaagtcccatttatagtttgaaagtgaaacgcgagttaactatgtaactagtcttggttttgttagctgacttcttggctgttctaatcagggtcgtggaattgagtcaaacctttatgctcagttcaagtgtgattctctcaagattggaatggtagtagtttcaatgtcacgttactctctttttttcctccctagattaatgaaaagaaatgttgtgtgcatattgcttatttctgatttctgatttctcatattctccatccttttgttatgcaggtgaagcatcttgaagtagcagagtttctcggaggacggctctatgactgtgtcttcaaatacaatgaagttcagatttaattatatttcacacacatttttactaaaccagccattcagtttattatattaaaaactgttaggctttgtaagttagagatccaatctctatctctgcattcagatgtaagaattgaaaactctttcgacattctttatcaaacacacacaaaaagcaccaatctttctgattggaccttatctggtatttgaaagtttcatatttgtagagaacgtgatcttattgagagaggtagctctatggtcatgtttttttaggtttcttgaagctggatgagcatttggaggatgtgcagtcagaaaaatggtaagagaactcttaccatgttattttaaaatctcacattcatcaatacaatataatgtgcaatagaaatgcattgaaagaaagaaaaaaaggtaggatgcaggaacaaaggtatatctatcacttggtcttggtaggatatgaggccatcttgttgattccacagagtccctctggtttaccagtgtttctcttcatcctaataaaccctttctctccccatcttggtccccatgagttcttgacaataacatagtcagatccctttgatgaaccatatccaaccgctgctacaccgtggtctaggtctgttccacatttaccattaaacactccctgtaaacaaacaaaaatctccaaatcggtttttgagagaatgaaagattggatacatagaacacaatttcgatatcataatcatctgttatatacccctttgtagaactggaagtctcttcctgaagcctcaatagccacactgactggctgatgagctaaagccttcaccaggctttcgtcatcattttcagggacatcttcgtagccgctgattgtcacacgttccacatcctcctgtgtaaggttcatgattgatcagtgtttataaaaaatctgtttcccagtgttaagttttgattatgtttgtgtctagtgtttgttactttctgctcttgacaaattccttcctccatgagataagggtaatcatcttctttggggagaccaccggccgaaattatgtactggaatgcgtagtccctgagacctccattgcagccactgttgaaagttgtgtcacagtctatgagttcttgctctgaaagccaactcagattccctggtgtgatctggtgatcccctcgacgctgcaactggtgaaaatgcccac

SEQ ID NO: 38077 - DNA, 354 bp, Arabidopsis thaliana landsberg
atgcacctattaatgtgattagtacaattatatttagtatccttaatgaaggattatagtgcagatcgttgtcacctttagatctattatttagataactagaactacaataactataaaaaaatttttctaggtcactaaaatcattgtcaatcttaaacaatttttttttttttatcaaaaaatatagaataactattcttattactatccctaacaaaaaaggtgtcatccgatatgaaattgcgaatgtccttggagctaactaaaagatcaacattattggaataactagaagaataactagaacgctcatcccaaccataaaagtttttatccatatcatatataaaa

SEQ ID NO: 38078 - DNA, 2034 bp, Arabidopsis thaliana landsberg
  unsure (1)..(2034): unsure at all n locations
gaccatccagaactttcttgcttgaagaatccatccctctctgcgaaaaccactttctagtactgctcgaagaagaagaagtcgagtcaccggggctacaaggagaagtagttgtggttccattaacgatggaccaaacacaagcattctcggagttgtagttcatgaaagaggctacgaatggtccctgtgaccagtttgtctttaccagccctcccctcgtggcccaatcgtctgcgttccatagacttccatacattctcatgggttggttctttggataagccacacccaatacttccaagttcttgaattctctgattggcttcccatcaatatagaacctattaggaaattaaaaatatgaaccaagatattgttcaatgagatattataatgttgtgattagcttttgtcacctcttatatttattaaccatatcattcatagtataattaaaaatgagttgaaaatatataaaggtagcaacaaaatttatagtaagatgaaatatatatttaacgtcatggatctagtgatttaagatttttgatttggcaaattaatccaaaaaccaaaccggttcactttcagttcgatgtctaaaaaaatcactttgtgaactatcatttggattgtggtatatatgcttacactatgtgactcggattagttgcgagaacgcggctgttggatcgaaccaaaggtagaattgctgctctctatcacccttgccttgagtgtaaacattagtgtgaacaatgtatggatctccactaacattccccaaaaactcgaaatctatctcgtcccatgttaatccttgagacttcaactacacaccaaaagccctcaaaatgtatcatacaatataacatacggtaacagatttatatgtatgtctagctaattaagaagggcttacgtagaaggtggtcacggtcccggctgaatttcccgggacaagtttgatctgcatatcaacttttccgtacaaatactcggctttcgattgaaaccctgaacccgaagattgatcaagaccgagatttagaagagtaccattgttcaaaatatttcctctaccatcaccccaggttatgtcaatgtcttggttgaaatctttaccgtgtacaacaagcaatatgcttaaaccaagaaagagagatattgacataaccaaaagtgtactagaaaccattataagttttgaaggttttaggtgggtttaagggtttgaattgggtttgagacatttagaaggctattgattggtgagtatttatagagcatatataatggagttttgattccttaatgattagttatatattgttaatatttcagtctttgagctttactttaattttctttaagaaaaaaggtgagtttagtgtgggtaatgtgaaaaacgaaacagcctggagagcatacacatcaaaactatagtgcgatacatcataaacattaaattaactattgttaatgtgttacatcctaagcttagccagcctaatttaaacatctcactttttatatatatagtggagtttgtaaaatttcaactttttggacggtaccatttcatcataaatcttttaaaattaatgtgattggcctttacctcttgattgcgtagacagactaattggatataatatgatttataaatggttaacaatcaaataataattttgaattgatgtaacgagtaacaaattaaaaggattggtcatcgattaatatgctctcttcttatctcattgttttgtttctctcggagttgtcaatttacacagcacaaacaaaagtcttgaaattctctacaactactgttacgttttttttccggcgagctgagctgaacgcaaataatctccctcttctctactaatctcaccggaaacaaaaaaaaaactttctatcctcctccgacgtcgttagacacacaaacactcatacaatgatacaaactctcataccaactgaagtgtgactaatatgngcatcatcagccatcatggtcacccactt

SEQ ID NO: 38079 - DNA, 5062 bp, Arabidopsis thaliana landsberg
  unsure (1)..(5062): unsure at all n locations
gtcaagagagaatgagctttctgttgatactctcacctcaacgatactttcaacaaacttctggccaccaattcaggtattcatatgttcttccctctgattttgtatccattatgtcatacgtaaaatatgaggcgtatagattcttgtgatcgcttccattcgctgattagaagaggaatttcaggatgaacctctagagctacctggacctgtcgacaagctgctatcagattatgccaatcgatatcatgaaatcaagacccctcgtaaattactttggaagaaaaatcttggcactgtcaaggtacatctagaataaatacttataagtgaaagtttcatgttttcgagtattgggtaaatcagatactgacctatgcatctctctgaaatggcttggatggattcagttggagctgcaatttgaagacagagcaatgcagttcacagtctcacccacacatgcagccattattatgcaatttcaagaaaagaaaaggtaagtacaagaatcagtcaatatggatatttccatcttccaaattcactgaagttatgtaatctttcagttggacctataaagatcttgctgaagtcattgggatacccattgatgcattaaaccgaagagtaaacttctggataagcaaggtatataccgtaattgtagtctcctgctttaaaccagtcatttagatgaaaagcttatttgcaagtttttctgtacttagggagttctgagagaatctacaggagcaaactcaaattccagtgtgttaacgctcgttgaatccataactgattctggaaagaacgaaggcgaggagcttctaacaggtgaggaagagggtgaaacatcaattgcctctgtggaagatcagcttcgcaaagaaatgacgatatacgaggtatgtaaaatgcttgggaaactttttccttctccagagatatacaaatctaaacaattatcaaccatgttttcagaaattcatcatgggaatgctcacaaattttggtagcatggcactagaacgaatccataacactctcaaggtaacaatctgacatcaaacctcactgattttacaatattatttgtcttgatcattgatgattgctctgttttttttgttgttttgttgtagatgttttgtgtggctgatccttcttatgacaagtcactgcaacagcttcagagctttctttctggtttggtttctgaagagaaactagagtttagagatggtatgtatttgctaaagaagtagatcaactctttacatgtgttagactagctagaactaattttgtctattgttgtatcaatatccttttcttttctcaattaaatctcatatagttagtgataaacaattactacttttctttttatttttctttgactccacaatcatttctttaaccacacaattatgtaataagagattggccatttctccattaaggtaaattatacaagttgtgatattctttagaggttcttaatgattttgagctttcttatcaatagcctacttaggtttaatgtataatgtatttgccagtttttattgaatttgatatactgtttaataataaaattatcgatttctcttttataaagagtatttgagaaaccctgataatagtattctgaaatccgcgagcaattagcgcagaaccgctacacattacttatgtaaataatttatcgcaattttggctcgtttgagtcctaaataatatctgatgacaaaaaaaaaaaaaaaaatctgcgggcaatagctgtaaactagcctaagttaaccgcgattctgcaggtaatgtagctcatttggttaacaaaaaatcacaacaatatgatatctaattgaaacaacccgacccattttttttaaaaaaaaaataattaaatattcccataaatatctaattaaaccaaccaataacataataattaaaccgcaagtcagaaatactattttatgaataaataaataattcgatcaacaaaaccaagaataactgacaatcctaaccgggttccaataaccaaaaacaccaaacataaaacaaacgagttcctagatcatcctctcttccttgccatgatttcacaatcacactttatctttacctgcatcaacaacacaatgaaatgcgtaagtattatcataaatacttagtgaggcgatcctcccatctacgagctatacacacaagcaaataaaaaggtataatcacgaatacaatacaaacaaaccagtcattgaacaattcacccaaaacacattcaccacacctacatatcatcacacaacccaatcgctcagataagctcatggtcacgcacttaccttaacaaattgattctaacatcaattaaacccaggagagactctttttgcgtttgaaacagttcagaaacgtcctgcaacaaatccacaaccaaaagcaaccttgaagcaaactggacaggaaaaaccagaaacaaaccgtctcaaagacgaaaccctaaaatacaagctaaccgttaactattcaatcgctccagtgaaaacctagctgcagacgtcaaaaagcttcccacaaaatcccgtgccgatcggaaaacagacgagaccacgatctcagtttcaatcttcgctggtcctaattcgcgtatgagaaaacgtgtctcacgaaactgcgaataactcaaccgattttaatccaaattcaattctgtaaactggagaataacgataaaggacttgggaataactataccaaatttcgttaccttttaccacgatttgatatgacgaaacggatttctcccaaaccctaacgattctgctccttctccttttctctctttttctcctttataaaacgaaaagtggctaactaaagccctaatttcgagtttccttcttttataggtacactttagggtttccaattaacccaaccaattaaaccggatgatttaaaaacaaaccctaaccgattttccggttcacgggcgttacaacgggtttacgtttttggcagaaaaatcacgggtttacgtttttggcgggaaaattacgggtttacattttttgcgggaaaattacgggtttacgtttttggcagaaaaattatggatttacgttattggcgggaaaatctcgggtttacgtttttggcgggaaaattacgggtttacgtttttggcgggaaaatcacgggtttacgtttttggcggaaaaatcacgggtttatgttttgtttgtggaaaaatcacgagtttactttttctcaatttcatcgcttgtatatttaagatatttggaaaaatattaattttattaaattggtttagatgtgttggttaaacttaaattgacattggtttagagattttagttggtttaattcaattttacaaaacttgatgggttaattgggtaaaccattgaaaccattaaccattacaacccaactcatttgactcatcaaaccaattgactcatcaactcatttgacccatcaactcatttgagtcaaaattttcaactcattagggttcatgggttgagttgagttgagttgacccatgaattttgacccattttgacactcctaaatattataaacgttttataaactttaaataattacaatatttaccttttaataaagtataatattaataatcatttaaataattatgtgtagctaattttaagggatttgatttaaagtttgttgtttggattaaatttgaatgaataatgtgattgatatattaaatcaagaattaaaaatcaaatcaaataattcaggaaaaaagaattaatgccaatggcatgtcattgtaaataagtgtcaagtagaggatttatttggtaaaatggttgcaaaaaagtatatatagatttagacaatgattcataaacatatcatagataataccagtgagttttttttatgggacgggttggcgggatgggtttggcaggacgttacttaataacaattctaaactataaaataaaaatattttatagatagttacataaattgttacaaattgtaaacttttatatatactaattttaaaatataaattgttctcgcggtataccgcgggtgaaaatctagtttattacaatttaagaaacgatattttatggtacagatgtaatttactaagatatgcttcttcttctttctgccaagaactatgatttgtacgttatttcaatattttgttaatatttcaatattattctttttgtttttgtttttgctaggcttgttctaaacttatcctttatgacctcatgggtcacagaaacatgttttctctgtgtgtcttggcttttaatatttaaagaggtttttccaaaatctttaaacaaaaccaattatatcttactcaaaactaaattagtttccttgccattgcccattgatagaatggtagagaagttgtaaatgaaaaaaagaactcggcagaatgattaagcgacaagagctagattcaactacaaaacccgcataaagaagcttttacattcataattgacatttatcttgcggaacaacggatacaattctatgaaaattcacaaaattattcatcctcgtcgacatgtttatctttctcattctcttcctcttcgtcatggtcgtcctcaggttgaaccaacttcaacctgagtcgaccatcttcgcggcttgcacgaaggaactctctccttggaatcctaacttcttccaacacaagcctcccttcttttctataagnnnnnnnnnnnnnnnnnnnnnnnnnnnnnnnnnnnnnnnnnngttccttccttcgtggttcccactcctcctcatcgttgcttccgttatctttacccttcacttcaatctcatcatcatcaccgtcaccatcaccgttgactttttcatcttccaagccgcaataactctctgaccctagaccttccgtacacagctgaagactgctgttctcggctgaggctttctcgtaagaagaatgggatgattctctgaaatgaagctcaccgaatatctctgt

SEQ ID NO: 38080 - DNA, 2447 bp, Arabidopsis thaliana landsberg
ttaaacctaaactatgatttttagagtaaccagtggtgtttcgcgaaactctctatacttagaattaagacaaccggagaagccaagaaatcttatactaaagcatgcattattatcaagaataattaattcacttattctctaaaccagaccccttctacgagcctacctgttctttcttaaatgcctaggctcatctatgatggatcaaatagcaagtacctatggtgggcatacctattatctaatatcatattctagttagctactctagaactaacattaaaaacaatcaagatgaagattcctacagataacctagcaagggggcaatctactaaatcatctataaccctaatgagaaaccctaaatctaacaagaaaactactcaaacatgataatagaaacacaaatcataatctgaatagtctgcattgatgaattaagaataatagtaaaggagttcagaatcctctctaaaaggatcagattcttctctcaaaatgtgtaacaaaaactcaaacaaaacttaggtctaacaataaccaaacaattaggtatattcgtgactaaaaacgtgcatggactactttgcaaataggaaagtcttcagggcttctcaaagacttggtagaaaacgtgaattcccttggcagcaataagagtgtcgatcgacaccagcttctgaaaaacgtccttcaagatctttattgctgaaaagcttccaaaattccttattgtgctccatagttcccagatgtgtgagtgtacctgaaatggctcaaaacgtacgaaaaaaaactagaaagactctaaaaaccattcggaaactgtgttagaaattagtaaaaaccgggacatatcaactcccccagacttagcttttgcttgccctaaagcaaaacaaaaggttgaatctgtgaaagaggtttgaaaaacatagaaactcccaatctctttggtttattaccttgatcatactcccaatctaatcaaatcctgaccaccatgtaattcttcgttagcccacacaacatcctagatttcatgccaaagcactcaactatatccattaggctatcatcgttgggtctcatcaatcaagtgaatgcttaagaaccttctagactcaatcatgtactataccatgataaatcgaccattcttatatatatatatatattttggtgttctttctctcccccagacttattctttatagagagtaaacaaaggggaactcgcattactagatttacatcctcaacatatttccaacctttgtaattgatcattcctaataatgtataataatagggtcatgggaaacattcctacccctatacactaccaaaaatcgtctcaatatctcattatatttttctttttataaggggagagtaacatattctttttatcacattggtctgttggtttgccatctagatttccattagtcggattgagtcgaacctgcagcattaatcaaccaggcaataatctaaagaatagagatcataattccaaacaaaattttgactcaataaaacgactcaaaaaaaagaaaaaaaagagtaagaataagactcaaaaagaaaaacatagttagtatctgcctcccccagacttaaacgacactgtccccagtggcactcaaatccagagtaagcgagaaaaataaaagaaaaacgaaaaataaaagaaaaagagaaagggagccatgccagtgggttgcctcccactaagcgcttgtttagagtcattagctttactttggtggagtttggggatcaggtggatcagatggaggaagtcaatacttcctagtagaacctcgcatcatccaaggtggcgtataaacagtcggtttgtgcggtctaccaaggaagtgaggaatatcagcatggcaggacaaatgtatgagtggtctactcctgttacctgaacaatcatcaaatgaaagaacaagccctcgacgagaaactcgtggcttgatgaactgtaaaacagtttttgaaatcttaaactcttattgatgaaatcagtaggttttggaggaggagatgagtacctttgccttttcggaggtgcatgtagtggtagagatgcattggtttttgtgacaacaggtcctagaatattagcactccatctgtgctgagacaaccattatctttgtcttgtcatcctgcttctctggagcatcatctcgtatcatagcactctgaagagggggtgacaacttctctatatcaaccggaggcaactgaagtagaatctcatccatgatacccatgcaaagcatctcaggaatctccttcttcgactgtcgaggcagaagaaaagtaacttgtggtgtgtaagcaataggcggagattcaaggaaaaaaaatggagcctgagtccagtgtcgatcgacactaggtgtgtgtcgaatgacaccagt

SEQ ID NO: 38081 - DNA, 2166 bp, Arabidopsis thaliana landsberg
aaaaatacctttttggacaatgggtaattttttttaaataattatgggttccctcctcgccggaaggaaattttcaaatttcaaaattacatcatacacaatttcaaattgataatattttcgttttgaaaaaacaaatactttacagtctctcacaattgaactacatactccatgcctttcaattaagaaagagtgaactacaagtgttagctaagtacacaaatatattaaagggagaaagagataaggcttgtgaaagttaatttatagaaaagaatagagaacaaatcatataatcggtacagtcgtttatttaacacaattaattctttttgtttcattattgtgtgttatgtagtcccgaggagttcaaccaccctttggctttttgtctacctcaattaaattaatcaataagttatgttttagctatatttatacataaattatgttttagttgagagttgttgagtagaaaaaaaaagaagagtaaaaagactaaaatattataaacgacttttaaaattttgtttttctttggacaaaataatttaggataatatgcatatgtacatatctaagaagtagtttattttacattagaagacgattaaactttactttagacaatggataatggataatatgacaaggaggtggctggaaagatatggtattggttcattttgacattaatatgaaacaaacttaattttgctacaactagtaagtaattacttgaaataattatgctttgatccatcaatatagaatctcctaattaagtttcttacgatgcatgcgtgtatgtaaatactagtattttatttatagcaattgtattattcttaggcttatttgactttcatttttaagtgaattttaatttccttcaagtattcaaacatttcaataattagcaaattataattcttttgtatgtgtaattgtttaatattttagctgttatagattcgtgaaaaatatttatatttggatccaatgaaacacttcgtagatattattttatattgttttttatattccaaaataccttatgattcaactttcgatataaatattgaaatgggaaaacgatcgtgcgccccattaatttaacctcggcgctcgaccctacacattaattataacgcttacttaaaaagacaaaatacaaaatgacaggtttttaaaaaattatcttaaccaattaatatttaaagccaatttttaacaaatttttctgtcaaatgacaataaaactgcaaaacaatatgtcatcaaaattttcccaagaaaacgtacgatgcatattgtatcctatttgtaatacgactttttttctgtcttaaatataattatgtcactctctcaagccttgagttgagggatttgtttttaatttttatttcttataaacactatacgtatacatgtaatgtgtatcacatatacatatgcttccacttatttttataagttagcttccattacatcttttctctttcttgcttagtatcattctatgtcgtgttcttttaattaaccttttgcaatttgtcttgtgtttctcacaacacaaaaacttgtaaaagtgttaaaaaatcaagatctgaaaaatcttatcaccgcttctaggtttttcagttttttttcttccttttcctgatctaaattaacttatatttcttagggtttcacttcttgaaacatttaatcagaattaattaacctctctagggctttcatggcgaatccatggtggacaggacaagtgaacctatccggcctcgaaacgacgccgcctggttcctctcagttaaagaaaccagatctccacatctccatgaacatggccatggactcaggtcacaataatcatcaccatcaccaagaagtcgataacaacaacaacgacgacgatagagacaacttgagtggagacgaccacgagccacgtgaaggagccgtagaagcccccacgcgccgtccacgtggacgtcctgctggttccaagaacaaaccaaagccaccgatcttcgtcactcgcgattctccaaatgctctcaagagccatgtcatggagatcgctagtgggactgacgtcatcgaaaccctagctacttttgctaggcggcgtcaacgtggcatctgcatcttgag

SEQ ID NO: 38082 - DNA, 3022 bp, Arabidopsis thaliana landsberg
cataaaaataattccttttttaaccttcgcatagagtcaaataggtatttataaaatgataggaaaaaaataggtgaatttgggttgggatttttttggatcttttatttttgattcggcgcgggtttggtttaaatattacaaggaatacctgacacgtgatatatatcctctctaactctcgataagccaaaccaaaaacgaaataagtaggcgaattcaaaatttaattaagtgcatacaatacatgtcctcaaaaatgaattaccaatgattataaaagagaaaaaaaatccctggtgggacccgtttagtgggaccgttaattaacggagttaggatcatattatccgttaaaagacagtgttagttctctctctctaatctataaatatcttcttcatcttcttcttcccccactctgctcttcttcctcttgttgctatcgtctctctctctcgagtcaaaattagggtttcgtttcactatccaggtatgtctctctctctctctctctctatcttacctttcttctctgtgtaatttgcttctgaaatttctaatttcgtggagaatcttcttcatcttaccatcggatctggtagctctcacttcgattcatttcaaatttggatttcaaatttcgttcttagagatgtataatcgtggaatttgtaatctatagcttaattacgttcaagtagattcgagatttgatgtgattttgaagaattgattagctgaaaatgtggagtgatctacgttgtctgtgatgatgatattgatggttttcttcttcttcggctttcttcggttctgcagagtgtatacaaaggttgttgtggagcttttatcagttcacagaaataagatggaggtatttggaaagtctcccatggttgtttcatctgccaatgttctttgcttgtctgcaattctgggtcgcgattgcgatggacacaaatgtgattgaatatgtgaaaatgaaaatgtttgtgggaatatgtatcgctgcaaactaactgggctaactcatgtctgcgacaagaactgtaaccagcgcattctctatgataaccatagctctttgtgccaagccagcgggaggattttccctctctcgtccgtcgaggagcaggcggttaaaggtgttcggaggaagcttgacaccgctgagagtcatccttctgagagctgttcgtttaagcgtcgtcgtcgtgatgctcagttccatgcttctcctttcgagaggtcttttactgctgtgagccctatctgcagcccggctggagacggaatggagttggtttagattccatgttgatctccgcaaatcctgagactgagaggcctctttatcttacgtagaataacttcccttttctctttcttttggacaactatggatatgagacattgtgctattgctctcgcagggaggtctaggcatatcctccctgccttaaagagagcttttatcttagtaatgttgaactttatgtagtacttatgtaggagagactctataattctaatgctttattctggatcttactgctgtcgtatttaggtgatggttgatatctcttcttgtccacctttagttttttcttgtgattggacacgatatttaggcaggctttaattaacctatgaatctggttttggctactataacccaaagcctgacacaccatggttgatttctgtaagtgtggtgctacagggttttacacattgctaaccaattcccttgatcctttctgatcgaaacctaattctaacaaattatgtgtttatttccagctttccatttccttgattgatgagtatttggggttctgaaattgttttctgtttgtgcaggtttcaaatgttgcaattcaggagagtttaattgtgtttcttttatgtgtactgatttgtctgtttgaattttctttatcaaaggagtaaatctaactgatggaagtttaaaccttactttgtagagtcctcttgtgtttgtgctcagcaggaaacaacaatcatggtgtgattcattgtcattggcaacataagctgttactccttaactgtgagaagaaggcgggcattgaataggtatgaactacccaaagaggatgcggttggccaactgtgttcaaaactatcaacgaaacatggtaattatgtgtattgatgatcaaagaattgttaccgttagttacccttcgtttttcatttacctgtgggctctgcttctgtaccaatacctggctatatctgaggttctgatatttttccaatatctatgaccaggtacaatctctttaagtttctgatgaagacaacttccatgagtcccatctaaatcgcagtcttggtaagtcatagcgtacttacaaccttcttgttcctaactgcttgttatagtcctaggctacagccttacaacatcccctactctgaagtatatttacaatggtgatctaaattaactcaacaataaaaaaaactattaatcgtcatatagaaaataatctccaggtttgcttcataagtagaactgagaatggaaatgttgcttcaagttgttgtttttcagcgtggatttaatgcaatagtttagctgacagaaaggtgaatgtctaggcattcgatggtttcctgggatcgttgaagattctcttctgaagaagttggcaaagtataaatgttgactctgccgctacgataagataacggtacgggaatatttctccctaatagctaatgaaaataacaatcactattttactttttgtttttgttgattttttctaatttctactatacaaatttgattaccaggaaaatattttatttttattttttatcatttggtttttttttaccaaagatatatttggttactttattcaactcaattgtcaaggaacctggatctagtgtaaattctcttacatgagacatcacttcattagttctataataatataataaaccgatgaaaagatggggaagtaaggcaaagaattgc

SEQ ID NO: 38083 - DNA, 4682 bp, Arabidopsis thaliana landsberg
  unsure (1)..(4682): unsure at all n locations
acaaatagaagtctacttccgtctcatcttctggggattcgtgggaggttccatttctgcaatctcctttgcccatttcttgtaagcttttgttgatttcacttctcctgcagatgttaaacaatggtatgcacaaacaaatcagaacctggataggttttatagacaaaagaattattgcaagaaagagaagcctacccgctgcaatggcctcatcgataatatctttgaaacggtgcgaatcaagcttggggttcgagcaaagcattgagcagaaaagcctgaaagagatatagtaccaataatgtttatacaaacttcaactcacaaacttgacaataatgaaaacaaggggatgattaattacctgctcattttacccttaaacttgttatatagctcaatcaaatcattcttctcggattcagaacccctatagtttgcctcaaactcttcaatatcagcttcgttgacctatatataagcagcaacacaaaaaaaaaaagttagtgtaagcagcagaagcagatgtgtaaaaggtatcactagtgaaagtttctgctaccttcttatacatgtcccggaagaaatcccgcaaattctcaaacgcatctccaggaatatcctaacgagcatggaaaaacacctcaggtttaagaaaatctcataatactaatgaggaagttaagtgctttcttcactcgatcaaactgaacaaacacaacaaaaacagagactcacagcatcatcaattgagccagtttgatcatagactgcccttttctcttcatcaccaagaattgatataactttttgcagctgctggaacttgtctttagcttcctgtaacaaaacaatagtagaatcttcatgtaaatgaatccaaaaaatatctcaagtaaaagagtgtgtatttaaccttatcatcctgatttttatcagggtgaagcttcaatgccaacttatggtacgcttttcttatttcctgtgaagtggctcttctttcaactccaagaacctttgacagagagatattagttagtttctattgatttctgtctttttagctaatcgaatcatcctgataccaaaatcctaatcaaatataagatcactgatcaaaacctatgattagtgtttaatctacttaaaaatttatatatcaaaacaccaaattttatgaaagtagacaaattccaaactattttctagaatcatgataaaccaaacccagaaaacaagcttaaattgaaatccctaataaaaccctaagtacgcgagagaaagagcagcgatcggaaagagaaatccgaaaatacctcgtanagacttgtctcagaggatgggccagcattatccatctcaatctcatcttcttcggttgtcgaagccctagatttctttttcctacccatctctctgaaccctaattaattcgataatatggaataactgggctctgttgattggagtcggcgacttaaaatgcttcacagaagaagattatctgggcgccaatatttccgtgttccccgccattgtaggtttatggattcctttcagagacttttttgcttgtaatccttatttattcgatttttacatttataaaaaataaaataatattatattaataacatattattatgaggcctagttattatctttttgatgaaaaatgtaatgttttattatatgattttcaataaattctaacacataattgaacataatgcataatttaacaattttaagtcaaggtcactatcatcaaagaatcatgtatttttagatccttcatggcaacaagacaagtttttatagtattttcaaacaaacataaagcttttgttatatactaacatcgtcttatacttgtttgatcccagtcacaataatcagcacaaacaaatatgtttacattgaatttggatatgaattatacttcttgttcatatctcttcttcacacttgtaaccatcttccttctccatagactcttcagctcctctagccgcagaggtcttcctccaggtcctcgaggacttcccgttcttggtcatatgcatctcctccggtctagcctaccacgatctcttcaagccttggctcatacttacggtcctctcatgaccatacgcatcggatcattacgagtcctcgttgtctcagattccgacacagctaagctaatcctcaagactcacgaccctgatttcgcttccaagtttgtgtttggtccgagacagttcaatgtttataaaggatcagagttctttaatgcaccttatggatcttactggaggttcatgaagaagctatgcatgactaagctattcgcgggttatcagcttgatcgatttgtcgacataagagaagaggaaacgttagctttactgagcacgctggttgagaggtcgcgaaacggagaggcttgcgatctcggtttggagttcactgctttgaccacaaagatcttatcaaagatggttatggggaaaaggtgccgccaaaactcgaatattcccaaagagatcaggaagatagtgagtgatattatggcttgcgccacaaggtttggattcatggagctatttggaccattgcgggatctggatttgtttgggaatggtaagaagcttagatcctctatttggcggtatgatgagttggttgagaagatactgaaggaatatgaaaacgataagagcaatgaggaagaagagaaagataaagatatcgtcgatatcttgttggacacgtataatgacccaaaagccgaactcagattgactatgaatcagatcaagttcttcattcttgtaagctatttgcattacttttctttagcttcgttaaattagccttaataagaatatttggtctctcgtttgcaggagttgttcatggcgagcttagacacgacttctgcagctttacaatggacaatgactgagctaatcaaccatccggatatcttcgcgaagatcagagacgagatcaaatcggttgtaggaacaacgaaccggttaatcaaagaatcagatttgcagaagctttcttacctacaagcagctatcaaggagacattgagacttcatccagtaggaccattactacgcagagaaagcaacacagacatgaagatcaacgggtacgatgtaaaatccgggacaaagatcttcatcaatgcttacgggataatgcgtgatccgaccacatacaaagaccctgacaagtttatgccagagaggtttcttgtggtggaacaagatacagagagaaagatgggttactaccagcaatatatgttggaattaaaaggccaagatgtgaattatcttgcgtttgggagcggaagacgaggatgtcttggagcttctcacgcttctctggtgttgagtctcacaattgggtcactcgtgcagtgttttaattttactttgaagggagatgaagacaaaatcaagatcaagttacctaccggcttttcggcttcatggactgctggaggaagcttactttttgtgtcttcctgaattttgttttgatccatttggataccaaactaagtgaatttctgcagataaacatcattaggaatttggaatcatatgtactgtgctctgtttttatgctctgatttatgttctgttttcataagcttaccagttaccactattgatggaaaaaatatgttttcagttatttccataagctctaaatcttacagtctgttgttaccaaccttgattactaatctaactacacctgaaaatgacgtgtaagcctagacaatgaaaacatttttcttttgtcaactgataatgaaagcttaacaacagtcaagtaaattcttaaatttttatttgtttataaacagacaagccataaataaacatgaaacaggatcagaaacagagattataccttcacaaaagagacaaaaacagaacaaagacaacatgagaaaagaaagaatcttgaagttgggattgacatttgataccattaggagtcatgactataaacctatcctataaaatcaaaacatgataatatctctcctaaaaacaaaacacaaacgaaaatggtggatttacaatacttctccgtaatcatccttgtatgtcttggaatcacagtcttgatccaagctattactaacagattacgtgacagacttccactcccaccaagcccaacagctttaccgatcatcggtcacattcacttctttggtcccatagctcaccaagcacttcacaagctctcaatccgctacggacctttgatgtatctcttcattggctctattcctaatcttattgtctcatcagccgagatggcgaatgagattctcaaatccaatgaactcaacttcctgaaccgtcccacaatgcaaaacgttgactaccttacttatggctcagccgattttttctcagcgccttacgggcttcactggaagttcatgaagagaatttgtatggtggagctcttcagcagcagagctttagatagctttgtttccgtaagaagcgaggagttaaagaagcttctaatacgagttctgaagaaagcagaagcagaagagagtgttaatcttgcccaacccctaaaggaattgccgagcaacataataaaaagaatgatgttcaggacaatgcaatcggatagtg

SEQ ID NO: 38084 - DNA, 2888 bp, Arabidopsis thaliana landsberg
ataatgattgtttaaactttagagactactgttcattgtcatcctacgttcaatatataatggctgcttaaccagctaatacagaaaattttaatagccttcattaaccaggctatagtgtatataaaacaacaaaataatattgaattttattaaacctctgctaaaaaatcatgaaccacatgtttcagtttgttgtatataaactatagcctatagggttgaggaattgatttccgctcctagcctcctagtatgaacgtccgcattttcttcaagggatagaaaacattaaattccaagatataataatgaatgatgcgaaagatcttttgagtttctccaggttgatgttgggactacttgtggtttataataagagatagaaatgagcaaaatatgactgaattataggatttaaaaagtattggggaagttctgtgttcatattgaaaccaaacacaatttacatactcaaataaccaaaacttttggataccaaaaaaactaaaatagcacacaactccgttacttaagagcaacatattgatattattgattcttgttgtgtgaaaaggtgaggacaaaagaagatttcacttttaggtgtactgaatctagtttattggaaagttccaaagtcaaaaactactagaagctcttttgatggggcttcccccagttcctactgttgtggcctgtgggttcttatcccccaccagtctatcacacaaacccatgatcccaacaatagacacataatgaaagaaaaatgtacatatctagatacagagcgagggaaagatgtgtatacgtaaagagaaaagatgtgaacattgttttgtattgatttgactttatttaacatttttgtaaagccaaatggcctcaatggaccaccatttcctcctgtttctcttgttttagcccaagtatactaagccaacatttttggtttctcaccaatctggttcatgattaacttactttgtgagacgaaagagagaagtcatccattcacaccatgtacagaatgcatcatcacaagaatccaatgaagtgaatcagcttgagagagcaacatgaagtttgtttagtttcttctccactcgattaagaacagtaagataacaattcttaattagtttcttctctactcatcatttaacagtacaaaagattcttagcaaaaagaaaaaacagtacaaaagatagaaaaccaaatataaactcaactttctcacaacaaaagcataaagatacttgtagccaggagacacatccaaatatagcttccaaagcataaagagtttttcaattagtaacaaagtacaaacaacagaaacaagagaatcttgatttgagtttttaagataattttagtaactacaaatacttgtagccatgagcacatccatatatagcttccaagtggtaatcgaggcatgaccgcattactaattccacgaaaccagtaaggttcttctacaggtgaaatccattttccatcgacaaggaaatgggcaaagtggatgacaagctaaggttatcagagattacttgaatcttgcacttgagtgaagctactgtaggaacctcctgaagttggcttgatactctaactaaatcattatcgattgatgattcgtagtatattatgagttgttcaagattagtcattttctccaaaaaattcttgatctgctccatctctatctccatatcgtcatcatcattggtttctccaaatttcaatatctttagacacttcaccggacttgatgataagcaagaatgactattctccaaaccttggcacatgcacacatccccacatctatctgttgctttgtgaaggagtccctaaaacacaaaataaacatctcaaactttgatgtaaaactaatcaacagattcatttccaagggtttgatttgctcacttggaagacaagagttccaagatttggacaactcttgagaagatttggcaatgattcccatcctagttccggatgactctcaatagttagatgagtcaggttgttgaataccggtattgattcacagcagaaagtaagaacctgaaacaaaaaccaaaacaagtaccatatcatcatccatatgcaatcactatctaaaaaataatcattaatcaattacgtacactaacataccgcaagactgttggcagataagcaaaggatctgaacattgcatattcccattagaaagtctgttgcattgccgaccaaagcatcatagcttgcatttgcatcctgatcacttgtcattgcaagaccaatagtggcatcaacaagcgaactgaaattcacttttggatactttgccgcaacataatcggagtatttcaagtagacatgatttggtgtatcaaacgaaacactatgcggatttttatcatacgactctgtacaccatagcgttagtctcttgagggttctggaagacacagagcggttcttaaaatcaaagtagacattgatcagaaccaattcctctaagacaagacaacccgatagaatcttgtcaaggtaatcaccggcttttcctaaactaatagtatcaagataaagagtcttaagctttggaagaaaaacatcttccacatcaatgggagtaactttttgagattctatcctcagactaacaagtgactcactcataaagaccttagaaggaagctcaccacgatccacactaacgtgtaaatcaagttccgatacaccacgttccaacacgtttaatatccactaatgacacaagctggatcaatatcgattccacactttagagcccacctgtttactatagaattctcttgcaaacaaaaaactctgttcacgaaatcgataaacattctattac

SEQ ID NO: 38085 - DNA, 5755 bp, Arabidopsis thaliana landsberg
ttgtaccgaccgctgaagttatatattatgcataagggaaatctgaccgacagcgaaccgattgtccgggaaaaagtgatgaggtggaggcagacgagagacaacttggaaaaagctaggcgacaacaaatctctctgtgctaaggaaggagagaggatgtgagtaaaatgaggaagcctcatgaaaacttaaccataattagcaaatctcctattccaagtaacttttgccaagccgaatctcttgtttttcgtaaattccatatgtattctcttccatatacacaatcttttgagagagaaaaacaaaatccaacctcacttttgttgacaacagaatccagcataaaacattgttgggaaacttgttactcaacatacttttgcacctggttgttgttgtagttgatgtatccggagaaaagaagataagattcgggtcaatacttaatctcaattctgtctgcagcagttacttaaacggtgtcctttaattgttaactggataactatattttttatgatcttatgatgggatttgtttcaaactttcaattaaggtcaactatacatcaatcaagtggcactggtcaggacctgatcattgattctttcagttatcttttaactttgagaaatatggaatctcataatcctcaagcaatttcagattttaggattcgacaaatattgctaatcaaattgagttctatgaaaacaactataacagaagattatgaagaaatacagttattacaacttacgaccatgaaacttgtacaaataatggattcaccagaaaccaatccaaatatcttatataacctcaaagcttattctatcgattctagatagcaaactcgttcatatatccatcaacaggcaaaaaacacaaagactctaatagaggatattttaaataactgtttgcattttaactgggtatatacggtttaataaccgggttatagatttaattgtctaacagttagagttgccacaaaggattctcagatacttcgagaccaaaaattaaactgagagatgttgggacccacagtaaagtgggaacccttcaaaaataggcgtatgccgcttagagcagagaaaacacggtattctttagtaaaaggcgaaagaatagttcgctttgtcttcactgcacggctccgtgagactcgaaggcaagctctcgatctttatttatactaaagtttactcactgttctcaggagatgcaaccgatgtgggataatacaatcaatcaaattaattcatgggttattaatttagcggtatatgggccatatcttgtttatttttaagcccatcccaaagcctggaggtttcatcatcttacaattctagaccggttttggtgaaccagtttgataaaattagaaattacaatgcaagagacacgtggcaggcttagaaaaataaccgaaaacaaaaataaaaaggtttaagagagagacgacactagtctggttttggttcgagtcccgcagtggtaaagggacgactacaagcgaacataatgtttaagaaggcggtggaggctaagtctcaccagcgtctctccggcgctgaccggaaaaaactccgtcgcaccgtccgaaataggcttccccttcttaccgatgaactcctcgacacaattcttcctccaaaggtttgatttctcttttccctcaatttttagcatcgttgttgtctccatagattataaggtctttcttcttattgtgtaatctgattgattctagattagattgcatcgagtattggcttacttctggcattgattgttgtgtctaggtcgagattacactttccaagtttcagaatcgagttattgtttatagtattgaaggtggatgtcccatgtttttcgatatcgatggaagaggaactgagattttccccacagtttttgctctctgggaggctcctgaaatgttaccttcctttatgttgaaaggaggtgaggtttcacgttatattataggcggtgcagatttgatgttcccaggtattttgatccctccccaaggctatccttctttctctgctggagaaatatgggctgtcaaagttcctggaaatctagcacctattgcggtaagctttttatgtcttgttaactgatgaattttcttaatgaatgtaaagtttgcgtattgagttacatgatgtttatgaaggttgggtgtaccacaatgagtagtgaagaagctcttaaagcaggtttacgtgggaaggctttaaggataactcattattaccgtgacttcctatggtacatgagatgctggcaaaagtatttttatattttacatctgtggaggaactctgtctcttacatgctgagtttgtgtttcttagggaatcagctgaggggcaccatgttccaaatgcgggttttatggaggatgtggtcatggaggatccagcgtacattgctcctggttcaggtgaagatattttagacacttctgcaagcacaggaaatgaagaagatgaatctgctctggaaacagcttcaacatcggttgcggatgctacgaatgatgctgaagaacatgtggttgggagcatgaatgagctaaacttggtagatgacgtatgtgctactgaaactaataccgacaagcagattactctctcccctgaggaggtagatgcccttcttgaccaatgtcttttgcaagcattgcatacaacacttaaggagaaagaccttcccatcccaggaagcactctatggtaagaaccgcattcagatacttgagttactttgaaagccacctatattctggtatttggttggtttcttacctcatgatgtatgcaaatccgtgttactcttaagaaggcctatattctggtatttggttgaatttttgactatgattaggttgttttattacgctctgaagctctattctgtgttactcttgactttgtcaataacaagcaagacaccttaacccattttctttatcctttccacgtttggcttacatatgtttttctgtgagtggtgcagggcaaatcatgtattaccttgtaggccttctggtctcacacttgacattaagaagtcttcccttaaaaagttgtcaaagtggctgcaatctaaagcgtctggtggaatggtcagttttcatacgaagttcccttgtcttatgatattttttttggcttgattttatattttgatataacaggagtgttagtagatgtttaactgcaaaacccaactggtttatcaatataggaaactattagtatcaagtgttgtaagctgtatctccttaaaagtatgtatgtaagacattggtacatttacagttaccctgatatactcataattgctagtagatttactttggtgtcttgactggcaactgcactctgtcacaatctttgaaatatatgcgcagatatctgtgaaggaagacaagcataagaaggagatagtattgatttcagtcaaccgcagccacccagattacaaatccttcaagccagagaaaaagaaagcggaagtctccgagtctcctggagagcgctccacgtcgcaagctcagtcagagaaagggcttgaaattatagaggtctataaaccaagcatacacaatagtgcaatatttgcatcagttggggaagacaaaggaaatctgtacacagcttctgaagccactgacgttgtgttcaaatacattgagaaggaaaatctagtaaagccaacaaacaaatcaatggtggtgttggatccgatactatgtgatgcattgttcaaaggagctatcaaaaagggatcggcatatccgtcagagatccacaaaaaggatgttgggtcgacatttgtaggtagaatgcagcctaatcacgtaatgatgagaggaggcggtgaacccgtggttcgtaaaggagctgtaaagccggttcagataatgacagaacgaagacaaggtaacaaaaaagtgaccaaggtcacagggatggagacgttcttgatagacccagactcgtttggatcagaactgcagaagaagtttgcttgcagtacttcagttggagaacttccaggtacgtttaaaatctatcttttttgttttgctcatctgtgtaagtgaattaactatttgagagatgattgattgttttatgtgtttgctttcaggtaagaaagggtacgaggttctgattcaaggaggtgtgattgataaccttgcgagatatatggtggaacactatggagttccaaagagatacatcgaagttcttgataagactagaaagtgaatggttttttctatttcattttttttttgtgtgttttaatcttctaattttatttgatacgtacactctgtgactctagagatgtggaacaaatgagaataaaattgttttgttattagtttttttttaatataacaaaaaatttaaagaaaataatttatagtttgatggtgattggtgaacttcttttttttccaagattgcagtaaacgtcgtctttagctccaaaaacaacctttgtcttgttcagctaatggcgatttttgaatggcggcacagaagacggccattcgacggcggaggaactcgtcgccgtcgtttcttcagcccattgtattcgagaaatttcaagagaacgattctcttcgctgtgattttcttagctatcttccctcctctctacttccatttcaagctccgacgaattcgtcagattgtcgcgcaaaagtgcgattggcttcaccatcctccacttgtatgtgctcacggcggcgattccaccctcgctttcccaaacactgtacgtacactctcgatctcttcttcttcttcacactcttgctactaacctttttaaaccttaatctcttggactcttctcaatcgtagatggacgcttacagtttcgctatacgttctctagttgattgcattgaagtcgatgtttctcgttcctccgatggtgttttattcgctcttcacaacaggttacagactcttatccttgttgtatcatcttcttctaatgtttctgtgtttggattctcatcggagttcttcttattcatcttctgatcacacgcacagtcagggatctgcagcgtattgctcgtaactcttctgttcaagttggagatctgagtatgaaacaggtctcatctctctctctctctctctctctctctctctctctctctctctctctctctttaccagcttttgggatatgcttttttgcatccatttttcttaaacctttgatgatctttttgcagatcaaggaactcgatgtctcggagattgttaaaggaaccttgggaagtagtaggattcctactcttgaagaggctttagcggtaatgcctgtttttttaattactatcttgtcattgctttgctttgtaatttctgctcggtaacaagtggctgaagctagttttgatcttgaatcatctagttgatatcgaattcagtccggaaagtgatccttgatgccaaagttggaccgccaatgtatgaaaaggggttagcacaagacatcctttctattgtaagtactatgtttttgttagctcttgtacttgtaaagctttagtacaatgtgctcgagatttataaacatgttttgattccttaatagcgttgcttaatcatttatttcctggtatctttgtacacaaagctagaacagcttactatagatacttgaaaaaacaagagt

SEQ ID NO: 38086 - DNA, 5838 bp, Arabidopsis thaliana landsberg
ctactcttgtgatccactagggcacgaaagagatggagtttttcacagagtatggtgatgcaaacagatataggattctgaaagttattggtaaagaaagctatgcagttgtgtgtgcagctattgatacacatactggagagaaagttgctattaagaagattaatgatgtctttgaacatatttctgatgcgcttcgtattctccgtgaagtacagcttctgcggcttttacggcatcctgatattgtggagatcaaaagcattatgctgcctccttctaaaagagagtttaaagatatctatgttgtgtttgagctcatggaatcagatcttcatcaagttattaaagctaatgatgatttgactcgtgaacaccaccagtttttcctttatcagatgcttcgtgctttaaagttcatgcatacaggtgtgattcgtttcattgtttcagacctgtgaattttggcagcatgttttgtattttttctggttgtaacttactgttatccttttgttcatgcagctaatgtttatcaccgtgatcttaagccaaagaatatacttgcaaacgcaaattgcaagttgaaagtttgtgactttggattggctagagtagcgtttaatgatacacctacgacagtcttttggacggtatgcacccttgtctacacattttgctgtaaactgttaattcagttctggtaatctctccagtgtttttgatttccttctctttgtcttttttgttccaggattatgttgccacaagatggtacagggcacctgagctctgtggatcattctgttctaaggttgttgtaattcttcttctccttccttgtatgcttgttccatttttctgtgtggttgttacacgttagagttgtgtcctattggagatagaatgaaccacccacacatgaaaataattcgtgttcaacctcaggtagcctaggcacttttgtcagaattggtcgctcaatattctaatatgcagtttttatcttttgcagtatactccagcaattgacatttggagcattggctgcatcttcgctgaggtattaacagggaagcctttgtttccaggaaaaagtgttgtccatcagttagacttgattaccgatcttcttggcacaccaaaatcagagaccattgctggggtatgttctttttgcttccacattaccaagttcttttttctgctgggaggagactaataatatgtctctaatgcaggtgcgaaatgaaaaggctagaaaatatttgaacgaaatgaggaagaaaaatcttgtccccttttcgcaaaagtttcctaacgcagatcctttagcattgcgtcttctgcaaagactgttggcttttgatccaaaggataggccgactgctgcagaggtgtgtgttctgtcattatattgtcagttgttactagtagattctttttctttcgtccctattagaacaactgacttgcttctagtgcagtaagctctagttcatatttcagctccttacatggtgatgttaacactgtgatgttctttgacaggcgctggctgatccttattttaagtgccttgctaaggttgaaagagaaccctcttgtcagccgatttcgaagatggaatttgagtttgaaagaagaaggttgacaaaggatgacattagagaactaatatacagggagatactggaataccatccacagctgctcaaggattatatgaactctgaaggctcaagttttctatatcctaggtttgttacgtcttccccttataaaccatagtcatgtcattcatagcaaaataaatgcgagacactgcactctcttgttaatcatttaactgattaattcaattttacattgcagtgccatcggtcatttgaggaaacaatttgcgtacctagaggaaaatagtggcaaaagtgggccagtcatacctccagacaggaagcatgcttcacttccacggtatgttttctcatccattcataccatacatctctgttgattcagtatgacacttgtgattaatatttacctcttcatcttcgtagatctgcagttcattccagtgcagtaaactccaacgctcaacccagtttaaacgcatcagacagtcgacgtgtttctatcgaaccttcaagaaatggagtggttccatcaacttcagcatattcaactaaacctttagggcctccaccaagagtaccatcaggtaattcccgaattattatctatgaatgtaattgactttttctctggggatgaaaatttgtagcaatctcccatcacagttaaaatcataaatagatgcacagtattgttctcaaagtcaatcgccttccttatgtctaacaggtaaaccaggccgtgttgtggaatcatctgtaacttatgaaaatgacagaaacctcaaagagtcgtcctatgatgcaaggacatcatattacagaagcacagtactccctccacagaccgtatctcctaactgttacttccttccaaacaccatgaatcaagagaagcgcagtggtacagaagctgcatctcagccaaaaccgcagtttgtccccacccaatgcaactctgccaaaccagctgagctgaacccaaacccttatgtccaatcacaacacaaggtgggtattgatgctaagctgttgcatgcacaatcccaatatggtcctgctggagccgccgcggttgcagtagcagcacaccggaacattggagctgttgggtatggcatgtcttagaatttagcacattggcgctgttggctattgccagaaactcctcttgttatagtcgttatgtaatgtaagtattattcgatcaggcctgatttgaacacatttgagattgtaataaaaatggttcagttttaaccccaccaaacgtctcaacgaaatccaaatgtgctctcggaaactgctccggtaagcctggatcatccaggtgacatcttatgggaagagactaattgtggtctttcaagatcaggacgttgtttttcactatgtcaaaaagaagaaaggataacaacaaaaaaaagttgatgttagtacaaattgacctcttggctaataaaacagagcaatggccaaagaatttacaagtcctaagatgtggttggttcgtagatttttatagtccgtaaactattgtctttcgcacaacagaaatagtaaattattactcaatggttacaaacatatctgatgtctacctaaattagtcgtcgaccgtcatatactcatgaccgtgcatatgagaaatcactaggcttaaccaatcgtggatagatttaaattccgggtgagtctgattgccggtaaagaacgtgtgaacaccgttcttgagcacaatccagctgcaacctggtgtcttcttcacattctgttgtctcattgcgtctctaacgtccaacacttcctcgtacttcccagcttccacataaacattagacattaatacataaccgccacaatgctctggctcgagctcatgtagccgctttccggccgccagtgcgagatctttgttcccgtggagacgacaagatgacaatattgaccgccagactacaggattatcgcaaatgggctttgatattgctaactcatatgcttcctctagcttgtctgcacggccaagcatgtctattacacaagcgtagtgatcacttgttgggagaatgttatataccgtctccatctgtgccaaaaaatttctcccttcgttcaaaaaaccagagtggctacacgcttgtagcaacccaacaaatgtgatttcatcgggtttgacaccggctctgcacatacatgaaaacatatccaaagctaactcaccgcagctctgcacaccatagccattaatcataatattccaagaagctgagtctttaaccctcattgagtcgaaaaccatccgagcgtccctcaagtccccgcatttcacgtacatatccatcaaagaattatgtataaattcattactagatttgcggtttagaagtccactgacgatcatgtacccatgaatctctctgccctgcctcagtgaagctagacgaccgcaggtgggcagaacagttgtcaatgtaacaatatcaggtcggattccagaacaaagcatcctttcgaaaagagctaatgttccatcatgatcaccacagtagtcatgaacacataaaacagagttccatgtaaacaggtctctctcatccattgcttcgaatatactgtttgcctcttctagccatttactcttcccatacatatcaatcaatgcatttgacacaacaatatcagaaccagatcccgttttcaccgcaaggccatggattgacctaccgttgtcaatatcccctgaaacagtaaatgctgataagacgcttgtaatggtatgcctgctcacacctacaccttcttcacgcattttactaaagactaataaagcatcctcaaatctaaaaatctgtgaatacccattaactaaagcattccaaagcacactgtcatctctatcaggcaattcatcgaacaccttctgagcatcctccactaacatgaacttcgagtaagaagtaactaagccactccccacataacaatcggaatcaaacccaagtttaaacgccaatccatgaaccttcttaacatcagaaagctccatagcatcgcttccttttagcaaactaggaaatgtatacttatcaggtaaaatcccattagctctcatttctctgtacgtctccatcgcatccaaaggagacccatttaccacaaacccagaaatcaaagcgttgtaaccaaatacatcgcgttcggatccaccaaagaccaacaccgcacgccgcatgagaccacacttagcgtacatgttaacgaggctcgtgccggcgcgtggcgaatcatccagaaacccttttctaaccatgaaaccgtggatctgttggccggaaacgtaatctttgcgctgtgcacagcgttgcaatgtggcgatacatgtagcaacattgtggtgctcgtatctcttcgggttttcttcgatttgcccagaaacagtcgaatataaagatgctaaagcagaagaaggctttatagctgcgaataaatctgggttccgtgggagaaatctcaaaattccggcagaacaattttgaatctcgatccgtagaaacgagacggtcattgttttagttccaccacgattatatttgaaatttacgtgagtgtgagtgagacttgcataagaaaataaaatctttagttgggaaaaaattcaataatataaatgggcttgagaaggaagcgagggataggcctttttctaaaataggcccatttaagctactaacaatcttcaaaagtcccacatcgccgctatatgaagaaaattatagcgattagagtcgagtaagtgattgtcctttttgaatcaccacgtccagaaacaaaagaaaacaacatataatgaattaagcttcaatttgagcaggagcaggcaaaggtttctctaaagaacatttttcaggtttcatggtattgaaaagttctagaacttctgcattgcgacggatataacttggggacatagacagtaaatcctgagcttcactatgccttgcagacttcaacatagcttcgaatacacgcagaaccattgaattagatggaaacttctttgaagtcacagccttcagaaaagcgaaagcctctgcgcttgttccactattcgataagtaatccatcaacgcccccacgaaaggagggaacgcgtgattatcgtcaaggtaaagactcaaagattcttcaaacccaccat

SEQ ID NO: 38087 - DNA, 1953 bp, Arabidopsis thaliana landsberg
tgattcgaatataaaacaaaaatatattatataacctaaaaattaaaaaacttctctactaaaaatactaagtttttttttttactaattaagaaaacgactaaaaagtttctactaaatatattatatagaaactgaaaattacggtcgatgcttttgatcgctgaaccagcgatatgcaaacgaacaacttttgctagatgtcgttggtttcagtcgccagcaacaggcaaacgaacaagaccaatgctgacgagtatttatatatcttgtgaattgtacctagtatttgttattgatctacttgcatgattaactcatctccttcaactagacattgagataagtgaaaatatgtccaatattatctacaaggttaaattatcttggacatcaacgtttgttaactttgccaaaatagtcaatttaatcgtcaaattttgttaactttgtcaaaatatccatgccattaagttaataaacggtgtcgtttttgtttaaaaaactactagcaccgaactcgaacccaaaacttctactgaataccatttctacatttttaactgggctaagccatttttttgtaaaatatcaacaacataacatagaacattgaattattatctacaaatgtatttaagtttttttttataataaaataaatagtctcgtggtgtaccgcatgttaaaatctagttttaatagatagaaattagtaattgttccaaaaaagaaaatataaaatgtaattatataaaaatggtctacatcaacttggtaacataaggtagatttgaatcactctattttggatagtcactatactattcaaatgttgatttggtaaaccgaaattgtaattagcttcgtttttcagataacaataaccgcaacaagtagataacacatagtttaagcgtctcgattgtaagatatactttcagtagcttgtcaattgtcataaatgtggatgtcggattcggcccacttcggcccaatctgcattctatgggcttcaaggtgaattgggcccaattcaaagcccagcatgagcctggccgcttaaaggatgatccgacattaatacagaaacagaaagatcacgacttaaactgcgcattaaagtcccgagttgaagattcgtaacgtacgacgtaaataaagcgaaatccgcggcgtgaagtcagcaagtagtttaatacgtttgatccgatgtattgagtataaatacgagttgattacaattgtaagggggacgattgataaaatactaatactatacacaaaattcacaaacacatttttctcttttcgattcgatcattgttcgtttaacaagaccaaagatcctcgtaaaaacaaccacaaaattctaattgcggattccgacatccacaatttggcgctagaaggagggcaatttaagtcttttacttcagaacaacggtcaattcaccatgagcaacaccgacgatcagagttctggcgaccaaacctccaccctcgacgacatcaaatagctgcttcagcagttgtctgagaaaaccgaccggcagcagctcgccgtgacgtcactctccgacaagttcgtttctttccaagaacagtgcaatggccagctcgcagcgctagcagcaaaccattacgagatcaggtcagcccactaacgcgtacgcgaagcgggttgattctctttccgcaggaacgatacggactactggagctcgagcacgactcaattttcagggtaccgtctgtccgagcgtccaacatccacagtggtggctaattgtttttcgcttactactataatattttaatttgtttttaacaaaaatatagaaataaaaatttaacaaaaataaaattgaacccatatttatcctaccaaattattcaggtatgaaaatacacttagccaacagtaaaaaaatatcaaatattatagtatca

SEQ ID NO: 38088 - DNA, 1972 bp, Arabidopsis thaliana landsberg
ttttgcaatgttatatagtaagttgatgtccaacaatgattatagatcttatatcataagatgtggattgatagtagcaataaaatcatgatatgaaaataactctcattctaaaatctgatttatttagcatttgagtaacaacattaagctgagaactgaactgaatcattgcatgcaaatgtgaaccgggttattatgggagcttgtgatatataccaaaatgggactatctaagaattatagaaaggagatgagataagagaagaatttggttgagaagcagaagaattcagaagtagaaaggaaaggagaaaggagaagaacaagagagagacaaagtgttgttagctcaattggtaaagattttaggcgaaccttagaagtcgccagttcgagtgatgcttgggatgaaactaatactacatgttgtggtttcgggtctagaacgattatgggtttcagcccagaacctcctggtattcaaaaaaaaaaaaaaaaaaaaaaaaaaagaaagaagagcaaagaagaacattgtgtacattgtgagtcaatcttaaatctctcgattcctcacatcacattagctgtcaccttgggcggtgaacgctaattatttagttattgatattattaatttgttcctcgactctctcacaacgctttcacgttcgttcagtcagataacattttttaatgtaatgaacaaagcatgcttggtcttatactatataacatattcatggattattcagtagttctgtatctgccccctttgtttttgagaaacaatggcaacaatcgtcgttgactttcaaaaaactcattttcatcctcagatcctcttatccatattcacagtcatttgcatctttgtattcttcttcaagaagccaaagggctcacgaggctgtgaccttcctccgagccctccttctcttccaatcatcggtcatcttcaccttatacataatcttaaacccgccaactgttataaggatcaaaactctttctgtcatattatacattatatctaaactgttccatacaattaacattttaaatccaattgttataaggatcataactttttctatcaaattatacacatttaaaatgtagcctgtgatatccattttaaatatatctgactcccagagttagtaataacatcttccgttttataattgtatatcctaagaatctaagattttttatacatatgaaaaagaaaatcaattttttgttttattcttaattaataaattatataattcttttcagttttaaaaggacacttaatatgaaatctctgattatcttatcaaacctaataaatttcacgagagctgaagagaccaaagagtaaaggaaaatatttcttctcattataactgaatgaatgtacaattgtacatacagtttgttatatacatgtatgaaacgatacaaattggtaagaaattaaagaacatctctccatgtcgtatgctcgcaaagatgacctatgattgaaagagaatgaggtgggctcggaggaaaatttaagccaagtcttgaggctttggtttcttgcagaataaggcaaagagctagactgagggttgagaagggcatagaaggattaagatgaatcaatttttaaagtgaaagtggaccattcctcccatttatgcttaatatgataaagaatccaacgctttgttgcaatacctaaaaaatgtacacataacacattcttagtggaaatttgccattttctaaaatatataatcagttcgacatttctaatttttgcacctaaattgaggtgacaggtgaggaagaaatcatcaagacaatcttcatcttccttgttttaagcctgcatgtgtttactaaatttaagtgacaaacttcaagaagtagatataagtcctctttttaatgtgctgtcatttcaacaaacaacactggatcacttgatagagaa

SEQ ID NO: 38089 - DNA, 2293 bp, Arabidopsis thaliana landsberg
cgtctctttttattttttaacattaatgtaagcagtatcaacattacagctccaaacagtttctgatctttacctccgtactgctaatcctctgtttttgtcttgacttgcaaggtgaccgacgtacggaattgggctcaggtatgggctcatatgttagctgtgttcttgagttagcctttattgtcttcaggcctttttgcgatttgacgtcgttttgaactgtagtgtttataagcaggacgtatcccaacttcgtatatttagggtttcaattaacactaagaattacaaatttctctgcaagaactttgtctttcaattagcgaagcaaagcctaagaaagcgttttgataagatatggggaatcatatgcagaacagtatctcacgtaagtctcttgatttcttttgattaaagttttttttttggttggtctgagagtaacaaataagtttatgagaaattctgtttgtccctcaaagtgtaagaaaaggctaataaagcgttttgaacagataaagggaatcatgaattgctaacgattttcacgtttgaaatcaataacttctcccagaagaaagcttcgtttatgtctccaacgtttttaggcggtggctgtgaatggtaagctagtaggatcaatgtttagattctaataaaattgactctcaaggtaaatgtcttgctaaaaagggtctctaatctttgatgttttattaaaaatcttctcaggtatgttctagttcaaccggatggtggttacttgagtctgtatctatgcgttgggaaccctaaatcattgcaacctggatggaaaaggcgagccagtttgcacttcattgtattaaatcaatccgggaaagagctctacagagcagctggtaatgatatatgatcacatccgttttctgaatctttatgatgatagaagaagacaatttaatttttgtttgtcttacagaaatatcaagcttgttctgcgctaaattcagagcgtggggtgataggacattgcctcttagcaagcttcaagaggaaggatttttggagaataacaaactgatcattagagtggaagttaaagtagctgaagaaggatatttaactgggaaggagatgtttgaaatcaaaggttttgaagttccttcttctcaggtaggttaaggagcttcacgtattctttttctttctttctttttctggataaccagatgttgttgttgtcggtaggttgtttctgtgagccagcttttcatgaaacacccagacattgcaactggtttcaaactaaatggcaaaggtctgaagacagcatacatgagtcttctcctcagcctcatcgagacgttgcgaaggcctccactgagcttttctgatattgagttaagcaaggctaacagcacgttgagggagctgacagaagcgggctttaagctggattggttaaagaaaaagcttgaggaggtttccttgaagaggaagaatgcagtagatgatggttctcgtgtcaaacaagtggaggaacgcatcaaaattctgaaggtgacattgtcggatctcaaagatgagttgcaatttgagaagactagatctgctgctgctaatcaacctttgtcgtttgatgacattgtttaacatcaaaatcaagttttgtgtttcataaatatctctgggatttttcattactctttgaatccagttttcagttataagcttcaacctgtgtaataaatagctgcacaacaaaatgcaaaacgaaatattcatagtatctcaaaatagtttttttgtgacttctaaaatcacacaactttcagaagaagaatgacgaaacataaattatagaggaggaacatcactactattttcattttttcagccaatcacagcgctcctctatacgcccactcgcacctgcttcacgtcacgcgctcaattccatactcattcgcaccaacctcgcgttgagcgcgtgtcatcaatttctgtaggggtaaacccacaaaatcatgtatatttctattctactcgctttgattccaaaagagcctcgcgtgacccaaaaccttttttttcttttgtttttttttctgaaaaccatattaattctaatgcaaaccaaacccaaatcaatttcaatttcaaaaccatgtaaaccgaaccgaaatcataacaccaaaaagacaacctagcaatatactcatatatcgtcaatttcactattaatccaacgagccagtttattgcgatgacgtttctaatgcttcctaatgacatgtttttaacttat

SEQ ID NO: 38090 - DNA, 2667 bp, Arabidopsis thaliana landsberg
tctgtgagagtcacaggtgagtgaacatatttcatatacctggtatccgttcctgatgcatctagataattggaaaattaacttcaaaatctcttattttggattgcaggtccatctttgtaccgtatttcaaatacggtgcttgatggtattgtagcacatctccaccactgctgaagcttctgtttcaactaggaagaaaaagaaagccaaaattcagcaaacttctgactctaatacaaccaaaaaagctggcatcttagggcattagttctttcttgcttgaagaattgttttctgcatgataccggcagcttgaagtttctggatacaaataacttccaggtcattattatctataaactttacttctgcttgaatctaacatctctcccttcctcttggagtattgacctcgattcaaattatcttctttccacaggtgctacttaagcctattgtatcacagcttgttgttgaacctccatcttctttaaaggagcacccacatgtaccatctgtggatgaggttgatgatttattggtttcatgcatcggtcaaatggcagtagcctcaggctctgacctcctctggaaaccgctgaaccacgaggtaacaacataatctcaagaaagcgagtctcagctatctttgatagacttcaatttttttaactgacataaaatcatattggtcaggtgctaatgcaaacgaggagtgagagtgtacggtcaaggatgttgagtttgagaagtgtgaaacagatgctggataatctgaaagaagagtatcttgtgttgcttgctgaaaccattccattcttggctgagctactagaagacgtcgagctatctgttaaatctttggctcaagatattatcaaacaaatggaagagatgagcggtgaaagtctggcggaatacctctgaaattcgtttgagtgctatgcaaccgttagttcccaattttgattctttttttgtctgtcgtagtaaataactagatatgaaatacaactttctgaaattttacggtttttgagatcccttctaatgaattgagcagagatcagtttatgtggtcattcatgtttgcagaaatttcaacattgtttttccatttgtgaagtagtaatgtcatatgcgttagaaagaaaaaacttggttattttgtagcctatagctcaaaaactttcatatttcagcaaaaaaaaaaggagatgagtactagcttcgttttctattaaagtgcaaacctcaaaatcacaattcagaaattctttacagttttacctcatttttaatctgaatcaagaatcgataacaataatttcggaccataatctgagcagaagataacacacggtaatagttcttttcgtcttgttatattctcatgtgaatactgtagtcgtttgggtttttggtccagtccttttagctttcaatgcctttcttcaagttgggtttgatatccttttattggggttaggcctttttagtttcaatttttaaaattttgtaatcacctagataggtttaacccattttgtaacgttttatcttatgataaaaagtcaataaacagaaagacctttggggaaaaaagaaaaaaaaattgtagtcacaacaaatgaaatcccaacccacgcgctgcaggtcctctcagtttttaatttatgcaaaaaatccccaaaaaggaaggttatatagtccatggattttagcctcacgtgctcaacgcgcctgtgatgcgagtggttttgtatttttaattcctacacgcgtgtagttctatttgaataaacttaaccaatcacaaccataatcgttgtatgtttctttttgaataaacacttcggatttcctatattccggactccaattcggattttcatggctaaggttgtctgaataaattaattcctatgaatttaacacgaaaataaaaatgcatctatatatttgctcgtattaaagacaaaaatatataaaagatttttttaaaaagatagaaaaccccttatactaatacaatgtacgctcaggcaaccatgaaacacgttttaggctccaaccacctgaaaatctgatcttggcctaagaatattggacatatctaaacacaagttttaagatttgacacgaatttcgacataaataaggctttaaatgggggagatttatcatttgagtatagttttgtttttttggcagctgtaaaaattttgtttttatatttttggaattttgttttgagacacaaaattcgtaaaaacagtttttggattctctaccaaaagaatccggctagattttaggaaaacaaaatctttaagaagttgattaggtaataaactgttttttttttaatagtaaatctaagaaccgttgtctttttgtttggttcaacttcaaaaaccattgtaatatctagtttttttacatggactttagaaatcattcttgtacagattcaaggaaaaacaattatcgtgtatattaaagaatggaaacaaatataaaaatcacaccattccttcaacgttacatccctacacattgaatacgattatcttccatattatgatcttttaaaaaaaaaagattttgtgcatttctcaccctttctcatactctctttttttctcggacaagaaggctaca

SEQ ID NO: 38091 - DNA, 1711 bp, Arabidopsis thaliana landsberg
actaaccaatcggtcgttgacaaaaaataatactagtaaaattttattatgaaatcaacattttcaatcactaataaaaatagattttggcatcttataattttaccgtaaaaactataattctactcaattaatttttttgaaacttgtaatatcgacatatcagacctaacagtatactttctgttaaatttaactgtttttttatccttcaaaatacctggatttctcaaaaaatgctatgttaaacattttattctctgcggggaaaatattttgacaacatttccccttttaactgaattttcttgcatagttactacacacagagactataaatagcttgcagattagattttcttctgttccacaaatttctaactaatatgaccacttatagtaaaaaacaacaacctgctttatatgtaactttttttcttttccttgtccttaaagagataattcagtttttttctttctcaattcatatgaatcaaatcaaaccaatataagactatattcactgtaataaaataattttctaaatccgacatgtggcagaatagaaccttttgccaataatttccttttaaaattaattttcttcctattaataaccaatccggaaaaaatgaaaatggaagagaaattaatgtgaaaagttggcaaataattcgttagagatcacctgtgttacacctcaccgtacctcttacttatcaaccgttgatcttaattctctaactccaattactccacgtggcgtgtttttataggtgaattcaattatgagaaaaaacgcttcgtgtatgttagaacacgaatcacccccatcatcgtcatcatcttcaccatttctcctgcaaaaacttttttattccttcttcctctttagtaaacaaatcgatcaaaaatggtctcataattctctctatatcttttctcactttcgaagattcttctccttgcccacaaatcaaaatgatttcttttgcgactaattgaatttttagaattcaacataagcaatgaaaatgctctcgaaagctcaggctgatgtttgatgggatgattgagccagaaactttggcggatgaggctgcatcgtcatcgttggtttccggtggaattggattatgggttccatgattgggtgattttggttgatttgggggatgagtatcagatgatggttgagaaggtaaatgttcgcccacgtgaaattgaagatttcaaattgatagaattagggttttggtagcttcaaatacgaagagaaagagaatcgaaaacctaatcaactatgggccggcgtcagattaaaaaaaacgtccaaaaaaaggttcggatgtgggaatcgaactcatgttcacgaggaataaactctcacataaccacctaacttagacaatatattcgtaacacttagaaaaacaattgtatataaatagtaaacatcatagggttaagttttaactgcggttagcgatttcgttaccgctgttaacggccgttaactcggatgtctcattttgccaaaaattttaaaaataaaggtttttaaaagataaaaaaattaacttaagtattaaacgggcaaattaaataatataggtattaaacggacaaattaaaaataaatcaatgttttgtcggggttttttcctttaatcttgtcaccttacaatttgagacacacttaaatgtattt

SEQ ID NO: 38092 - DNA, 4516 bp, Arabidopsis thaliana landsberg
tgctctcaggtaaatgaaaatttgaatatttttgcattttttcttttcttcattttagttactgactaatgtgaatgtatcaactgtttccagcaaacccaacacgagctcgattattccatgatgaatctttggcaaatgaggatacttatgagcctttcttgaggtgagtccctatgcaaaagttttacaattgttatttggtacaggcaagtttttttttataggacagaattggttattgggtcgaactgttgtttctgctggcccttgtcagtttattattttaactacaatcttcctgacaaacgggaaacatatgttaaatgccattgatggaaactgctttcagctacatttgtgcttgattttggctgcttaattgcttagcttcaaaagatcatgccatctaaaagatgtgtcctctttcaggttgctttggaagggaaattggttcattcaagaccttgcctgtataataaggtattcaatactgcctatctatcataattctatcatttcatgtatatcatgtttgatttgatggtctaatctacatttgtagtgattcggatcattgttcaattctcaagtcttgtttcatgtatgtaacatacagcctcacttacatatagtgctaggccaaaatcttgtaatggtgttattgctaatggagaagcttcgggttcaaagaaacatattactgcaattgatgatgttctcaagagtttggtggaatggcttcgtgctcaggtttcttcttcttttctcttactctctttcctctttgttttctttcttgtttatgttggtcctgcactagtgcttaaatgttagttgtttttgttagtcttgtagacaatgccattgttagagctagtgttcagtggtatagcatgtaaatagtgggaaagactgaggcagttaatatttatttgtttttgtggagatcagcaattaaaattctactctctccatacctttgttagattacaagaatgcaacacaaaccaaattagttcaattgaaaacaaaccttctgcttaggcaaaagtctttaatttggtaaatatttagatgcaagtttggtgatatggaagaaacatttatgttgtgactgggtgaatccataaaagttgttgatgtccaccatggatattacaatccttgtctttgatatgtagttgaagaaaccttctcactactcatggtgttgcaattgcaatttgctgcctgtccttactgcttaaggaacctgttgtcagatcatcgtttgtccaggcagatggggttaagttacttgtccctttagtctccccaccatccactcagcagtatattttcaggggaaaattttccactaaagttgtaaataagttataacactctagggatgaaaataactttgaatttcaaatcacgactatatgttgatttatattgcttccttattctaaagtgaggactagacaaattagcaacgatttgatagttctgttttagttgtcagacaaaagaacaactctctttttgctataatttctcagtacctaattcatgtgatttgtgtgctttcgaccgacagcttctatatgaaacatgtctctacgtgtggcttctgtcctattatgaacctgcaatagagtacttggcaacatctaggacaatgcaaaggctcacagaagtggttaagagctcgacaaaggaaaaggtgagctatgatttttttttctgttttttaatttgcataaatgtggtgtgatgcacttgttattatgtttatctgacggtattatatcttacaggttgtcagggtggtcatattaacgttcaggaacttgcttccaataggtacatttggtgcacagatggttgattttggactcccgcatattatccagtctaaaaacacaagcatgaagtgacgaggtaagaggacaatataaatacaaagcctgaggattgctgcttattaggtttttctatggggaagatgaatttcttaaatttctgctaaatgtacagtgaaaaatcttgtttatagaagtgatgctgataacattagatgtgttaagtacaagttcatggttaaacccgttaaattttgaattttaaggacttgttggatgcattgaatcaaccagaagaagggctaaaagaaaagatcaggaaattgagttcctttgacaagtatatgcaagaggttcttcttggccatcttgactggaacctaatgcacactgaggccaatttctggcatgggaatgtcacaagctttgaggagaatgacttccaggtattccttctttaatcctaactcgggaatcaaccaccacaacaaaaccctgaagcacctgttaaaaacttgttggatgcagatactcaagctcctcctcacgaaactggacacgtcgagtgatccaagatcgttggcggtggcatgctttaatctatcacagttcatacagtaccatacaacagggagagtgatcgtaacagacctcaaggccaaagaacgggtgatgaaactgatgaaccacgagaacactcaggttaccaaaaatgccacttgtgcatccagaggctgttactaggtgctaagtatggacttgcatgcaatcttgatcagacttgcatactgctttctgtatatggaaagtaaccaaaacacacacatattttgtccaaagaaaagctgcatcatctgtttgttgtttgtcctcgaaaatatctgctattgtatgcttaaataaattttatagatttcacatattatgtatattctaaactttttgggcatgcttcctactctggttccaaactttttgcgggcatgcttcctactctggttccaaactttttgcgtcccacttagcaatagaaattaaacgttatcttgttatttttgttttaataatattttaatttaaaagatatataattcaaatcaatttaaaagttttctttcaaatggttaatttaattttataaagttcatatattataatattctaaactcgtcttaccatctaattcagttcgatgaaattaaacattttttattgctttttgttctaataattcttttactaaaatatttctaattcaaattaatttaaaagttttcttttgaaatgattatttaatttctaaagatttcacatattataaatattctaaacgtttaataaactttaaataactacaatatttatcttttaataaagtataatattaataatgtccaaaatttctcagtttttaagtaataagaattgatggaaataaaaaaaaattattttcttaaaaaatacaggacttttgttataatttaaaagatttttatataaaagttgctacatatggtaatgctaatgttaaggattttagattttgtgaatcttggtgagataaggattatatgatttattatatgatattttgtgtataaatcgtttggctaataagttttagtcccccgattttaattcaaataaataaattcagtggtttgccattgtaaataagtgtcatgtagaagatttatttgctaaactggctgcaaaaatgtatatgtagattaatttccaacatcttagattatgttattttttttttttttcaagtcttcacgtacgtggtgtggtttggagtaacgcgaagttggtccaaaagcagagagactctttatattaaaactagaaaactattaagaagacgcaatagtattatgcacgttcacatttcttggtattcttttacattttgttgtttctctggtcataaactagattgactaattagccatcaatcattttttcttcagtgtttttttcaacaatggacttttgttataaaactatctgtttagtggttgttgctcgattttatccaattctgtcacagaactgagaaataacattaaagtaaataatcttctatactgaaccggtaagatataaaaatttatcaattttatccaattaacatcgaagtcccacgacgtatggtgtgaacagtataagataaaattaaatacttttagaggtagtcgtacgtgagtacgtgtataagacaacacagctgataactccccaatttccgaccaatgcattgtacagtattatgtattcattcgtgtgtacttttccccataaaataaacgatttagatttaactatataagaatagaaagactagagaaaaaataagagaagaataagaccaatgcaatgtatcatgagttgtccatttatttccccatccaaaattcacgtatattctttacacacaaaaaaaattaaaaaaaattcagttacattagtttatgtaatttttttaataaatactgtataatattaagaaaaagcaattaaaacgagagagctaaatcatttaaaacgttttagttttggataccaatgtgttagtaaaaagcccaccaagcccaatagattttatttttgccaaaaaaaaaatcaaagaagaacgaagcctttcttctccgccgtaacct

SEQ ID NO: 38093 - DNA, 4155 bp, Arabidopsis thaliana landsberg
tcatcaaacagtttacgtgagagaagaggacgtgatgatgcgagaaaattatacgaaaatcaaagtatatttacatattcaagccgtaccacaaccgaacattaattagtactttaaaatcctataccgtatattatatttgtcaattcctaataagggaataacaaagagaaaaaaacaaggtctcacaaatttaaaattcacgaattaagacatcgagtggacctacactcacagtccatttgatgtcgttattgacctattaataaaatgggcctggcccaatatacttgtggtacaattaataccaagcagaactcacatgtaacagcccacacatttttgatatttccaatattttttattaaggtttaacccaaaaaataaaaaataaataacagtgaggatatttgagaaatcctccattttgcatcagctaaggtcaaagagaaaagagaaaaattaatgcctcgaaattcaagtttcatgtaattgttgcgtttagtatttacaacatgatcaatatcaatacatcattataacaaatcgaatctaatttcagaaagctaaagtggaaaatgaaaggtcaaaacgttacagttatggagtctgttactaatattatcacatgataaaaagaaagatgagaatatttgaatcctccatttttcttcaaaagtaagattccgcaccttgaaagagattattcaacaataagaacgaataatgtttgattaaatgctataattgaaaaataatgagtgtgattagctttgatgggtaggttaattagctactattattaagcacttggtgcatcttaatccaagtttgttgggggtgattaattgggtaattaatctattcctaatgatgaatgaagcaaactattcaacatcaaactaagcatttaccaactaaatatctcaagtttctagtaaataaaaattcagtttaattgagagtaaatgagaaactttgaataacgtaatggaaattatgtgttctaaagttaatttgtcgacgaattaattatcattttggtcttttgtctctcttgaaatcataatcaacttttggtcaaaatccttttttgtataattgtaattagaaaacatccggcaaaccatgcatgtgacagactatgatttctatacagtagaaaatgtaattgcctttttgttcatcgaatggcaattaagtttcaaaaagacaaaaactaatattcttgatccaaagaaattcaactatgcaaccaaatcttttctataaagttaatcatgatataaaatgtacacagatatagacaacttttattttctgtaatgatatcacataactacgtactgtaattatcacaatctgacctttataccgtaaaagtttcaacaactataccatatggtatgatgattattatatctttctacacaatgttttggtatgtcactcacttagtcacttcctctcttccatttccgttatccactaccgttcaacaagtggcatgtcgttctcgcgaaatctgcctcgttccataaatcaatctccggtatatagtaatctggtgttaaaccggtatgacaaccggaccggttcagtccatgatacggtgattgtgaagtctcactaacggctggtattgaatacgagttgggcccatttaactgtgaggcaacgagccgatccaaagcggcccagctagtgatgaagctgggatccataactttgctgacgtggcagttgttgacttggtcgtcgattaaccgctgataactcgtgatggtggtgttgttatggcattcgaggttagggagttttaagaaagggtctaaaactatctctcctttacaagattgccccataacttcgagaagttgctcgatagtctcctcattgaacgacggcgttttcaccgaactcgccgggctactactaatcatgtttttgcaaaggttatttttcttgaaaacacgacacaccacccatccttcgtcacttcctatgacatcacacgtttctacgttgacgtcatcatcgccacacgaggagattaatacactctcgtcgagtctatattcgtgcatgatccaatcggatttctgaccatgaggggctcgacctttgtagaagacaagcgtctttcgcatcccgatcctatcatcattggtatatatggtcttgtcacgtcccgtcgctttccaaaatcccaccgtggtggctctgttggttctagtccccgtgggatacttcttgtccttatggctaaagaaataccaatcgttttgcggggtcgttccaatcttacacatctctacatagaaaaaacaagagttgtgttaagttttgactgaattttgttactgcaaattttattatcacaaaaagtatatattactctgcaaaatttcctgaattcagagctttagttcttgactcaacacatgcattaaaaaactaatttaattaatatatacaagccctattaatacgtttcatcaagaataaaagataaatgatgaaccttgaatgtcccaaggctcgagcttgttgagatcaacgtcgcgaatgacatcaagatcgatctcgatgctattaactttcttccggagataatactgcaacagctcttcctcggtcggatgaaacctaaacccaggaggcacttgagattgtccgttcactgatatgctcattgctaaagatagaaaaaggagaagaaaatagaacgagtttataactaaccaaagtatgtctatatatatgtgtatattttttacatcaactctgcaaaaaaataaataatagtacatgcatgagaaaatgcatgtgttcttttgctctcatatttttaattcctttgttaagttttctttttaacagtggagtattatttttccgaatatttgatgttttcattataagttcgcatgagccgccacttacaattaaacatatgagcctctaagagcttgttttaataatttgaaaatgtctgttttatactcatagtgaatgcacttctcgaaaaattactccctatgagtttttacttaattcttagttcataccaagtatatccagccaaaacaaaaaaaaaaaagtatatcgatcaagcttcttcggcctttggttttgccgacttttcgctctactaattgcctagattagcatgttagttttgttttgtttttgcttttatccagaaatctctcgtaatggttgattcgtcatgagttcacctagtatttaaaaatctatctatttttctgcatgattcagtatctctttaacaaagaaaaaaaatatgattcagtaaattagatccgttataaatacaatgttgcaatatttcatctaataaaagttatagtaatgtctctctttttttttttttttttgggtcaaatatactaatggtctctttattaaacatcgaaattctttgctctttttgtccggtgaaattgtttatggcaatttcgaaatagtgcgtgagagagagcggtgggaccatgcacgtagctattgggtaaaaatatggtccacgcgggatccacatatcaactataatgtaggaagcaagcccacatcgctacgatgaccctcgaccttaaaaatctctatggacaagacattcctcattttattttttattttatatagaaacgaatagtgttaacaaaaaaagtgaatgaagggtgatggcaacaaaaaatgtatgtgatgtgatgaagaaagactttatacattattgtgttaaatacgactttaaagctcgtagcttgttcttgttgaaggtgatgcgaagataatgatatactacatgataatccacaacctccttagaagatggagagaaagaaagagattaagatgtgattcaagaagcgtttatcaaatatatgtgaagttaacattgcaacgaatgtctaagattcgaatattgtgcatgtggttcactcgaactaatcataaagttaacctatctggtattcaggaaacgacggtggattcgattcatccaaattaaaattttaaattattgtattaatttaaacttgcccgacggcatccatctagatgaacagttgtataacaactgtaaacgaggaggtatctacgtatgttgtagattttgtgggggcctatttc

SEQ ID NO: 38094 - DNA, 2575 bp, Arabidopsis thaliana landsberg
  unsure (1)..(2575): unsure at all n locations
tgtatctctgttgacggcaacacaagaacatggccatgtgacctacccactctttctttcttctttttgtcatttcttcatagatttcttttttgcctaagaatctaccccttaacggtgtcggacgtcatagattgttacatccaccgaaaaaaaaaaacattattgatttgtatcattgaaaaggctatcttatatattgctaacttgttttaggtatgagaatcctaccattttattcgagaatttatatctcatatcatattttacttttatagcaatattatatttgaattttagtgaatttataaaaaggttcttatcaaaatatctgcttactactttaacattagtgggagaccatactagttagcagtaaacatgcttatacgattttagtatttattatacaagaaatattatatagttgctggtgttccattcttggttagaaattattgtcatgttatagcgtaataaggattacgtggaggcccgttttggagtcttactaccggccatgcttttgacttttncgtgcctccacgagttttatgttaagctcattaatgtcgtgaaacgctttgcatagtttctcagatagaacagtgacgatacagatagtatgaaaaaagtaatttagtcttatggtttagatatgaaaatataatcagaattgaccatacaaatatactatactatttgttgacgagttccgcgaacgtcttataatttgtgatagtgtcggaaaaattgtgagctttggaaaaggtaaaaatttctgaaaagttggatataattgtatttttttcaatcagagttgaagaagttgttaagcactagctaattggttattagtcttcagccatctaagtatattgattacttagtgagttgttgaaacaaaattttaaattgatattaagtaaaagtaattagtaatgttacatcatccataagtgtcttaaatataccacagacaaaaaaataatgattgaaacaaactccaaaaaagttgggataacaacatgaaccggaaagtgtgaaacttggaacttggaggcctaacatttgacggtggcgtgacgaccgccgttgaaatggtggccggcggctactaattttttgaaaaacatcaatttcatcactcaccaaactatctccacgtgttacatcgtatctaataccgtatcccaagagatttaattagcctaccgaactcatttgctaattaaagtaatctgattgtatttaatgaattaatttgattcacttcgtacataagactcaacttgattcactaaagatcataacccgtctttagtattactaatccctttctctccaagtatgaattctcattcttttcttttagtttttatttgatcattgactttggcccaattgcaaattaaatacatttcatatttcggaataacaattgtttggtgctaatatttatcttaatgtgaaatcaattttcaccttttcctctttaggctgttatctaaactttttctttgacttttgagtacttaatatttcattttactttaggatagatgaaactgccacagatcttcattcataagtttgtgcatgacttttggaacgttgaattttctttctcaattcattttcccccaacttaccataaaaatgaaatttcatagacaactgtgtttgaaaattctaaccaggttgtactaatttgctatgcatgcatgtgttagagtgtcactttagacttctattttaaagaaaaatgaaaaaaactcaaaagacaaatagtgattccaccaatttattaattagtcactttatcaacattctaaattaggaactttctctctctatctattgactatatatacaataacaacacttcattgttttatagcaatcttgagtcttaagaatttcattgaatttatctctctcgctctctctctctttatttctcacccaaagatcaaagctcttcatggccgttcgtctaattccgaccatctggctcttcatagtctttgccgtcatcgtgtcagccttgccttcgctggtatcttaaagaaaactgttggaggtgaagaacaagaaacttgacggtgagagaggaagagaagagtcacatgcctcatgtgaccaaaactagtacgttaagtgctctaccaaaggggaaaattcccaactcgacaccgagcaaaaagggtcacgcggccgtcttcgccggaaagctccgatcacgacatctctccaccgttgatcggtatctccgatccgttcctagtcccggtgttggccattgatagtctcggctagattcatatatatatttttttcttccatttagtacattctttattctaactatataatacgaaatttcctacaaggtatacctttgtttttagaattctttttttttttcaggttactacaacttttgcatatgtaaattagtcaaaagtttattttcttccatatcacacgaggtttaatatcctatcttgtaattagttaatgttacttctcattttataacaagttgaatcttactggctatatatacatcaaa

SEQ ID NO: 38095 - DNA, 1152 bp, Arabidopsis thaliana landsberg
gggccgatggtttactatatacccctcaaatgcacaccagtcaacactattaacctatgatgcacgcgtctgacgtacctgaaacgtgatgggggctggtacttcacggggacaacagggaaacatcctctaaacgtttcatgaaacagagggacggcaagcaaaaaacgtgatggagaacgtatgccaaacatttatgagatattttaggtgtcccctttataaaaataggaaatttataaaggaataaaagagcttattctagggtttaatattagtgaaagctgtatacaaaaaccaaaccggtttcgagttctcagaagcataaagatgatcagagcatagacctaaggagtctaccagtactgctttcctaagcagttgagacattttggtacccggcaaggttaaaacaaagtatgcaaattttagtctaagagaaaattattagataccatatccaaatgtcttatcagagttttgctctctgattaagagctaaaaggaagaacaaacacctgagaccatcgcaagtagggcaaagacatggattgatacaaacgggatcatacaatggtgaccatttaatcgttgcgtttcctttgcataatttgcatatgcaatttccttttccacgacacactctacaagccattccgcttttcttccgtttctcttcaattgtatatcgaaatgctcctaaagctgctgaagaaaccgcggttattatcacaaacccaccaacagcaacgcctgcggtggttctcaagaatcgaatcggttctagtggcatctcttatagagttattgtctctgtgcggaatttcgtcgaacaccttgagcgcgtatttccgttgatgcttatctttcctatccgactttttccaattacagtatatctcagattacaagaacaagaaaagggaattaaagggggaaataaatcagtttgtttcccgcccaatatatgaacacaaaatcagtgatttaggagttgcagactcatgagagctgagagagtggaggaagaagataacagggtttgataatataaaaataattggttggcttgaccatttagccttttattaaataccgaccgaatacattaaaccgagaaaccgaaacctataccgccaactggatttttac

SEQ ID NO: 38096 - DNA, 1894 bp, Arabidopsis thaliana landsberg
  unsure (1)..(1894): unsure at all n locations
gatatgttccatcaaaacccaaaaccaagttagataaagaaattctaacaaatgtttattatatatagtataagcgttacttcttatctaatacccctactagttccagaaatatatcagcagcctatctcttaccatcattaaggacaattatggtccacaaacaaaatatcatgtaattaagatggctggtagcctgttaggtacttcagtgtatgtgaccttctagttttcacaatcggttgacctacgtgaaacgagatctcactagaataaagacaatgcctcgctttatattcaattaactaacctcaggcattgctttggacgcctgtttttaaggcatttccactataactataacttttgctttttacttttntccgtaagatgtgaactaaatcatggggagtggaaattagtttaattacttataaaattgaggtctactcccacgttttcaattcaattaaatattttttgtttttgtttttgttttacgattatagttttttctttggattcaattgctatagtttctagaaagctatatatgtatatgtacattctgataatgtgtgaattttctcatacataaaactaaaaaatttcaatagattaatatacgtatagaatctcaaacactccttcatgctttggtaaaagttgtctgctttatgacttttttcttaaatctagccaactgaaggtttctaatttcggtcctcgttgtaaaacgttacttttgactatatttaattaaataaatttaaaaaacataatgattagcaaatgaaaaggtacgactgaaaaagtattgcatgaaaaattgattttattttcacttttaatacacattttatcacatagacataactcataagtcattacacggttttgacaaaatggtcgtgacctgaccaaaatatttttaatgaaaaagactgaatccaaatgcgtactattgaaacctgagaataacgttttatttttatgtccgctcgcgatatatcaaactctatggagtatatacatactttagttaagattgaagagtttttttttttgtttgagtttgattttatatacatttacattgatataatcttcctttatttcacagaaggcattttcgtaatctttcctacaatgtcatctatatagggtttgaatgtagacacaactagttcacgttttgaaaacgtgattccgttacttataattaccattcaaaatatttatttaattttgtgttttcactatatcgtataccactatcgtgttaaaaaaatgtgattaatttattaaaactagttttttttagcctttcataagtattatacgaaaaatttctctcgtttagtttattcagttctttcgttattcacctgtaaattccataatatatcaaacatagatggtttgaaagacaaatattatcgtaaacagtaaactactcaaccattttaacagtaattatcatataaatatatcgtagtgactataattgacagaaaagcttatcaaaatacaaagaaacatatcggacgtttattaaactaacgaaatgctttacatcgcaggaaatatatatccaacaactgcgaaaaaaatccgtcccaaatgaaactggagagaaataattactaaacatttgatgatatgcatcttaaagcacacttaacaacacaagaacaaggatctttaaatgacttaagaatctccatacaacaaacttaacacctnnnntactactttcatggaaaaactgattttggattcttcgatcggagaaatcgatgatgaatatgtatatgtatgtaacgtgaaaccaattaagtgagctttgataagccaaaactcaagttcttcacaacatcctcgattttcatat

SEQ ID NO: 38097 - DNA, 793 bp, Arabidopsis thaliana landsberg
tctgttgccgaacgagccatagacacattcttattgctttcttgagtctcagacatttttttttctagtgactttgcagatgatacaacatcctgcactgagagagttttatttccatacttcagagtatgtttaagttgaatgtagctagttggcagtgaatttaggatcaagacagcttgaacctcttctcccacatagatcgataaacttcctaactcagcaacaattctcaagaactcatcaacattctgatcgatagtcaaagtatcaaccatcttgaatgaatacaacttcaattgcgtatataatcgattaggcaaagaagcttccatgaacaatttgttcaacattgcctagattctctgcagcggtcttacagtgttgccccttcaaaagaactgtatcagcgatgtgattaatgatgaagttctttgcttgctctgactgctcaagtctgatcggatctggttcttatgatcgtcttctttgagtcagacgcatcatcatcagattctgattctttatcttctttctttaccacaggaacagcttccgtccacgtacagtccaaacggctgttcttcaagccctgttctcccatctgatcttctactatcatctttcacaacgagaagtctctatcgccaccaaacggcttactcccaaactttgaaccctttgtcttcgaccggaatgccgataccaagcctctgataccagttttgtaagaacttttacgcgcaatgcacgctgccctgtcatactgtgagctcatcaccaggccgctaat

SEQ ID NO: 38098 - DNA, 3198 bp, Arabidopsis thaliana landsberg
  unsure (1)..(3198): unsure at all n locations
gtttacgggtttaaggtttaaggtttagtgttgagtagcaaatatgctttaagaagtaagaagaatcttggtatgcattttggagtctaatatcactagatgacacatgtatgatttagttttagaactaaaaccacaaccaaagttagaaacctaaagtagtctttccctagataaaaaaacaaatattatacggaccttggctacaccatcaaagttttgagaagtacgaagaagcttggtttgcgctttggagtcaaatatgaatagatttctagtgtatcattgactataacaactagaacagcaaccgaatcctggaagctaaagtaggatatagggtttaggggttagggtttcagatatgtttttagggattaccaagcttcttcttaaagaataaagcagtctttctttgtcaggagatccaaaaccaaaaaaacataagaatttcannnnnnnnnnnnnnnnnnnnnnnnncaagaagaaacttggtttgcgttttagtgtcatatatgactagatgtcctctataagattgagtattaaaacttatcttgaaagataaacaagtgtttccctattatacgattcaaaaccaaaaaactcataagaacttcggcttcaccatcaaagctttgagaatcaagaagaattttggtttgtgtttttcactacaagaaaacacgccagttgcgagggaagaaaccgtcgctagtccctcgcaaagagcagttaacgagggaattgcgacgaatttcagttcctcgcaaaacgtgcgtcgcaaaatcaaatccgtagcaagttcctcgtaaaatttgcgacgaataaattacctcgcaaagcacacgcaatttgcaagggacgtaatccgtagcaaattcacgacaaattacgggtctcgcaagtttctcgctagttgcgacggagcacctgcttcgcgaagcacacgcaatttgcgagggacgtactcggtagcaaattagttgcaacagtagccttgctctttcctcgcaagttacgagggattacgtcagtagcaaagtagtcgcagcttcgttgtcccgcgaatgcctcgcaaatattacgatggagttgcgtggcttttctctgtagtcgcaaatccgtagcaaagtttgcgatggattcgcggtaaataagcgaatctttcatgttttgttttaagcatgattactgttggatttagggattactgttctacttaacaatatttaatgattatcttaattggatttttatactaagctttgtagttcaatactaattaagaaaccttaaactcataattaaaatctgaaattttaggtttcaagtacagaaaacaagccaacaaataattttacataacaaccccaaaaaagattcaagttttgatgagtgaaaaagaaactgaatacagaatgttagaaggcctcagatggagatgacccagtgtttgggttagctacaacagcctcaggttcgacagccttaggtccgatcccagcagctgtggcattaggcgcatcaggtggtttggctcgaaacaaggcatcgaacttcggatccttctcggcaaggtaatcaaagtatgcgtcaaaactggtgatcttctcagcctggtttgcaatgagggcttcagcagcagccagcttctgggaaagcacaaccggatcatctcgaggaagcaccggaccggtatgagctgaagacgcctcatgttgcaatgaaccagccccataaatcctccctttctttttaggagcaacatgtcacaaactcacaaccaaaccaagcaaacataatcaaagcaaagtagaaacacttagacataatggaaaacttttagcttcagacataatgatcttaggctgaaaatacaatgatattattcagaccaacaacacaactgaatcaggccaaaaacacaaagacacaacatcttcaattcagtttcacaacataatcatatcagtttacacacactaacattttgcaaaccaaaaacataacatattcaattcagtttgaaacacaatgacacaatgcaagccacaacagacaaacacaaagcaacatacaaaactgaaactatcccaattagacaacttttagctaaagacatagtcatattaggccgacaatacaatgattttattcacaccaacaacaactgaatcaggccaaaaacacaaagacacaacatattcaattcagtttgaacctgcaattatcccatcaaagacataatgcaagccacaacagaccaatccaaagcaacaaaaaaatgttgtcttctatattgaatgaaagggataaattacttgtgcatagatcttgttctttgcctgaacagataacccgcctgaacccgtgctctctgtagtgtcgcctgaacacagaagtgactcttcctcgtgaatcttcgatgacacttccttatagatttcctccgactttctatcgatgaaactcccatcaggtttcctgtgtgtttcatctaagaggaggagaaagtctggagtactttctcttgtcatctcacactgaaacagataaacatataggtcagttgtttgaaatacaagttttttaaaggaaaaaatacaatgaacttacacgtttgcgggctctggctttgtatgaggtctgtccagaccggtgtttatatatcccgaggccgtccggatcatgataccttgcattcctactgttgatactctttctttccgacttcggatccctccaaaagctaaccagacctttccaaacttctggatctatccaccgcggttttgcctcatttcccttctccttccacttgtcccttccaacgaccaacttgatcagacatcctatccttcatctttgcctcaaactccaatctaactctctggtttattgcagggtcccagttatatacttgctacaaaacaaagacaagacacattagaaatagacaagaccaaaagctgtaccaaacaaaacacaaaattattccacttacagcaaatgtttcaaaccatctatcgaccactgcttctgatgtctgtgacccatttgcatgaggctctttgaaatctttttcaaaaatgctccagacagtggctgcaactgaggtgtcatcgtcaaacctacaaatcaagactccatcagatagacaaaactaaacaatcaagtaatagtgaagagaacaga

SEQ ID NO: 38099 - DNA, 2359 bp, Arabidopsis thaliana landsberg
  unsure (1)..(2359): unsure at all n locations
actaattctataagatagtccagatggaagaactcaattcgatttgagttttagtaaagtaatttaatgaatcgtggatcgggaaaatcatgaaaaatcacttgcaagaaagtgagaaacaacctatggaccacaataacaagaatttgtagtaaaacaaagaaaaggttttaagttttgttggaaacttacttggtcaattctactcgtggtaatgtggtggacaagccttaaatcgcgattacaagcttagagaatgttgtaaagaaatactccaagaagatggcatatttataggacgagaagaacaaaaataaaaaaatttggatatccatcgcagttattacagattctttatttctataaatagattcctaaatcgttgcgttttgattctatattctatttttgtaaattaaaagtccatgcatggttagatattgcactgtcgtctaggttcatttttacgtttctattgccagctctaacgattttgactgtgattcatctttaattagataattaagatctattgccagctagctctattgccatattaattacataattatctctaagactaaaagatcatgttctgatgaaacttgtcaacttgacatgtctctaactgcaaaacttatgaatttaatgtacgtagaactttttaatattgactccgatgacttatttgatgtttgaaatcatgtgtaacaacttttggctcgataggcctaatatatttattagcttttcacaaccagattcttgaatgagacttttctagccgtcatgtgaaaatgatgtagctaataaatggtcttctttttttatgaataacaccgactcaaaggtaatttcaatgagaaaaatatgagcattttaggtatgtcctcaaacaaattaaaactgtattcaaataattgatcatcttgctacattatataatagaggtggtgatcaaacatcatagcatagtcatattgttaagatgtctcaaacatcgtcgcattaggtctgaatcggcagggccggtccatatactaataagtaataaccaaatgttatgaactacgcgagtgtgtaacataagatgttaaaatggttggtgaacgtgcattaaattgttctactgaacgcgttattggttttaagcatgtcgatatttgtagagattgtaatatgttgtacgtatagagattaatataaacgcgttattgatatgtatattacatttgatatcatgcgtttgcggacaaataaatatctttattatatacatcatatcgtcacatgtaatgtgtcactatatataatagaaaagaaatcaacttaaatgattgtagtccaatccccctatatagtcgtatatatctcatcggtcaagacacatatgacataaccaatttttagtttgagtgttctacatgcacgcatgtattcaacgaatgggttaaacgttaactcgttctcgtaagattatttttacataaaacagtgaatctttttattggtaaatatacataaaactgataatagtaataatctaatttagcaactagtttatcctcagannnnnnnnnnnnnnnnnnnnnctattatgattgcttagtgattagatagagccgatatcaactcagtttgtacgcacaagacagaagactaatgaataatgacaatatatattctcgacccatttcacacaatgctagtacaagataaggtgctttcgtgtcatagagattttgacaaattgattataacttccgttgactgatgggagcgaaattgacaaaaccattaacagattatgagcaagttctcaagattttttagttttctttctctctcggtcccaaaagaaaagatgacaatagctagcatcaacttgttagaaaaagacgatgaacaagtttgagaagtggactactgaaaatccaatttccacccaaccaattattctactattagtggaaaaacgtggtcaaccatctttgtcaacttcgccaatatgcttttcaacttcttaattaatgcctcaaatctcggaactacattttgtcacaacgctaaagataaaagagaactaaaagtagaaaaacaagagtttgtgaaagtttacaagttttttttgtagagagaattttaaccgtgttaatgttttgttccaaatgtttttgtttgttttggaaaaacaaaaatttggttgtttttatttcacaagttcaagagcacgcttgtaccaacaagatcgatgatcgtgttgtttcgattcgtgtcgaagttgacaccgtttcgttgtcttgtttattgatctagacatatttgtttttggctgatgaacaaaattttaaagtatatt

SEQ ID NO: 38100 - DNA, 2774 bp, Arabidopsis thaliana landsberg
ttgacgggaaaataacaaatcccatactataataatgacaacgtcaaaaggattcattatttcttcttaaatgttaaaaaaaaaaaaactgaattgatacccaaatgatgcgagaatagtgtccttttatatagaatgttatgacgtaaacctgtttagtttattaaaggtacacgaaatttcaaaagaaatttcaattttctagtaaaattaagacattttcaataaaaattcataagttactacaacttgcttttgagtatttcgcatactgctcataaagaagaatattcattcttggtcatgtaaaatattattttaaactgtagttagagtttctaaaattagtacatagagttctgattttgtcttcgagttccctttttcttctttttctttttctgtaatgaacactgtatatatttgatgaaaaataacataagaaaggtgtatgggttctctactattttaagttttaactgtatatggaggacaaaatgtagtatatcatataagaggttgaatatatgtttcaacggttaggatcattggtgtcctttttcatccaaattattatataaagagaaatgaaagtttcaagaaaattaatattttgtaaacaaagaatcatattcacacgatcattatttaccttatgataccatttccatcctcacgagagtttaaatcttacatttgtttttgttaatagtttatatgcaaagttaataaagagataatttcaaatcccacaaactatacgaaacccttaacctccacagccgccacaacctccacaaccgccgccatctcctccaccatcaccacctcctccacaacaacaaccattgtaatcatcagtggttacagctgcagctacaacagctgtggtggcatcatttcctgtcaaaacaacaagtcctccatcttttgttcccgttacacccgtttccaaatctcgtgcctgagacaaaggctctttcttcctataggagacacagcctatgacaatcaacgcgaaaataacacaggcagatactgcaataacgacattaacaacaggctccattatatctttttttttttttgaaactgaactgataccaaaaagatgatgggagagaatagtttccttttatatagaaggttaaggcataaacctatttagtttcttaaagatacacgaaattgcaaaggaaaattcaattctactagcaaaaaattcttgattactttttctttttaatgacatttcatatgtttcaaaattgctttgacttttattattattaaaaaaaatcattttgtgttttgtcgcttacacaacttagcagattgatgtttcggctcacagcccatacgtgttattcatgacaacaaccccctaagaattggtatattttcctactcagtttttctttctgttttacagcagacttttcattgtttgtaaaatataatctaaaatattgattaaaactttctagaactagtaaaaagttttgatttcatcttttaaagggtttcattccccttcttgttctctctttatacaatttttgaaatgagcactatattttatttgatataaggaaaacatattttccaaaaccaattatagaatgataaatcaatgtttaaaactcaaatgtgtttctattggttgtaatgctataatgaacataagaaaatgtaggggaaaacagaataagtaagtattcttacaggttctctattattttagttataaagataataatattgcttattcatgttcaacagttaggggtcggtacggtgtattttataaggtcaaatataaaatgagatcaccataataggttgaacatttgtaacatcattctaatgctatgcagtgttagttttggtcaatacgaaaacgtgcgacttacctattacacgtcagacatgcgagaaatattcggaccacattatttttaacgggtaattctattttaatatgtgtggccaatctaaatcttttaaatattcaaagttttatatcagaagatgtgatttcgatccgatatcattacatcattacatatttcaacatcattattcattacacagaaatttcattcgaaaaatgtgatttctatccttatttgtacaagtatggttctatgtatgcaacaaagcttttaaaatttgtaacaagtatccatacccacaaatatttgaaactgagatctcagatattaaagaattcagggaaaaagtgggacacacaaggtttccctgataatctaatttctaaaatgtattttgagaaattgatatgaactcaaaccaaatttaattactaaaaatagtaacattattgataatatataatttttttccttaaataataccataattctcagctaacataactaatgaccaggttcatgcaaatcaaattctcatttggatttattaaaccatctaaaccaatttttaactcagaaaattcttgcacatcagcttttatttcttacgttccttagactcaatagtcaatagtatttagcaaattcataacggagaacttcaacatttttgaaactaattattaatgttcaaactacagagatccaagtacactattttaatgttgtgtttgaaaaaaaaaaaaatgtaagacatggtatacgaactaatctttacccaaaataaataaatataatctttgacaaatcaacggtattactattacgggtcggctgtggatagatatataaaaaataacaaacaatcgaataacccat

SEQ ID NO: 38101 - DNA, 2958 bp, Arabidopsis thaliana landsberg
gattgtcttaataatgaagtagacttagggttgttctcttctgcccagccaaacgaggagacagcaggcgcgatgacagatgatctcaaaccagacaaaatgttggaaaatcaaagaaccgctatgttgcaggttgaagactttttgaacaacagtgagtccaaccatgctgttgaagatgagtatggatatactattgaggacgattcagctcaaggaaaatcatcacaaaatgtattcgatacaagtttgcaaaagaaggatatgttgatgctggatgtagaggttagtcaatttcttatttcagaattgtttgcgccttccaaggcacatgcaaccattaactacatgggatgttaccttctatgatgacttatttagttgcacgttttcctcagttaaatcctctaactatgatatgacgcttactacaatggtggttgatggatccgctaagggcaagtggatattctattagataagtatttggactggcgaaatcttgacactattccagcgatgtcatattagtacaaattatggttatacaggcaaatcttgagaagaagcagactgatcatcttcatcatctggatggacacagtgatgggttctcggagaacagttttactttacagcacagtggtatttcaaggaaaataatggataccaaccagtattaccctccctccgcattccaacagcgagatgtgccatactcgcatttcaattgtgagcagccttccgttcaagtatcagcatgtgaaagtaaatctggtattaaatctgagaacaaacccagtccttcctgtgcttcaaatgagtcatacacatcaaatcatgcacaatcaatcgagagcttacaaggtccaactgttgatgatcggtttaggaaggtctttgaaacgagagccaacttgctgcctgggcaagatatgcctccttcttttgctgcaaataccaagaagagtagtaagacagactccatggtgtttcctgatgctgctcctatccagaagattgggcttgagaatgaccacagaaaagctgcaactgaattggaaacatcaaatatgcagggaagttcttgtgttagctctgttgtggatgacatttcactggaagcaacaagttttcgccagcttcaacaagttatagaacaggtacaacttgtcaatagataattgttgatataaggaaaaggcttcctgggaatcggtaaaagtttgctgttcctttgtgattgatatcaaagtgtatatatgttaataaatttacatatacatttgcttacttggttgataatacacttgcttgctccagttggatgttaggacaaagctttgcataagagacagcttataccgattagcaaaaagtgcggaacagagacatcatggtggaaacagaccggagaaaggcgcaggctcgcatctcgtgactggtgaagcagacaagtaagcaccacatcctacataattattcaatatgttcaccctttatcacctgttgctaagtaaagttcttgatgccaacttataactttatataggattagactcgagtcttgacagatttagtaactctcttctttagaaacttccacttgggctcttgtactcgtccttcatttctcttagattctaatctttgatatctgtatgtggtctcatccaggtatgctggattcatggatatcgaaactgatacaaacccgatagatcgatcgatagctcatttgctgtttcacaggccctcagactcatctctttcatccgataacaatgttctgtcttataaatctcatccaatggtaagttaaaccttcgattcttacaccgccatttaatgtgcaaaacacagtgcctcattttacccatcactatctacacagattcctcagcccaatagtagtccgagcctgaggatagagaaacaagaggaaactacagaacttagacccgaagcagaagttgtaacaagtgacaacaattaaagatgtcaaataaaactggctctttcattgctgaagcattcgagatattgttgttaacactaatctcgattttggctaagcgaaattgctcaggttagttactaaaatcctgactgcttcttcattagaatcatggattttgtaacacagttgtatttatgtgttgagataactttctggtctagatttcggtttgaacctgattgtacacctggttgctcgaacctgattgtacacctggttgctcgaaccaggtctttaagatatgttcgttacctttgtaatctgttcaagttgttaagtagaggaagaagtagagacatagcaattctgtagataaagatgttagttcgttttgtaatgcgataaaatattctgctgtgtatttactctctttttttcaaaatagcgaattttagggttttattttccaataaatatttgatgatctcataaatatatatatttcaataatgatgaaattagacattccgaagcaaattataagattaacctttgtgtcacaagctacgttacagaaattggatttggatggtacaaatgtagtaaaaggtaaaagaaacactaatcgaaagtttgcctaagctgcatctcggtttcacttttccaagaagcgtgagaagattgtcctctcattcttttgctcttctctttatctttgatcgtagagcctttcttcttcgcgtctacgtccggtaatggccggtcaccacaaatcgggcataccattcctcttgcgcttgtatatgttttcggtacaccgcattgcacacacatcctaaactcatcatagaaatcctaatcaagctcatattgtgcaaatttatactaaagaatgaagaagagggcaagggttattcatacctcaagagatctgcagattcttctgcattaggattggttgcagtagatatccgcttttcaccactctctgaagatgg

SEQ ID NO: 38102 - DNA, 944 bp, Arabidopsis thaliana landsberg
agcctcactgttgattcccatattgatctttgaactaaaaaaacttttggggatagtcacgctatgtataatatcttcctctcaataattacagacaagtttatgcctagaaaggcagatgcccggacggtcgtgtagatgaaccaaatctattgaattgatttccattataaggggctcgacatgttcggagacctcctgtaaatctccgcggttgaaagtctaatgttagtgagtccccggtcccgatcgattgaccccgatatcctacagcttccccaattcaacagtcccatgagtgggactcgacataacataatcgacagatccaagatgtactccgacagtaaagggagtcaatggatattgattggttccaaaggttattaatcgattgacaagtccaagtcccaagatcttgatttcgaaaggcgacacatcgggaacctatatatatatcgtctgctaagacacgaccaattaatgtttggataaaaattctttctgacatcatccgatttttatttcgaggactcaccgaaatccgagttaaaggttaggttgtgttgtgaagaagatggctaaagtttttaagtagagatcattcaacctagcactctagaactagcaacatggacattgagactaattattttacatgcatattttggctctgaatccccactttcaaacctcactcctagcctagctctatttgttgcttgaggacaagcaaagagctaagtttgggggtgttgataacactagattttaaccattttaagcccttgtttttcatgcatttagcttagtttcatgcctcttttcatgcattcttagtccattttccttccttttcacattttgcattgcattgcatagcatatttgcatttggagtgttttacaggtgaaacaggtgcttttggacctattttgggagtt

SEQ ID NO: 38103 - DNA, 1114 bp, Arabidopsis thaliana landsberg
tcattccattatctcgtagattatgaatgagtacactagtaatttagaacgagaactcacattagtaaagaggatgaagtgtttgaagcaagggttgagatgagcttcttcttttaggctaacgattttctggaaatgagagtggtatatgtgagcataaactcggaatagccgtttaaagatcgttttcaccacatctttgaagttctgaggaaatggtgctcctgcaagaaaccaaaaattagcatgaggatgtcgatacaacattttgtttgttgatattgattgatcttcttgttagatgtcatagacattattatatttaccaagcctttgaggaaatatggtctcatcatcgagttgggtctcgatccaatccatcaagtattcaacatactttggagctgaaacctcaataggcttcttgatttgtacaccatcggcccatctgtattcgtacctgaaacgttgcaaccgacgcatttcaccaatggaatagttacatatgagtcagttgttgatcatcgagataattgtcactcaaaaacaaagactcttttccactttacaaatgcccatattgctccagcagtttcaaagttttttgtattcaagatcttaagagaaaacagtgatcaaattactatatcaatcatgagcaccaaaattacttatataatgaagaagagaaatctgtactttgggccagcagtcattgtaggacagttatcaggtgtgcagaactcggtaagggtgccatatagcaaattcacctgattaaagaaatccacagctgaaaagaaaaaaagcaaatatatcaacaattagcaaatcctcatgtgtgtgtacatatatgagtttcaacatcgtaaaaagaaaaagaaatcagtaattattcaactcctgcattacatccccaagactaagtacacaaaaaagtaaccatgagactgcaagcagagtggtactcactgtttacagcaagccattcatttgcatcctctcctggaggaagtcttacagcttctctcaagttcccactctctagggtggcatctatatgctttcgagctgtgcaccctatattaccaaagaaacaaacgttcacgagaga

SEQ ID NO: 38104 - DNA, 4412 bp, Arabidopsis thaliana landsberg
tattttacagacaaaaaaaacatgacattgtgttttaaattcaagactttgacttgttaaggaaacaccatgattcattattttttcttcatttgttacattgtcactagaaatatttgatctaattttattatgataatagactacatacaacatatgcgattacgattttgacatgtaatctattttaagagtatttaacatttaagcgtgttgaagttataacaatatcatataaaatgacatatctaaaagtgattttcaatattatgcgatcgattttggctaaaacttataaaaaaactcatgggaatctttaaaattagaaatcaagtctttttaataacccgaagtatagtgaatcaactgcggaacaaaagtggatttacatcaagcatgtgtgtgaaaccacatacaaggttaatagtacgttagccgtgagccgagtccaaacgaatacgaattgctacttcttctagctagggatgattgttttgatatgcaataagaacgttcctttcggtatacgaaagtgattgtaatactccgagttgaaagaagttttgattaggaaatgaatctgagtttggatgctagaatagaatctgccgcaccgttagtgtttagttgatgtgtctacatgactacatcatctttgtgaactaatatatagtaatggggattggattggcacaaaactttatttacggaatcattttcttaatttgatactaaaagttcgaaatcgaaattttgaaatccaaatgtggtgcaaaactacatagtcctatcttcgatttcccatcttcttttataatttaacatggataattcaaaagctattgtctagattacatattttggattcgttagtcacataaccaagaatgaaactcttttgatgaattatgtattttcaaatttgtattggagatccttttagacttcggactcaagtatacatgcataggatagttttcttttgtcttgctttaaattcgtgtcagcggagaaagcgaaaacatcttttaaaatctcatgaaatgaaataaaataaaataaaaactaaaagaagaaaaaagttgaaacttggaaatcatgcaaagccacacctctcccttcaacacattcttacgtgtcgtcttctcttcactccatatctcctttttattaccaacaaatatatttcaatcccatttatatgtacgttctcttagacttatctctatatacccccttttaatttgtgtgctcttagcctttactctatagttttagatagacatggcgaatgtggatcgtgatcggcgtgtgcatgtagaccgtactgacaaacgtgttcatcagccaaactacgaagatgatgtcggttttggtggctatggcggttatggtgctggttctgattataagagtcgcggcccctccactaaccaagtatttttgtggtctctttagtttttcttgtgttttcctatgatcacgctctccaaactatttgaagattttctgtaaattcattttaaacagaaagataaataaaatagtgaagaaccataggaatcgtacgttacgttaattatttccttttagttcttaagtcctaattaggattcctttaaaagttgcaacaatctaattgttcacaaaatgagtaaagtttgaaacagatttttatacaccacttgcatatgtttatcatggtgatgcatgcatggatcatatctagagatttatggttggatatatatttaacattttgatattagtttttaaaaaggtctgaataaacaacacttgttagataaactcgatataatcaatacatgcagatcttggcacttatagcaggagttcccattggtggcacactgctaaccctagctggactcactctagccggttcggtgatcggcttgctagtctccatacccctcttcctcctcttcagtccggtgatagtcccggcggctctcactattgggcttgctgtgacgggaatcttggcttctggtttgtttgggttgacgggtctgagctcggcctagtgggtcctcaactaccttcgtgggacgagtgatacagtgccagagcaattggactacgctaaacggcgtatggctgatgcggtaggctatgctggtatgaagggaaaagagatggggcagtatgtgcaagataaggctcatgaggctcgtgagactgagttcatgactgacacccatgatccgggtaaggccaggagaggctcataggctaatataaatcgcgggagtcagctggaaacgcgatacatgtagcttgacttttatgtcccagttgctttcctctcttaagaatatactttgactatatatgtgttcgttcgttttgtcttgttcaaataaaaatccttgttagtgaaataagaaatgaaataaatatgttttcttttttgagataaccagaaatctcatactattttctattgtaacgagttttcttgtattaaatttagaagaatatacaaaactaaataattaaatcgaatcaaaataaatcacaatcttagactcctagtacggacttgaattaataattttgattctctgagttcttgaattaataattttgggtcggttcggtttctctattatcttattgggccaaatcggacggcccattatctagctccggcttatcggacttcctcttccccggcgctgtaaattccaagtccctccgttcacgtctccaaactagccgttgccttctctctctccagccaaagcgatggcctcatacgctacgttactggagaaaactcgcgtacctcaaccttctatacaaagattcgcagtaatctccgtcttctccaagttacgatctgctccagaacaatttggatcagaagccgaagccggaagagaagctatctccttctgcctcacttctgaatctatcactgtcgttgatcaatccgttcatgagctatgtcgattagtatcagactcagttttagacctctctcgtggtttgctagaacttcaatcagctctcgaaggatgcgattcgaaattggtttcgctgttcgtgaaagggttagggtttttgattcgtattggttatgaacggaataatgggaactggaagtttaattcgacggagaatcatccgtttgttagggtatgtgatttcattgatgctttcgttgttctattgggaatttttggaattagctaggctttgatgtttcttgctattgctggtggtggggtttcagattcaatctagcccgagggagacacagacggagctttttcatcaagtatcactctttgggatgcataatcgaagattaggaatggtggacgtatgtgaattcttggagccgttcttgaatttcactatactgcggattccgctttcagattcgtcttcatcgttgtttgcgagggagttgatttcatcaatggcttccctttgttgctcatcccgccacgaagcactaccgatattcagattgcttatgcgatgtctaaaatatatcccgggaaataatctggaagtaattgtcaagatcctagtggatgcctacactgtggttgtgagagacttggttggaaccggattggtatgtgcttatttcatcatgcattcatcttaaactttgtgctcattgtctgatacccatttaattatttatactagcaggaagtaacagaagttcatttgctcggtgtgcaactggtggatggcgtactttttctttgcgcttctcctcatgtacaaacaaccgaacaagagtctgttatcgaatctttgaagcacttgttggctgttcagaaagaccttggattagcatattcacatgatttatccttggtggttctctcgctagttttcatgcttgccaaatctactgtcgagcatgaacaactctgtattctaaagtttctgctttttctgctcaaatggaaaactgaaagtggtatatttgtgtctccatctttttattcattaccctcttgctatgtgtgtatttttctgttgactgagaattgattctttggaatccttttgtagaaaacttgtcggttaaggatgcggctggttcaagtgtggagtctctattattgttccctatcaccgcactgatgtcttctccttctaaatcaatcaaagtagcagcaagtaaggttctttccatcgtagaaaatttcttggtaacagtgtcaaatgcaccaaagattgaggtccacacaagtaagggagattcaccactcagcagggtgggctctgtcgtatttaggttcatgcagcaactctggcatcagaatgattacacaccttccacgtcttccttcctcagagtggcttacaccaatggaagtgaaaaacaggaaacttatctaggaccagtgacttggaat

SEQ ID NO: 38105 - DNA, 2302 bp, Arabidopsis thaliana landsberg
ttgtataacatgagaggttacatgttattgctcatatctttcacttacatagcgcatcgcacgatgatgatctgatctgatatacggtctgatggtcatatgttcagtttttaagctaactagatgagttcacatacataaaatcataatatatgcgtatagttaaatatatttcaccatagaatagctagctaattaatacatggatcgatgccaaaagtcccaaccttatataagtgacgaggacaccaacatactattcgtcacgtcgacaaaatttagaacgaacttaattatgatctcaaatacattgatacatatctcatctagatctaggttatcattatgtaagaaagttttgacgaatatggcacgacaaaatggctagactcgatgtaattggtatctcaactcaacattatacttataccaaacattagttagacaaaatttaaacaactattttttatgtatgcaagagtcagcatatgtataattgattcagaatcgttttgacgagttcggatgtagtagtagccattatttaatgtacatactaatcgtgaatagtgaatatgatgaaacattgtatcttattgtataaatatccataaacacatcatgaaagacactttctttcacggtctgaattaattatgatacaattctaatagaaaacgaattaaattacgttgaattgtatgaaatctaattgaacaagccaaccacgacgacgactaacgttgcctggattgactcggtttaagttaaccactaaaaaaacggagctgtcatgtaacacgcggatcgagcaggtcacagtcatgaagccatcaaagcaaaagaactaatccaagggctgagatgattaattagtttaaaaattaattaacacgagggaaaaggctgtctgacagccatgtcacgttatactttttccgtatgatcgaaatgattcgtctttgtcgaatttaattatttccaaaattgatgactctaaagaaaaaaaaatagtttttcagataaacccgcctatataaatagttcaacactcggtttatttcttctcccctctttgaattgcctcgtcgtcttcagcttcatcggccgttgcatttcccggcgataagagagagaaagaggagaaagagtgagccagattttcatcgtcgtggttcttgtttcttcctcgatctctcgatcttctgcttttgcttttccgattaaggtaattaaaacctccgatctacttgttcttgtgttggatctcgattacgatttctaagttacttcaaaagttgtttccgatttgattttgattggaatttagatcggtcaaactattggaaatgttttgatcctggctccgattagctcaacgattcatgtttgacttgatcttgcgttgtatttgaaatcgatccggatcctttcgcttcttctgtcaataggaatctgaaatttgaaatgttagttgaagtttgacttcagattctgttgatttattaactgtaacattttgtcttccgatgagtatggattcgttgaaatctgctttcattatgattctattgatagatacatcatacattgaattgaatctactcatgaatgaaaagcctggtttgattaagcaagtgttggcgtttttctcgatcaagattcagatctttatgtttttgattgcagatcgtagaccatggccgatgctgatgacattcaacctattgtctgtgacaatggcactggaatggttaaggttagtctcttctttcttactttaaggattctcttaattttggcaagatctgatacaagttcctttgcgaaggctggattcgctggagatgatgctcccagagcggtttttcccagtgttgatggtaggccaagacatcatggtgtcatggttggtatgggtcagaaagatgcttacgttggtgatgaagctcagtccaagagaggtatcctcactctgaagtatccaatcgaacatggtattgtaagtaactgggatgacatggaaaagatatggcatcacactttctacaacgagcttcgtgttgcccctgaggagcacccagttctactcacagaggcacctcttaaccctaaagctaacagggagaagatgactcagatcatgtttgagacattcaatgtccctgccatgtatgttgccattcaggccgttctttctctctatgccagtggtcgtacaaccggttagttcttaactctaaacatccaagtctgagttatattatcttcttacttgtatttacttaaagtcgttctctct

SEQ ID NO: 38106 - DNA, 2973 bp, Arabidopsis thaliana landsberg
aagacttggtctgtgactttgtgagtgttgtgtgtctcaaagccttatttaataacctctctctcaactttatgttactcgcatttaaatttgtttctctgcttcactcttttgatttctttctacttctttttttcacacagatcttaagatactacaactgcgaccatggagcttccatctccttacagctcaagaaaggaggaatcaactgttcctccgaagagaggccgagtcaagatcatgatctttcgtgatctagtcagatcggaaacctcgatggcaccgcctccgaggagaggccgaatcaagaaaatgatcgcgggtgatctagtcggatcagggaaacagaacaactacgacggagacggtaagagaggaggctagttaagcagactctccgactacatacactttatctccatgccagcttccagacaatccctttctctgagaagatgatcggattttcatattcatttgaaaatcttgtatgaaatgtaatatagttgttggctttggcttcttctttcgaatatgttatacaaaaagtttattatttttgttggggtaaattaaagatttaaaggtaagttactctgtttcatacaaagtttgggcctctgggctaatgtttttgtatctttgtaaaaatgtaaatattatgtttctttagaagtttatttttgtatctttgtagtaaattgtatctttgtgaaaatgtaaatctacttaacattttgatgaactcaacaaaaaaaatctgattttaattgagggatgaaattgtagttactcaaaatttgaggataaatgtcgtaataaataaacatagatggctaaatctgtaattaacctttttagaaagagggtttattgtataattttttctcccaaatcttttttttttccgccgccgtgaaaaaatgaatcatcttctaatcttagcgagaaactcgctgcggcggcggaattttaatctccgaccaccgtctcgttccttcaatagcaccatcttaccgcaatcgaatcggtgagctctcatctcctgtataggcgttccttccttttcctcggtaatggcctctcctcctgattgtgaccccaaacaaaacaaacgtatcacaggtgtcttttggcatagcattcgatatcgatggagttattcttcttggttcctctcccgttggtggctctcctagcgctctccgacgtctctacgatgattccggtatgcaatcattgatttctagaacctgcttaattaggttgtcaacaatgtacattgttatagattgactctaggccaagtactggtttaggtttaatttgtaatctttccagtgtatgatgagttttgaggttgcttttgcaggtgctttgaagatacctttcttattcttgactaatggtgagtctttgttatgagtcttaaaataggtcaaatgagtgaattatatagttaacatcactttttgtcattggttatggcaggaggtggcttgcctgaatctaaacgggcttctgagatgagtcatttattaggtgttcaagtttctccattgcaggttgaaaccttgtcacatcatttcctttgtattttgtttctgtagagtgtggatgttacagtagtcgccaaagttaagttttagtaactgtaactcttttgatgtaatctctttgacattttgttcatgtctcaggtgatacaagcacattcaccctttcggaagctagtaaataggtaagttataaaatcacatagtgcacaagaaagaccttgcaaacaattttataagatattctattccttggtttggtcagaaagatgtttagtgatttgcttggaccaggtttgaaaatgagcttgttgttgcagctggaaaaggggaacctgccgcggtgatgtctaattatggtttcaagtaagcttagggctcttttcttgaattttctgattttcgttagtttctgcttcaaacttctgttcaggtgatttatacatgtacatttatttttcagaaacgtcatttcaatggacgaatatgcctcttactttgacaacattgatcccttggcgccatataagaaattgatgttcaggcaggatggtcacaaggagcttagatcaagagaagatgttctatcccaaagagttcaggcagcatttatagttagtgatccagttgattggagccgagacatccaggtttctcctgcttcacatatctttattttcagatgtgatacttatctgataaaatcctttaagcacacatgacacatcgtaataaataaggcaaagtggactttcgtatttctatatcactggcttcacgattatgtggaaaaaaaacaaaagaaaacacattttaaatggtctttggctgtagatcctcatagtttttgttgggggcagcagagcttggttaacattttttgctactaactcacggtgaatgaatactgattgatacttttggtcaggttctttgtgacattttacgaactggaggacttcctgggaaagaaattggacctcaacctcatttgtacattgccaatgacgatttagactaccaggttctggtgaatccgttgttatttctccattcttttgatttactttatggtatactgatgcattgtcaactaaattcagactgagtttcctactgaacgtcttggcatgggagcttttagaatcgcgttagaatcaatcttcaacaggtaataaccaaattcaaagcacacacattccatatgttcacattttttcctcatttgttcaattcagttttgcatgattgagtttgaatacatacttgcagaattcatgaaaaacctctagagtacacatcatttggcaaaccaaatccatttgtgttcaaaaacgcagaagatgttctgaaagaaatcgctacatccccttattcttcaaaccaaggaagtcaccacttcaagacactatat

SEQ ID NO: 38107 - DNA, 1956 bp, Arabidopsis thaliana landsberg
catcatagtcatatccacttatcggctaatacaagatatgttattatgtctggctacatgagaaagtcaaaacagaccaaagcaaaaagaatccaataataaacattcatcacttcaaccaaatctgagccattcattcaacatcttttccaaaccaatcctgacatcgttgttaccgtctaacttccgctcacagattctctcggttctgtcaccctcgcaatctggagaaagcaatgcagaaacaacactgggatgggggaagggaaagaatgaagcatctgaccatgaatcatgcctaagatttgagatcaaaacagtagaaagtatcttcaagaatagatgagagcatctatctatcttttccatctttctcgtatagtataacaacatttcttcaactcctgctaaacagtgtttcttccaagagtttgatctacttgatacaatggcaacatcgaagactgaacctgcaagaaccattgaaacacacattaattcactttgccattatatcactgaatcaaatctcaaccaaatcaagaaagcaattatacaactaggcacatacattttgagttagtccttcaataattaaagcaattgcaacacttaatccttcagctaattccataaacttaaaaggtactcagttctacaaatccatacaacagctcaaactttgtgaacaattcaaaaacagaaaatttctcataccttgttttcaccaataaactcggcatcgccacgaaccgcgacacaatctctcggagtctcgaacaaagacaaagaatattgctttcgaacaacaccaacgtcgaagtatataagaccagaactcggcacgtcgactcggattcctttaaccggaaaccacaagaatagctcttgcgccgagattccagacaaatcagagatttgagcagaacctatagtccccgtaatattggcgtcgtaatgtatctcagtctcgtatttagcctcgcatgcctgattcaaataaaccgagaatcgtcccgtttcgacgtcgaaggtgaattctctgacacctttcgggaatatccccgaaggtaatccgtttgccaggaggatctcgtatatagtctcagtctctgatatcgccgtggagatcgagatcccggcgacgagaacgagacatagaaacgcgatttgaacaatacgaagcatcatcggcttattcttcccgaattcacggtttgtgattttgacagatctctctctgctcgtttatcaggaaattgaattaatgggtttaagggaagacgaagaaggagaagaagaagaagaagacgacattctggtgacagcttgaaacagagtggatcaaaattttatcaaattattgaaggcggaatttggaatggagcagtaatcttgtgcttctcattccatagatggaacagaccaatgaacgatagccaagtcggaaatgtgtccaccaagcagtatttagttaaatgtggcttgtttcgttaagcctttggttctaacttcctaaatttcttacgcgttattggaaaaagtaggtggaccgtatcacatgggaacagagtggatctggccggacttgcggctattcgaatgtttatagatttttttctgtcttaaatgcctcataaaatacatagaagcaatgttttcttcaacccaaactaaaccaaacaaaatatttggattaatattgaaccggttcgattgaacggtccagttagaaatttgggcttgtaagtatgtaacttatctttgggcttataaagaagcccatctccaaattagcgtttcaccctcactcacttttccggtttcaaccattagcacaaaaaatctgagctccgaccaaaaattggggaacgacgatggcgacgactcttcagaaactctcctttcaaattcaccgactctctccattcaccagatctctaatcgttcgcacat

SEQ ID NO: 38108 - DNA, 3072 bp, Arabidopsis thaliana landsberg
acagtatacaaagttctctagtgataaaacacaaactagtttatattcttactacactaatcactaatcatgacaaagacttaaaattatccaaataataaaccatatagattacagaaatttccaaacccataatacattcattattactaatgtaacaactagagtctatattactaaccaaaattgtctcattgtcttctccatttaagcttcatgtcttctatacacaaactatttaagcatcatttcaatcactctccctctttctcatgtaatcgagtgtttcaaccataattgtcttattggatagcaaagctaacccgtttacctgattaatcaaagcaaagtttttgattttgtaatcaaatctaaacaccatacattagaacgttcttcaacttttgatctcgtaatcaagtttttgattttgtttactttcttttttgttaaaccccaaaattcatgaacaacttaattaacgttttataaaactcgcgaaatatggtgaaaaaaagccaaacaaaaataaatttataaaatatacctacattttaaacgtaaaaggccaaaaaataattcatataatgtagtatctctagtttgatgccgtaagccacatggctttgtgtttgaaaccactaaatcgaatgtatgatattgtaaacgaaaactatctgattcgtttgtctacaattgtgaacatcgatgtgtaaaatgtcaagacaatcgttatattcttgtttttcccgtttgcttaatggataatatgggaaaaatgataatatatagaagtacaaactttaaaaaaggaaaaaaaataagaaattaaaaagcagtgcagaatgaagcttctgattctcctacacaatcatcaaaaacttgtttttgaactttccatcttcccccatttcaccaaagtcttgagaaacttcttcacctgaaacaccattacggtgttaccgaccaaactcatacattacaaatttacatatataacatagcatagatgatgacttagataatataaaatttgtacctcggaagggtctctaagagagtaaaatgcattgctttcttttggtacagacgataccaatattccaaatcctctgttcccttccctcagtaccttgaatgcatcttcatcggtcttgtcatctccgatgaagattgggaggaactcatcgttgttgcttaatccgagagactctaacagaaactctactgcttttcctttgttccactcaatcacaggacgcacctctaaaacctgatcatatcaacaaaactatgttaagggatttggatctaatatgagaaaccagagtgatgtttattccacaagtacctttctaccgtgggttatacgggaacgatggtatcgtttcaggtggtcatgaacgcgttgagcaacaagtggccagtccttctcgtcaacattacggtaatgtacagaagtacaaaacttatggttctctacttttgcacctttgatacatttagttatctcaacgaggttattataaacctcttcaatgacgggtatgaactctttagcaggctgaaagaggtttacctcctcaccctattcataaagaaaagattagcatttacaaaagttgattcatatactgtttttaagacaaaatgaggtcatgatctctcacctgttggtcagtggtttttatacaattagggtcttcaggggatccatttggatttacaggagtcataatgtccatcccgtgactacccgcgtaatagagttcggttagccctaccaattggtaaacctgcattaacaaactcaaaatgtattagtgttttgactattggttggcttgtactgatacaatgttatggttaattgttcagaagtcttaccttgtcacggcttctaccactaattattgctgttgggaagtacttggcgacatctttcacagcagcacgcatctaagagagatatagaaaacaaacttagccatttacgttttgagatcagagagcaaaactaacaaaacagagattttagttctttaccgcatcagacatgatggcgcgatcagggtcatcgactattggagaaagtgttccatcataatctagaaacacagctatctttttcttctttgcttgagctgcaatatgcgcaaacgagctaatcgccgaaggatatttcacctgtttttcacaattccaaacaatatatttgttgagattaagaaacacatattaggataaatttagcgtttattacaagtaccatccaagcacgttgagcaaaatcatcttcaggagcaacttcaacattaaaatctttgacaagcttcttacgcggtggagaagatgaaatcattgcatctaaccaaccattggatctaacatcatcgagtttcgcaggtttcttccattgactcatcataaatctactagacacgccgagtcttgatttgttaactgatggtgaaggatctttaagaacagaggatttgtggtttgagtttaaatccattaatcaaaactctaaacaatgcttcaataaactctaaaaccaatgcttcaatgcaagaacttctgttttttgcttttttttatcttcaataacactctatccaactcgtttatctatgaaaaaccatctcttcattgttttcttgtcactgcttgttggtgaaagctccatcaaacaaaactgattaccagtaagaacaaataccacaatttagtaaagaaaaaatataagattttagttttaggaacattttgtttcttgactaagtaccttatcatcatatcaaattgttcatcgtaaactttcagattcaattagatattcacctgcacacaacaaatcaacaaagtgacttataatgtaaattttagctttttgaaatgctttatttggaaattaataaataaattaacttctataagatttccaaaactttcatgctttttaaacacaaaagtagtggaaaataaaataatgttttatgttataaaccgagtcgacacaaatgaaatttcatttttctaagcgaaagtaagtgttatatagttacaaat

SEQ ID NO: 38109 - DNA, 3627 bp, Arabidopsis thaliana landsberg
  unsure (1)..(3627): unsure at all n locations
gatgatttgagtgagatcttggggtaatggattcaattattaaccatctcaaatttgaataaaatatccaaatttggttattaaatgggtgaaaaaaagaagaactaatgcgaattaatgatcatcatctataagggaagagcactaactcaatgggagaaagcttgctgaagaaaaagaccctttaggacaatttgcatcataatacggtccattttatttcattggggaatttgatataactttaacgaaaatgaaacaaatattataatgagtttcttccgtataaaatcatcatactatacgtagacatgaccgaccggtaaattaatcctcatattatcttttaccaatgaaacaggcctccaacgcaccggtaaaagctgtagactaaggtggttaaactatctccgccctgacgtccgccgtggaaacattacacttgaagaacaactcttgatcctcgaacttcattcccgttggggaaataggtatgctaaattaaaataaataaaacagtataacaccttttccaactaaattatacaatatgtagttgatgagtttatttaaatgaattaaatctggttttacataaaattatgcatcaaacatataataagattttttttgtgaattggaaataaaataacatcataactattttaaaatggagaaaataacaaattatgtcgatgttgatggatgaaaagagattaaatgtatgatactgagatatactaatgaataataatgttatagacgccaagaaaataagaatttgattatcactactattagtttagaaccgttaatttatatcttgttattttgatgtagatggtcaaaaatcgcacaatatttaccgggaagaacggacaacgagatcaagaactactggaggactcatatgaggaagaacgctcaagagaagaacccccctatgtctcctacttcctcatcttcaaacagttgctcatcatctatgaccactaccaccaccaatactcaagatacatcgtgccactcgcgtaaatcttcaggggaagtgagctattacgacactggaggttcccgatccactagagagatgaatcaagaaacgaaagacgtgtactcgttggatgatatatggagagagattgatcactcaccagtaaacatatttaaaccggttaaagacatctactcagaacaaagccattgcttaagttacccaaatctagcttcaccatcatgggaaagctcattggattctatatggaacatggatgcagataaaagtaagatatcgtcttactttgcaaatgatcagtttcctttctgtttccaacacagtagatcaccatggtcgtcaggttaaaaattttaagatttaattcattgagataaatctgttttatatatatgttatataacttataaatacaataaaacctaacgactgtaatagttttggttgatgaacacaaaaacagcttaagtctggactctgtaatcatacaatgtgtagtagtagtaagtaaccagcctaagtctatgtctagaatgaataagaataaaagtcttgtgatcccactttcttttatttgtttgtcaatgtataatacaactcaatactctaattctaaagtaaacatttcaaaatttcaatttcttttctctgtttctttttggtgacatctctctttaatatatctaaggtttaaggtactataccaaaataagcaaacttggacaataaaattatgaagaaactcgcttattctgaccgaaaaaatatcattattgaatcttttgatatggcatatactctctcattcagtgatttagtgaagagacattaggtactacgtaccatttatcttaatccaagctaaaacaatattatatagaaatatgaagcaaaaaccacacaaactatttaagaacttacgggtgaatagagtaactccagaaacagaaccctaattagaccatcggtccatcacgacgctgtcaaatccttataatattggttgttggatgcagaccccaacatcctagccaagacgacgtcatttgtcgacatgaccgagcattttgaaaatttacaatttacattgtttgttttccctcccgccagattttgttcataaaaagaaaagaatctgtgtcaagcctcgaatatcctacggtgttggaagctgatccactatttaaaatgcttcaagtggtttaaatttcaaaacaacacaaaatatttttccaaaaaaagtatttttcaatacacatttaaaatttgagaaaatattttgttaatgttaaagtatcacttcatgataccgattaaaaacaaggagatttgagtacatgttaaatttataattataatataatataaataactaaattcataaatttgtttatattactaatattttctaaattaaaaactagtggttttaaaaaattgaaatttcttaaaaaaactaaatattagttagtgtttaggaaattaacgtttatcgaaaatataactggtgatttgaaataaaacaaaaaaactagtctaaacactagaattttaaaaaaaaatcgtatcaaataataaaattgtaataataatatttgagaatgctatttagattacattttttgccttaattactgagacaaatgtgattggtctactaatggattgccatgtatatttttatttatctgtaaaagtgtgagagaaaaatgtctgccaattcataattcattaaggaaattaagaaaaacaaatatattcggaaactacgcgtgtttgtatgtaagcattagattttcttatgaaactgaatctaactaagatttcttaatgaaactgaatctaactacgatcttctcattaaccgctagaaaaaaggaaactctgaccaaagtcaaagcaagcttataaaaaggaaattttcgtcttcttcttctctgtttttgttttcatcactttcagaaaacttttacagagaaaagcgagagaaagaagaagaatggagactgagtctgagatttctgattcatggtcaagcaacaactcgatgatccctcctcttcctcaaaaccctattttcactgtgaaactctctccgatcattctgaagaacaataaaagggagggatttacacccgaaaggtatagtagtctttggtctgaagaaataaccaaacaagtattcgacggagtagtcagaaagtcttcatcttggatcaagtctgtgttccttggaagaggctcttacggttcggtttatctggcgacaagtaagaaggccaaaactaaaacgaccatggcgatcaaatctgcagagatttcacgagcttcgagtctaatggacgaggaaagaatattaacccgtctctcatctcctttcatcgttcgttgctatggccacgagattgcacgtgaggagactctgttcggtggcgagagaacgaattacaatttgattctcgagtattnnnnnnnnnnnnnnnnnnnnnactgtatcaacagtcaccttggaggattgtcagagaaagatgtgaaacttcttgctagagatattctttacggtctcgactacattccagggcaaacattattcattgtgacattaaaccgga

SEQ ID NO: 38110 - DNA, 948 bp, Arabidopsis thaliana landsberg
cactatgcagaggtatgaatcaatgcatgggaccattttgcaaagactttttgagagcaatattccaaaaaatctaaattttctcaagtttaatattcataaataaacacaaaattccagatggatagaacataattgatgattttttgtgtcttccaatgttttatctgaatttcaatgagactccaaaaaaaaaatgctcgttaagctgatattgttttcaaaaagatttatgacctcattgaattctctaatattctaaccaaaaaatacaccaaaaaagagtcaaactaggactcgacacaaagtaagtacttgctaattttcaagtttctataatcctgtttggttttgttcaaaatagaaaataaaaaaaaatgatatctcatatcaaacaaaactggaacgaaaaacaaaactgatatctaacaacaattaagtaaaatttataagtggtcctagttcaataatgttgctgtttatggaaaccgatgtttggatttcattacaaaacttatatgacagttaaaaacgtatataataaaaatcgcaaacataacaatctttttgctttttaagaaaactataaagattttagcattagaaataaaaattggaattggacaaccttggaatgggcaaggcaacaagaggggtcttgagcttcaagacaatcccaaacttctctttcaaatccaacacgtggccttccggtatcttccaatcgaacgaatgtgatagtgtcgcgagagtgtagagaaccatcctctcggcgagtgctacaccggcacgaattctcgggacagatctaaatggaaaatagctataattggcaccagtgaaatcacaagagttatgatcaagaaacctctgaggacgaaactcagttggatgccggacacagtgggggctctcggactaggtcacacagtgacgaagatttgagtg

SEQ ID NO: 38111 - DNA, 2266 bp, Arabidopsis thaliana landsberg
  unsure (1)..(2266): unsure at all n locations
taacccctagggtgtgacttgtgagtgaccgaagatcttgtcattcttttctggcttataaaaggtaactttaacagtgacatatgtattcgttcatcttcatatttcatgagatatttgaataaattttataaaaagacccaagagaaacaatttactttcataataaagaatttaaaaatcgaatataatcttacgctttaagatgatcaagatgttctatagtgaaacttgaaaacttattattcctcacactggaggacataacatgttaaactggtttcttcattgcagccagtatccgaattcatgatttttaaagttttcttcagtaagataaaaaataaaagtctagtacaccatttgaactatcaacgtaacgctgaatatttcatgctttcacataaaaaaaaattggatggtctttaataataacattaaaaggtgggttgctttatataaatagtttatgatgtacttaacaattgacaatttggccgagtggtctaaggcgccagatttaggctctggtccgaaagggcgtgggttcaaatcccactgtcaacaatttactgttttgtcttttggtgaatgactcttcttaaaataaaaagagaatgtaaaccctccaattcgatgagaaggttcaaaaggatagcaaggtcagattatggtgttaatatataaaggagacattaagtggtaaccctagaaaccctttctctctcgcctattgttgccgttgcttgctatctttcgccgtcgtctctttagcttcttgccaagatggttagttctctcttgcactttattctcgtcttcatctctctccctatacgtctcttgatatgattttgttatagaaaaacgaatccttttagtgaaatttcgagtcactcaagagttttatgtaaattctcttttgatatcttcttctataaaaagcttgaatctttaggttttagtcacgtttacgaaatatatattagcttattagaagtgtggttttcatcattgggttgatctaatgctctaagctaattttgtttttgttgatgtggaacaggttcttnnnnnnnnnnnnnnnnnnnnnnnnnnnnnnnnnnnnnnngagaagaggaagcacaagctcaagcgtcttgtccagtctcccaattccttcttcatggtaatcaaaattttaaagctttctccttctcttgaaccctttagcaaataagtctctgtgattagaactgtatgttaatttggagtttaatgattttctcataatccctagctttgacagtgtgttatgtgatggcgatttttggatgtaagtttgagaatctatgtaactagtttcgagtttgtgaattgtatgtatgttttgagtttgtgaatttgatttgtatctgattctcatttactcttttatggactctgattgttgtttcttttcttgtatatcttactactgtaggatgtgaagtgccaaggctgcttcaacatgtaagttctgaaaacaatctctttctttttcgacattattacacatatatagaggaacataatcttatcgggttctgttttggtatcgcagcactactgttttcagtcactcgcagactgttgtggtgtgcggaaactgccagacaattctgtgccagcccaccggtggtaaagcaaggctccaagagggatgctctttcaggaagaagtgagattgagatctcacgnatcattcatccgttcgcagatgttttgctttagtagttttgatatctatgacgtttttttgcttatgagaagattttgaatgcatgataaaactactagctgagtaattgtttagaacttggtcttgttgaaacagaatatgctttcattttaagttttaatctttctcggattgcatcagttgtcttgtttcttgttcatgtttacatttgttaaatttgaacaaacaaccttggttatatttgaatgacttgtgcaaaagaagtgtaatattgctgtgactagaagaaactcaggctttacttaacatgaaatattctttctactttatgaagttaagttgctgaagttaaactttagctaactaggttaggaccggtgagtgacgtgtttgtaagatgtcgctgctgccgactttgttagcttttggttgagagtttagtctctggtttgatgaactggaataagaattgttctaaacaatgcaacaattttatctcttctgcaatctaaaatgggaatgtctaatccgatggctcaaggctct

SEQ ID NO: 38112 - DNA, 3428 bp, Arabidopsis thaliana landsberg
gcagttgagaagtttctttctgagaaagctgatgggtaagctaacacaacactttgggactttttggaaatgtatttttgcggaaaagtgaaggaaagtttcagtctgcagaggagtgacacatgatctttgtctctaaccagcggcagatactagcttgcttgcctcctaagcgtcaccatactttctatatcaagctaacattataacaaacatatatctaaaaaaagtatttagcttttttatttaggcaaatgacaatttgtgacaaatattaaagtcttaaacctaaaattttaattgtctttttcagaagagaaatagaattttcatcctttactactaaagataaattttgagatttagtatcacttctctagttttgtttctgcttaatcactctctgttcattaacgtttttttacataattctactctacatttgcaatgttagaacaaaactaaacaaatcaatctacaatcttaacctattcagtctttgcatcatcacatctgagtttcctctggtctactgtctcaaataaaaccgttgaccaaatacagcaaaaccatccatcaaattcgaccttctgattttgctcagataagttgtaagggttgaagaatactaaagtgatgggtttctacgtctctgtggaaacaactctctctgacatttctaaactcgaccaggaagaagattgtgagcttctataagaaacaagatagatgatgaaactgatgtatccaactactccaccaaaaaccagaaacccaacaagaaacccttccacttcagccatgaagaaatctagaagaagatacccatttatcatcatcacaaacaccgccacagtccaagctagcttctgcaaagatcccaactaactcgttacaatcaaaagcacataacaataaagagagatgacaaaaaattgctttacctcaagcgaaggtccgatcttgaagacacccatgatatgttcattagaaaccatagtcaaaagaggaataaccgcgaaaggaatctgcatcgactgaagaatgttaagccattcgtttaaaacatcgagcgagccctcggatgtgttaaacataatagcaacaaacatagtaggtacaatagcaaagcttctcgttataaaagctgatagccattgttccatttgaagatctaagaaccctcccattataaactgtccggcgtacgtacctgtgatggtactactctgaccagcagctaagactccaatcgcccatatatacagtatcgggaaaaacccacccccgtatttgtcctgtaagtactgtccagcatttgcaagaccgatggtgtccgctatctctgtcccgtaaaacgacttggcaaacaccgtggtcacaaagacgttgataatgaaggaaaccgcaagagcaccagtggattcaatggagtagtacttgagagcttctttgacccggaatctctttttcggatcgacttctctggattgcacaagtgctgaatgcaagaacacattgtgaggcatgataatacatcccacaataccaacagcttgtttgatagtcctggagctaagcttagggaccaatgctcctgttaaaaaacatgaacagttaccatttttgtactcccatctccacacactagacaaaagaaaggaatatttagagtctcaccaacaaggagctcagttccactgggtttcgtctgaccaaacatccaagcaaatgcaagagccattgttgcaatcaaaatagcaaacacagcttctagtttccttattccataattctccaaaaatagaaagatgaaactgcaattaacccatcacacacaatgttaggatcaaaactaaagataccaaacaaacaataataaagaaccctaaattccaaaaattagggcttttcctaaatcaataaccaaattgagaaaaaaaaaaacacttaccaatcaagagcagtgataacaacaccagcccaaagaggaaccaatccattagacaagatcttgatagctatagcactaccaataacttcctgaatatcagctccgatcaaagcaatctccgccataatccaaagcaccatccttgcccaagtcggatactcttctcgacacaactccgccagatgtctacccgtcgccacaccgagacgggcagatagaagttgaatcagaagcccaatcgccgtagcccacatcaatagccaaatcaaagagtaaccagcgatggctccagcttgaagatcgctctcgagattacctggatcgaggaaagcgatactcatcagaaaaccaggtccagtgaatagccaaagcttcttccatgagaatttaggagagtttccggggtcatcgtcgtaatcagcgtcttcttcttcgtcgattccgactatgagaactttctcggtttcttcataagctctctcctccgatgctaataacggacgctctctatcagtctccgacatatttcccggtaaccgccgattctcagagtcggaattcagaaatgctaaattcgaaattggtggtggtgctgcgactaaagtgacgactatcttgaaatttgcaactgctttgttgctttatatatatactataatcgacttaggggtagataataccgttttatccaatactattacgccacgtcagaataagaagtggcagtatatgtgaatggtaaataagcgcagggatagatttgtcaataagtcgagagaacgtgtgaaacttggggattatcgagtcttcttcttgggagtctcattatcctcacacaaaagtatggtgctcaaggaaattactagtttggtcgaccatattaatggtgatgattacagattaaaaaatgcgacgtggtgaacagaaacaaaaataaataaagggaatgggttaagtagaagtagaaacgtgtttggcctgggggttacacgaatccgtcagctctcgccacgcgccatcatccactttcactgtttcacccaacggtttactactactacataaagacaccttcatagttgatgtcctcatatctcaattgcattacatcactttcaattcaaatctagctttgtggtctaaattcaaagatatggatgtagtaacccttgtaatcttatgcagtttgttttctttcaattcattgttactcgtcagtcaacccaaaagttgcaatgatagataaaataacaaaaataatctcaagtacagtttcatctttcgaatttagtgttataacttatagatatgtgcaacaacaaaaagaaacaccttggactgagagagtgttattaggactacaattaagaaaactacattctgaaatcacgaacgcaaactgagttatcagcgaagcaagctgcgattttgttaccttctttgttccaacacacttcgaatatccctccatttc

SEQ ID NO: 38113 - DNA, 1726 bp, Arabidopsis thaliana landsberg
cactaacattgatcatcttcttgcataggacattgttctgaatcactgatattggggatgttttacactaggtattgatatatggttttctcatggggatgattttatatcagaacctagtagtagtcgtgaaagataagatgaaaacgttataaatagagatgatcatattcaccaggaagaagataatatagctggaattggtagtggtgaatttaggataatgtggaaaataccaatattgaggaaaaacacaacaatggctgcattctgttcaaggcttttgtattttctaaatttataacttttatatttataaatttttagtatacaactactatgtttgatttttactgtttaaaaatatagaaacaataacatacagttcattaagttaaaatctagattataactatataatttaaattaaaattatatttttttttattaatattgtttgttttgttttgtgttttagataatgtaattgtatcttaattgttatatataggatttcaccttatgtataccgtcttgtattactatcaacccaaacccgtcataccatctaatcatgttcaatgaaactaaacgtatctaatggatttcacccatggtatatcgtctcgtattactatcgacccaaacccgtcctaccatctatccccgttcagtgaaattaaacattattgtgttatttttgttttaataatactttaatataaaaatatataattcaaatcaatttaaaagttttctttcaaatggttatttagtttttataaagtttatatgatataatattataaacccgtcctaccatcttatctcgttcggtgaaattaaataattttccttttgtgtttggtttaaataatacctttattaaaaaattataattcaaatcaatttaattttttttccaaatgataatgaaattcttaatagatttcccatattatcaatattctattaattaggtcatatccttattgatttataaagaagcagtgtaatcacagtgtagtgcatagtttattacattaggaacccaaaaatgattgatgaaaagcacttgatcttggagagagtttttggcaagtatgtatgccagtatgttgttatgcctttttgtccacttggaattgaatcgactcaaacttctttgcccaccattgaatatcccgtatccagttgtagactccgaaatgtttctttgttccttttatcagagcaaacatatccttgttgtctccttcaaagcagacttgtctataacctttaccccagcaatgttgcatagctatgattagagcttgtagttcaccttcgagagcgttatcaacacacttgccgatggccagacctgcaatttgatagctcccattatgatctcttacaacgcatcccgttttccccgacgtatccacattaatgaaggagccatcaaaattgcatttcaaccaaccccttgctggacgtctccaaccgttgctattatccgaagctcggcttccgcagacatgatggtcgaatgtgaatgaagtgaccgactgagaccactgttgcgcatgcggtctagccagaactaagtcgatgttccacagaacgtgtcatgtgctgaactgacagaacactgctactttgccaaagaatccataatggcgaacgatggaactgaagtggtcgagaagaggttgccaacagacaaaccactcgtagatgg

SEQ ID NO: 38114 - DNA, 1603 bp, Arabidopsis thaliana landsberg
ctcaatatatttattcacatataggtacaattttaaaaatcgcagcaactacaatctgacaacacaaaaatcttatcgaggttgtaactgcaagcctacaactaatcaatcattaaagacaatattagacaatgtgcaaccaacaattaatttgaccaactagtttcatacggagtagtctttgtttttttatagaccaacattaaccataaataaatctattcccatatgcttccatttttaattaattcctgttccactaacgaataccatccaaaacaaaaacgtatgacacttgatcactctggttcaccacacgctcaaaagcgtcccctgtttcgacacgtgtcaaacggtccaaaacgaggtcctagacacgtttggtaagtcacttagctattttagcctcaaaagtggtccacacatcgcatcgcacacggcatagaatctccttttggatcagttgcgcttattgctggtgtgactggctagggtggagtatgagtctagacgtccagcgctcagaaggcgtttaatgggcgttggatcctattaattccagagatatctgactctaccccaagggattagctgtagagagggtattgactttaacatgttgattcgataatgcctgcttagttagagatcgctaaagggatttaggtcagtgtctagctttgcttgaggatttctatcacgagagtgaattaatctgttgttgaacttgttgtctagggatagcttctgtgaagttttgtcaaccgcctgaatagattaagtagaccacactattcgattaccacatccttaggaatcgtttatccatttgcctgttatcatttctgctttgtcattcacttgcctgctattgccatttctgcttttagtttcatttcatttctgttattgcatattaggactgttagaaccaaccaactttctgcttggcttgacttagagttttctgatcatatctcatctgtttgcatcacaccggattggattgacatcctaacatactacaacgacaagatagtgttttaggattaattgagtaaaatcctactatcaatttgtgccttcctcagttctctaaacttgtcacttttagcctacagaatgcaatcctatttatcagtgcgttaaaaaaaatcagaaagacacatgactatagaacaaaatctaaacctacacaaccttaaattatgcgctagtcttattcttcacccaatttttccatgctgcagcagattggatgttctttggtttcaaactttgtaattgtgtcttgcccatctttcgtactttagttaaaagcttggacttggaagaccgccacaaacaatccatgcgcttaaacacataatctttttgccatccatcatttaaattgaaccttgcctgtaatatttttcaaatgcaaacattactttgtaataacttaagatggaatactctataaacaaaagatgaagtaccttaatctcctcccaaagtctgtctttggtttgatcatcaagtttcctccaatcatctaggagtacaggtacatgctccctgaccagaggaccaagaaacgatgaaagtgttatagaccctt

SEQ ID NO: 38115 - DNA, 3790 bp, Arabidopsis thaliana landsberg
  unsure (1)..(3790): unsure at all n locations
gggtttggttttaccatccacagtttcatctccctctcagcctcaaccgacaatacgttaaacatctaggatattgaaaattgcaaaatcatacaacggtcacgatgttacagaaggcttaactgggaacctctcagcaaccttggagcaactctatgcttgggaaaagaaactgtacaaagaagtcaaggtatgtatgtgtttcttgattttgaatggattaatctccttagattggagcatcttttgacagatgtagttgtttgttgatggcaggatgaagagaagcttcgtgttgtctatgaagaaaagtgcagaacactgaaaaaactggatagtcttggtgcggaatctagcaagattgatactactcgagcagccattagaaagctgctaaccaaactcgacgtctgtataagatctgttgattccatttccagcaggatacataaactgagagacgaagaattacagcctcaactaacacaattgattcacgggtataaattgatctcaattcttttactattcctacatttaatatattttcgtttgtgtgatccgatacttgggatttgaaggttgataagaatgtggagatcaatgctcaagtgccaccagaagcagttccaggcaatcatggagagcaaggttcgatctctcagggcaaacaccggcttacaaagagactccggtttgaaagctattcttgatttggagatggagcccngccaatggtgcattagcttcaacgactgggtcaatacttataatttatacgtggagcctctaaatggatggctctcaagatggcttcactatgaacctgaatcaacggaggacggaattgcccctttctctcctagccgtgctggagctccacaggttttcgttatatgcaaagattggcaagaagcaatggcgagaatctctggagagaacgtttcaaacgcaatgcaaggctttgcctcgagtctgcatgaactatgggagagacaagatgaggagcaaaggcagagagtgaaagcagagtatgtgtcacacgatttcgagaaacggttgaatgatcttcggatggagagggcgagagtgagaatgagaaacgatcagctacaagacggtgcatcagagaaaagcgtggtcttgtccgagagcgggatctcggcgttggatgatttgaaagtggacttggattcaatgaggaagaagctagaagaagaaagagcaagacacaaggaaacaattaaacttgtgaacaatgcagcttcaagcagcttacaagctggtttagaaccaatctttgaggctttggggaatttcacttcacaagttgtgaaagctcatgaagatgttaggtttcaacaacaacaacagcctgagtctgaagattgattttgcacgaattaaaaagttttggtaatgaaattagattcggatttaggaaacaaattgttgtacatattttagcatttatatattcattgattggttggctacttgcttgtagattcttaatctttttctattttaaggttctcagatctttaaattaaattacttctgaaatctgaaccttataataatcattaatctatgagaaaattgataataatcgcaagaaaccaaacataattggtcagatttaagatctatgaccatttacttgcacgaagtcacggacctgagatctcacaacaagatcaacgaaagagaagaagccacgtcattgtcgatatcgtgacgcttgtacattggtgcggaatagtgtgtcttcggtttagacaatttttctcttcttaaaattactttttactgctggtaaaatggagtaaataactaaataaattttataacggcctaggtcaaaattatcaagacactgtataaacattaaaattcttgccaaatccctataaactatgacgacgtaatacccaattagagatagccacgtggatgtatgaccaatttaggagcattcagttttcgtgttttgcagtgataaatatctctgagagctaaccccggagagcttacagaattcaagctaaacattgttagagagaaagagagagcgataatggcgatgaggggcttcacgttgttttcgatccttgtgttgtctttgtgcgcttcgtctatcagaagcgaagagacggagacgaaggagttcgtgttgaccttggatcacactaacttcaccgataccatcaacaaacacgatttcatcgtcgtcgagttctacgccccatggtattcaaattttgtgacttttcaatctttttactatttctgttgacatggtttttttttggtaaaaaattcacatgggttttgtgtcgtgttcgtgaatctgggggatctgaatctatcatctgtgtttttggatttgcatgccaatgatttcttattctctcgcttgtgtgatttgaattggcgtagctgatctgttttactaatcagaacttttgttgcagttttgtaatttgtaacgatttgatctattccgatctatgttactatgtaactgagttgtctgatttgaatagtggtctcattttaattttactctgtaattgatttgtgaaagtatttgatctaaatcttcatcatttggtaatccgtattattgcccatcttcaggtgtggacactgcaagcagcttgctcctgaggtactatgactttttcaatcacttaaaataggatttgcaagtggagttttttttttactggtctaattcatgtagcgatggctaatgggtggttttatttttgtttacagtatgagaaggctgcgtcagctttgagcagtaacgtcccaccagtggttcttgctaagattgatgccagtgaggaaacaaacagagaatttgcaactcaatacgaggttcagggtttcccaacaatcaagattttcagaaacggaggaaaggctgttcaagaatacaacggacctcgtgaagctgagggtattgttacttacttgaagaaacaaagtggacctgcttctgctgaaattaagtcagctgatgatgcttctgaggttgttagtgacaagaaggttgttgtggtaagtacaaaacatgttcttcagcttttctctctgttttatgattttaatcatgtatggtagttaaataatgtctatttctattgttttaggttgggattttccctaaactatctggctccgagtttgattctttcatggccattgctgagaaattgcgctctgagttagatttcgcacatacctcggatgccaagcttcttccccgtggagagtcatctgtaacaggacctgtggtcaggctattcaaaccctttgatgaacaatttgttgattccaaggtttgtatattacattggttctgttatatagtatattgttgcggaatgtttgtttgatttgcttctttgcattcaggatttcgatggtgaagctctggagaaatttgtcaaagaatccagcattccccttatcaccgtctttgacaaagatccaaacaaccacccatatgttatcaagttctttgaaagcactaataccaaggtaactcatcctagagttatctaatatctcaattccattatgctgtaaccagttcatgatatactacatagatggattcatattatgccatttaattttaatggagaattatgtttaaatttatgaggattgtggaatgagtttatttgtaaaagtacctattccgtattgaattatgttatggatataaaaggaagtgtgagtgtgtgtcatattagttagttggactctagtg

SEQ ID NO: 38116 - DNA, 2920 bp, Arabidopsis thaliana landsberg
  unsure (1)..(2920): unsure at all n locations
aacacaaacttaacaagaggcacgcaaggtgggtttagttttttgagacatttccgtatgtcataaaggataagaaaggtaaggataatgtcgtggccgacgcattgtctcggaggtataccttattctcaactcttgatgctaagcttttgggttttgaacaaattaaagaactctatgattctgactcggattttcaagacatatataaggcttgtgctaagtttgcttcaggtctctactataagcaagacgggttcctcttttatgggaactgcttgtgtgttcctaattgttctcttcgagatttgtttgttagggaagcacatggaagaggacttattggacattttggagtcgccaaaactcttgaggtaatgagggatcatttccattggcctcacatggtaagggacgttgaacatatatgtggaaggtgagtcacatgtaaaaaagctaagtccaaagtccaacggaacggtttgtatactcctttgcctattccttctcatccttgcactgacatttcaatggattttgtacttggtttgcctagtactaaaaccggaaaggattcaatctttgttgtagttgataggttttctaagatggctcatttcattgcctgtcataaaacctatgatgcatctcttggttctaattttttctttagggaaattgttcgtttcactacaagtaatatgagtattgatagcacattacgatagcgcagtttccgtaactgctattaaagatggtctttggattttggtaactatatcatagcatttcagaaacgttaagcccaattatagcagagcgggatgctaaaatcagtttggaccgccaatatttagcaaaaaaaattagatctacctcttcacacttaaaaaaaaagggggaaaaaaaatcttatgacctaggtcttttctaatttattttctaagtcgttgaaggtctcttcttcttcactaactaagttctctcattctatcagatccactaatctgaaccaccgcctagcctcttacgtcttattcccttgccttgtctcgtctccttcgtcttttattgctttcagcctataaaggtaccaacatcctagcttgtctcctttctcctttgtctctctctcgttaattcaatctccagctatgctttcactgtaccagctcctgctttaaccaattatcaggtctcctttggtttctccgccggttcttaaaagccccttcttttggcgattaaaggctagatctatgatgtatcatagagaaggtatacttaagaatctttattacttctaaattagggttgaatccttattatcactactaatcacattcataatttaagccaataatttcgagatttggggtttaggtccgttttaaggtttgagagaggtggcttagacggattttggggagagaggcgagttgagagggttgagatgacgagtttgggttctcgctcaggcgtcggtgaagcttttctcggtggtgtgggtgaagcgtgctgggttcttgactatattaattgctcctgaccaaattggacgaacgacttcttaaatcattcatcactaccagaagacgaagacttgttttgtttttctccgtaactgaagatgtttccataatcatcttacttttgcatcttagaatggattttttttcccaatctacaaacaagtaattttctgtttaagtttttgttggatttcttaatatctttaccttaatttatgaaattgaacaaatcttattgatttgctgatagtttagtgtaaagtctttgactttagcagtttcattgaacaagtctatatgtatttgagattggatttcggattttgttgaaagaaagtaataagttataaactttatttggcagcttgtagctcttctttgaggaacgactcgttggatgctcctctgcttctgtctaacaactcatacgtcttcactgcanacaaatgcgtaagtgtacttgtgacgctttgaagaattggacgttaaaggattgataaatctcgtgtgtttgtcccataggataagcttgttcttttttcttctttttctagattctgatggttttggttttgtatcttgtgatcagtttaagctgtcaatcatcatctgagattaagccttcgaactggcaaacctgcccaccattttcacaatgtgatggagctttgcttaacgcctcttgcagacaacctcgtgattgcgtctatgctggttactccaaccaaaccatcttcaccacagcttccccagcttgtccaggtttgtttgatccaagtttctgcgcatttggttatagtgtagtgtaattaagtgacttaataacctggttactctctgatatgaacagattctgctggtcctgataactatgcatcaacgctcagctcaagcttcaatttcgtgattgtgttgattcagtgtgctctgctttgtctctgccttctctagtaatgttttgttgtgtgtttatgagtgtgtatctaagtacagttcggattaaaataaagacattgtttcacctgaagcatcacgtccttgtaccatttttatattggaaacatttcagcttttgacacattttgttaccaactaaacaatacaaaactttgacatgaagttaaacataattttcattattcaaaaaataatgctctgaggcagttttcactttgcactttgcatattacatgaacaaaaagaagaaaaacaaaacaaaaaaccatatgttatttttctcgaaatctgaaatcccaattcgagttatctcgaaagaatgtgggaactagaaatattttccagtaagcgtgaatcataccgacgtgtgactgatgctttacacaagcgaaattggaattgtcaagtcaatcccaatttgcaatgacagc

SEQ ID NO: 38117 - DNA, 4668 bp, Arabidopsis thaliana landsberg
  unsure (1)..(4668): unsure at all n locations
taccatattcaaacccactaaatctacttgcatatatcacatagagtcacaaaaattagtatttaaaacagttagataacagacaaaagaaagagaggctcctaataaaggcgcaattaaaaaccggtcagaaatacaccaattgtgagactcaagaagttattgctcaactacttcctctaactcataaccacaatctccaaacttcaccaccgattcacagagacttttattaaccttcaaaacattatttattattccaatcttcaaagagagacactcacactccttatcttcttcattcctccatcctatttttcttctgcaccaaagtgttattcctcaactttatatattacacaaatgtctttagccgcggataatgtgttgttggtggaagaaggaaggccagccacagcggaacatccatcggccggaccggtttatcgatgtaaatacgctaaagatggcctcctcgatctccctaccgatattgattctccttggcagttctttaggtatggatcttgagaccctttacatttattatacttaaaaaaaaatttcggttcaatgctgattaatgtaagctaaattaataacaattcttgtataagatatgtattaatttgatatagaaacttgtctcactcttctctgtgtattcttatttcagtgaggctgtgaagaaatatccgaatgagcaaatgttgggccaacgcgtaacgactgattctaaggtacaaatattataatactatagtctctaatattactttatacttttttatgtagactattaactaatataatttcattatttatcaacaatttcaagcattaatgtgtgtgtatgtaggtcggtccatacacgtggatcacatataaggaagcgcacgacgctgcaattcggattggatcagcaatcagaagccgaggcgttgatccggtacattattactatgttatgacatgatccaatcaatcaagtatataatttatttgaaagacatttgccaaaaaaaaaggttcttatttttcttactttttttgtggagtagggacactgttgtggtatttacggagctaattgtccagaatggattattgcaatggaggtaaaaaaaaattgacctatatctaaaatttagggttcaattttcctttttattatagagttttttttgttttgaaagaaatatagatgattgagattgagaagggccttttgttatagagtttctctaagttgttatattgcaggcctgcatgagccaagggatcacctacgtgcctctatacgattctttaggtaccctctatacgttgatatatacgtaccgatcaatatatatacaacattttatcttaggcttgtcttcatattatatatattcatgagttatgaaaacctaatccgaggttgaatgtcgatgtaacaggcgtaaacgcagttgaattcatcatcaaccacgccgaggtttcgctagtatttgttcaagagaagacagtttcatcggtaagtcaatttttttaattgaaatcagtcataccataactttcattttaggtttcttgtccaacaagaaagtatttttgttttgcttttgtaattaactcttgaaagtttttctgcagatcttatcgtgccaaaagggatgttcttcgaatttgaagagtaagttacatgtctttaaaaatcgataatattttgtataaatatgatcttaaaatctaagatagttcttttgctttgacttacggttttagctattgtgagcttcggggaagtctcgagtacacaaaaggaagaagctaagaaccaatgtgtttctttattttcatggaatgagttctcactaatggtcagtgtttagtactagacgaaaaatataacttctataatttacaaacattttgacttatagggttaactttatcaagatttgaatttctttctctcgtgggtcttaaataattatttgaaaatcttatcagggaaacttagatgaggcaaatctacctcgtaagcgaaagacagacatctgcacaataatgtacacaagcgggacgactggagaacccaaaggtgtaatcttaaacaacgcagcaatttcggtccaggttttatccatagacaaaatgcttgaagtcactgatcgatcggtaatttttttgttacaatttagcagacacatgattacataattggaaattatattttggtttatttctttggaaattttgtagtgtgacacgagcgatgtgttcttctcgtacttgccattagcacattgctatgatcaagtcatggagatttactttttatctagaggctcctctgttggatactggcgtggcgtaagcaaaattttctcttaattttgaatccttttttcccacaaaatgcccattatattttctgattttttgtttaaatttgagacaggacattcggtacctgatggatgatgttcaagctcttaaacctactgtgttttgcggtgttccacgagtttacgacaaactatatgccggtataatacttttgatcaagtcgaaaattcgagtttaccctcattttattcaagttttactgaattttcttctattttatatgggtgcaggtataatgcaaaaaatatcagctagtggcttgatacgcaagaaactgtttgattttgcttataactagtacgttttctatgtttctccaaattattataaagaaaaacacggatcttggaattatctttaaaatcatcttgtgaatacagcaaattgggaaatatgagaaaaggattctctcaagaagaagcttctcctcgtctagacagacttatgttcgataaggttagtgtatttatctatgatgtagaaataaaaattattaaattttgtagtcactgattacaataaatgttatgatcttctcctagccttctcaaatggaagataagatggaaataacatgtaatatagacttacagtttcagaaaatttaaattgtgacagataaaagaagcattaggaggaagagctcatatgttgttatcaggagcagcgcctctacctcgtcatgtagaggagttcttgagaatcattcctgcctctaatctctctcaaggttatggtaagtgtacctaaaccgaatttcgagtcatacaccgatctcttggtttgggctaagccgattctaatgaaatgtgacaggattgactgagagttgtgggggaagcttcacgaccttagccggagtattttctatggtggggacagtgggtgtgccaatgcctacggtggaggcaaggctagtgtccgtaccagagatgggttacgacgccttttccgctgacgtgccgagaggagagatttgtcttagaggaaattcaatgttttctggttaccataaaagacaagatctaactgatcaagtcctaatcgatggatggttccacacaggtattgttgttgatccaactagttatggagtagataaaaattggaaaaatgttttgaatgtttaaatgtatatccaactagttatgtgtaggtaaaaattggaaaaatgttgatctagatgaagcagaacggatcatgaatatcacataaatcgaatatatccgctttgcattaacttttagttgtaacaaataatatgattgaaaagcaagtgatagtaattggtagaagagtggctggtttttccactcgtatgtctcgaatggttattttgaaatttacttaaaatggatatgtagactctaaaacttagtctatattttaaccattagattgttagttacaaaagaaacttgtattggataatgttgaaatttgatttcatttatatgagtaggagatattggagaatggcaagaagatggatcaatgaagatcatcgataggaagaagaacatcttcaagttgtctcaaggtgaatatgttgctgttgaaaacatagaaaacatatacagtcatgtcgccgccattgatgcggtattagttgcaaatataactcttaagtagccgttaaataaaacttagctaatgatctgttaatcatttttccagatatgggtatatggaatcagctatgagtcatacttagtgactgtggtatgnnnnnnnnnnnnnnnnnnnnnnnnntgggccaaagaacacaaagtttcagcagactttgagtctatctgccgaaaccaaaagactaaagagtttgtcctaggagaattcaacagagtagccaaagacaaaaaggtttgatttgttcatgattcttctacttataaattcttgttttatattttcaacatttcaactaataaaattgtgggttttgtcttacagctgaagggatttgagctgatcaaaggtgttcatttggacacagtcccgttcgacatggaaagagatctcatcactccttcatacaagatgaaaagacctcagcttctcaagtactatcaggtatattaaaagtctattccctttattttcacattagaaaacattcaaggctacatattaaaaccttagattatctcttctttggtttgatgatgttgcgaggtctactgaaatcagatgatcttaacctaaaaaccattttctctggtcttggttacgcagaaagaagatgatgaaatgtataagaaagaccgagaagtg

SEQ ID NO: 38118 - DNA, 2350 bp, Arabidopsis thaliana landsberg
  unsure (1)..(2350): unsure at all n locations
tagattattgggtatctttggaaagcacggaatgaaaaagtgctttaaaatgcggataaggacccgctagacgtggtatgtctagctgaaaaagcggctcatttatggcagttagctcaagtagagttcaatactaaaagcctagtctccatatcaatcggaaaaccaactccgggtgagggatatctcacaagacattgtgtactgtggctttcgttgttttgtggacggttcatagaaagaaaacgacaagttttcaggtctaggttggttttgtacttcatttaatggaggtacgtcaacaatgggagctgctaagctacgtagaagtctttctcctctcaataccaaagtcgaagctctactctgggcaatgaagtgtatgattggtgccggcaaccaagaagtagcttttttacagactgtttagacctggtgaagatagtgtctttcccaaccgaatgaccagcattttcagtttatttggtagagtttcagaatgacaaggatgagtttcaaatttctctttaactttaatttctcgatgcacaaatgtaaaagcggataatttggcacggaaagtacgttccgaaccacatcacatcacctatgtaaacaacattccccaagaatcgctcttttgagctctaattaagagtagacggcaaaaaaataaacaaatttgttcaattaccttttagttaagaaaaataatatttgttgagaaattggtaagaatgccctttcaaaaatacctttttttaattatgtccctttctgttggttattttcatttatacctcttttaatttttaatgaccattttatcgcctattttgaaaatgttttaggttaacaaaatgaaatattcatttttcctgtctaaaatattcccaaaagaatttcccaccaaaatgtttccgccaacaaaatttttgagccaaaaaatttccagccaaattttttttcttcaaaaacatctttcttgtgaaaaaaaaatggcggaaagtagatttttaaagaatttacaagggttttaaaagatttttaaagaatttacaagggtttaaaaccctttaaaactcttgtaaatctttttaaaaccttttgtaatggttcacaagagttttaaaatggttcaaaaattattaaagggtttacaagggttttaaaatattgtttaaatagtttacaagagttttaaaagatttacaaggttttttaaaagatttacaaaggttttaaaatccattaaaaactcttgtaaatctttttaaaaccttttgtaagggcctaagaggtttacaagagtattaaaatggttcaaaaattattaaaaggttaacaaagggttttaaaagatttttaaatagtttacatgttttaaaggatttacataaagtttttaaaagatctttaaatagttcacgagaattctgatcttctctccggccgaattttaagtgtcttaacaatgcgccttcttccttctgatcttctctgcggcggtttcaagatcgacggcgaaagatcgatgattttaacttaattaggaacaagagaaaaacagagattgtgtgttgagttggaggcttttaagagaagaggcgtaaacatgccacatgagattgtataagagattctggttaaggttccggttaaatcactggttagattcaaaggcgtgtcgaaagaatggatagaaaccatagaatgaaagatgttcgtagataagcacacgaaatctccaggagaaggacaagcgcgaatcgtcacggttgtatcattctttgacagagaaacaactctaggcaaacgtatcaatctattagaaaatctnnnnnnnnnnnnnnnnnnnnnnnnnnnnnnnnnnnnnnnnnncgactcattaggaatctttgctttcgtccttaacggttttaagatcttcgagccttgcgacggtttgttttgcatctacaccgcaggacatggtgaatttagtctggttaatcctgccaccactagccgtcgtatactccttgttcttgagccctcttataaggtcatcttcccatggactttggtagagatggtaacaagttttaaagcctcccggacgtggcgcaacgaccttcggacaggggtgggcacatgggtccgagtgatgacgtgagacccactggtaggggcggtcggggcgttacacctgatataaacagcaaggactttttcttcaacatcttgggtctagacataaacaagagctcatggggtacttatgtatttccaccatcctttcttgattgcacgttcggatacaggttaaagattaaaaaaccgctacattttcttttcaaattatgttcgt

SEQ ID NO: 38119 - DNA, 2021 bp, Arabidopsis thaliana landsberg
  unsure (1)..(2021): unsure at all n locations
tgtggtctagcaatttatgttaccaaaggcataactctcattcgaacttaccaaaagatctgccccatatgagagttaggctcgttatatgtaatacaaaattgagattgatacgaatctgacgaaaatatcaaattcaatcagatctctaataatgttgagcttgcgtgatttctacatgagtaggtatttttttttagagtctagttcatcaaacatttgctagaaaactgttcttggatcaaattaacgtaagcataccaaacatcatgttgtcacaatcattggcaccttcaccttcacaggttgttgattcaacaaaattataaaataacgtcaagtttaaagtttagttgataaactatgaatgattttaatttgtttgtttgtttgtgtgaaatgaataattttaattaatattagttttttccttcacatgagtttctattctctcgtatttatcaatttcacgtgtgtatgcatcctattaaagcaactatcatattaccacatttgtcgaacaaaagaaaatttctagaaccaaaacaaattcaaagcaaccaaaaccatacaaaaaatagataaattacaaaaatagaaaagaattagccgaaaaacaaccacacgtccgttataagcgagaggaaaacccatccctttactgtacccatcttgttagtaacctgctaagccatgaaatagtcgtaaaggcgctttcttattctttgctagtaattggtttcgacgacaatcgatcgtagagaagtctacctcgtagacatctctctcacaaatccaattcaattaccattgtttgttattatctgatgtcgaatatgcaattctgtcgtggttttaatccctttgttatcctcttctgtctcgccgtggttgcaccaattatatcggctgatgtcgctatcttgagaacggactattaccaaaaaacatgtcctgatttccacaaaattgtgcgtgaagccgttacaaccaaacaagtccaacaaccaacaactgcggccgggaccctccgtctctttttccatgattgtttccttgaaggttgtgatgcatctgtcttgatcgcgaccaactcgttcaacaaagcggaacgcgatgatgatctcaatgattccctcccgggagatgcttttgacatcgtcacccgcatcaagacagctctcgagttgtcttgtcctggtgtagtatcatgcgcggatattctagcgcaggctacacgtgaccttgtcacaatggtaggaggaccttactttgacgtaaagcttggtcgtaaagacggattcgaatccaaagctcataaagtcagaggaaatgtcccaatggcaaaccagactgttcctgacatccacgggttattcaagaaaaacggttttagtcttcgcgagatggtagcattaagcggggctcacaccattggattctctcactgcaaagagttttccgacaggctctacggatcccgtgctgataaagaaatcaacccgcgattcgcagccgctctcaaagatctttgcaaaaaccacaccgtggatgatacaatcgccgcgtttaacgacgtgatgactccaggaaagttcgacaacatgtacttcaagaacctaaagcgagggctagggcttttagcgtctgaccacatccttattaaagacaacagcaccaagccgtttgtggatctatacgcaactaacgagacagcattctttgaggatttcgctcgtgcgatggagaaacttggcacggtcggcgtcaagggcgataaagatggagaagtgagacgtaggtgcgaccacttcaacaatctcaacgtttaagaagaaaaagaaaacacaaaaccatataaatataatattatttctgttttatttgcggaggagttgaggagaagaaaggtttggttggtatatatgtttaatacntacgtattataagcaagatcttgtaacaatcaagttgggatgttaatttttcatgaaaatcaaactgtgtatgaagtatatgat

SEQ ID NO: 38120 - DNA, 2197 bp, Arabidopsis thaliana landsberg
attggtttattttcgttttgcggtaataagaatctggtttgattggaacttggaagtttatgatttctttcataagtgagcattttttaagtaatttttttataaaaaaatgttaatattatgttttcttgtgtaatctgtctctttttgctctctatacaatttatcaaaacaaataaatagaagatacaaaactttacattacaaatttttgggaaagcccatttaaaatcaacaaatattttgttatttccacaaatattttgagatctaaactattaactaaagtattaattgaaaatggatgacaacattttgaccaaactatttaagccgttttcgcttatacataataaacttcagagtccaaatccagccaaagactcctcatactacatttgtgtttacttacttacactttcaacttaacaaaaaatagatgtaaatggaaatatcattagcattattaacaaacaaaacaaaaattacaaacgacgtcgcattcaaatcctttttcctttcttttttcattaacccttaaataacggacaattgataaatctttgaatcagagaagttgcgcccaaacaaaaagagaatttattgttcagttagtctagtttgcatcgcatgcgatttttggttcatcagatcttcccaacacacaacaaagccctaagctttcttcgatttttagagcatctccattagacaaatctttaaagtgtcttccccaaataaacaaatatgttttagtcaaaaataataatattgtaattgagagtgtctttagatcttgagattttatctcaaaatgtctctgagaagacattttaggaggagtgtctcaaattttgtaaacattctcaattataatattattctttctaacaatatatttcttttatttgaggaagacacccaacaatatatgtgtgatggagatgctcttattgattttctcggtctttgtgtgcgcaaaatcgagacttagatgaaattcggaagaattcgaggttttcactgctagtaagtttgatggaggaaagggaagcgaaaggatatgttagagattaaagattattaggtccatgagacgggagacccataatttggagaaagcatgtaatgtccaacatttgaaaggtgtgatggatcttgagttattgataagtgtgcattttacatattttgagcatccatttgttattactatagtattatatgaccactgttttataccatttctcgtcatttatcatcactttgcatgtttatgatagttttgcatgcatgttgcatatttgtgttattttcaggtgatttgaagctgttggcgagctaattgagagaagctgacctgatcatatcaatacactcgaccccatggccgagtagatggcttcacgactttaacaaaccactcgaccccctggtcgagtagaaggcctcatcacttcacaccaccactcgaccctgtggtcaagtatcatcatctcgaccacctgaccatcactcgatcacaccactcgaccccctggtcgagtctcttcatcatcacacactcgaccgatcagtctaccaacaagccaagtaccaccatctccatcactcgacatcatactcgactgccagcttcagagtcttatcgattccgcaatcaacaagacactcgagcataaggaagagatgaagactttggctcgtcactcgacccgctacttgatcacctgggtcgagtaccattcttaatctgtcccaatactgtgtcgttttgagtattagggtttcagaatattttgctataagtagcatgtactttatattttcaaaaacaagtttttattccgcacacagtttgtgtgttatttgcttttgtaatccgaatttcttttaatttattcagtatttgtttattttactaagttgttcatcctgttatcatcatgttattactcttttgctatgatgttttcattcatgtcatcatttatgttctctgtaatgatgtctgagtagtgactaggtttctgaggatgggttatagtagtttagaatcctctgtctgttaggtggttgagtttgatttacagatcccttctggattagttgttcttaatgcatattgctttctgatcaactggaatttgagcccagatattttctgcactcaaaaggtattcgacgaaaatgtttg

SEQ ID NO: 38121 - DNA, 2358 bp, Arabidopsis thaliana landsberg
tttttttgtggcataggggcatttgtttaagtgggtcgaaaaagcagtgtttgaagaggttgaagatgctttgccaagattagcagtaattgcaaacgagattaacaaagccaaatcagaggcacttgagttaaaggctatgattcaggaaatattagaagaagcattgatcaataagatgcaaatccgaagaaattggtgaggcttgaaactgggttttgtgtggctttttgtcatcaccattgtgattatttacgtgttgtttggtcaggataatgagaagaaacttgtagcagggtactagtgtagtgtatgaattgtagtattgtagtattgtagtagttatgcacttgtatggagcttgtattgtatgcattgtatggagcttgtatttgtgaaacatgactttgattaatacatgtttggtttggttcgaacttgttgcagtaagcgaattagaatgacaccaattttgcatacaaactgaaaccatgttttgcaaccaaaagaaacaccaatccatgttttgaaacaaagacaaacataaccagcagattctaatccgactaaaacacaaaaacaaatagaacctgcagtttcagtttctaaaccgtgaaacacaaaaaacaaaccaaaccaaccaatcaaacaatcctagtttgaacaattaaaccatgcttccaacccttgtaatcctctccctcctctttgtgaccctcctctccctcctctctgagaccctcctctccctcctctctgtgactctcctcttcttacactccgtgttcctcttgtctcagttggtgctgcttgagatggtgcttcttgagatggttgggaaagagattgtgctccttgagatggtgctccttgagatggtgcttcctgagatggttgtgaaagaggtgctccgtgaaaaacttgagatggtgctccgtgagaagatggtgctccttgtgcttgcggttcttgccatgtttgaccttgtccaaaaaagaccatcctcggatcctgttttcaatcaaccattatatcaaaactattcgcagaatttttgcgaacatcaagatgttaaaatgttaaagaggataccttgtcttttcttgggcgaccccttggtcttttagatggaggtgcgactgtctcgttctgacatccctgcttaatgtgtcatgtctcctttcaaatttgatcaagtcatcactcggtgcaaacgtgatagctcggtggtacttcagctagagtcagttgaagattcaaaagcgccttctctcctagcatagttgtttggtctccctgggtttcctcttctccatggtggtggtaaaactccaaacctattcactctaggccatagaatcttcccttgtacaggtgcaataccatctttgtatgtttgctgccaccgttgtgtcgtgtaccagtcaacaacatagtcttctactttttgtttctttcctataatgacagatgccgcatgaacacatggtatacctgtcatttgccatttcctacaaccacatgtattgtcattcatatcaacagaatatttttcatcatgcaactctacctcatgtttattgtgcctagccattcttcttacgcaaaactgtgacccttctatcatcttctctatctgcatatgagctctctaagtgaatctggtccttaatctaccagcaattatatgtctcttcccattcctaaccatacactgctgcctaatctcttcaagcatttccaataagggtttcctcctagcttgccgtatggttctattaaaagactcactgaggttgttcaaattatcactgcaacatgtacctactctaaagaaagctctagaccatgtcatcggattggtgcttaatagagaagtataggcaccgggattatacttctgcagtgcttccatattttttgcatattggcctgctgtgtagctgcgtgcaatcctccaaaactgtcgttgaagttccatgttatgactatctctcttccaattatccatgatatgttttgcacattgacgatgctcagcttctagaagaatgctgtgtataaccttcacaagtccctacaaaaataacacagaagttagaagatatagcattccaatttatctgcaaaaataacacatactaaccaattgtttgtcagatatgacagccatatcttttccatcttgaagccctaaagtacttgatagcaacttcataaaccaatcccaattgtcgtcattctctatctcaaccacagcccaagcaagaggcactatcctattgtctccaacaccaacttctttattcaagtcatgctgatttccgtcttcatcttcactgtcttcctcgccagcag

SEQ ID NO: 38122 - DNA, 5142 bp, Arabidopsis thaliana landsberg
gatttcaaaggatgggagaagaaaaaaaagcccggtaaatatttagggttttaaagcttatataataattctgtttatgtagttcacaagttaattgacaatataattttgccacatcagccatagaatgatccaatttgggataagcaatacctataattatgagattatatacagtttcatatcatccatgactcatgagagttttgtgtaccatttccatcctattaacggtcaaatagtttttaaacatcaatcaaactaaagactgaggcaacttggcacgacaaatgtatataatgggtttggtcaatacattgcacgtctcaactagcatattgacatattcccctaaattatttacacattcccctaaattataataaaaatcaaagtctataggaaacaacttgtattagtgtatatatatcagtagaaattgcaaatacaaagtcagaaaacagctaacctctaaaaacatttttgcatatgattagaaacagtacagtatatattatagagtcgtgatcaaatcatttagagatcaatcgatggatcgaaaaatgatagattctgtaatctacttagccttactaggctttcttcttctcaagtatcattatttgttcaaaaccaaaaaaatatctttagttctgtcttagctaggtttcgtcaatcgtcaagcctggtttgagaagaatggtcgtgaaaacagcaccaccggtagctatgttgatacgacggctaacaccgtggcttaatcatcgtaactgtttcttgcttctctgttttttcgtccctagtcatttattccaatatcatgtgaatatgaatgttatatgttaagtttttgcgtgccagagatgatgtaattaagatttgttgtcatttttttctttgacttattttcttcaaagttcaaactatgaaaaagagccgttgtttaaccatcgtcaaagattagggaaaaaaaaacagatgatgaaaagaaaaattagtttatacaacaagctcaagaaccttcatttgattcgcaggtttcgaattcagtaaacacagaaacatatacatgaacgttaatgtgcatatgatatacgtttttactttgaagatgattccttttcttcccctccttcgatatttttaagcgtctctcctttctcatcttcagttttgatgttcatggcggtgtccatatctctagtttctgactctgctgcttcctttaatttctcctctttagcttcaacatctgtcgaatcctctaatatatcaccacttgaatcttccttagcggttgctaatgttgttgaatctacatgatcatcatctcctgttctttcaatattcccatcgcgtgtaagttttcctggttctgttgccaggttctttacacaggtaaacgcatcatcatcatcagaagattcagaatcagttccagaatcagattcaggaacgatttctttatgcccatctcttggtttcatggatcctttacgggaaaacgcatgctttatctgttttgcagatttctcagcttgtttcagaaaactctttgccacatccttcatatggccttgtgctgactgtcttcagaatcaaagctctcaccttttggacttcttcctgtgagaggccccgatagcctgtcttcaacgatgaacttaactccaacatccttttgatttaacgccttcaaattaatccgaggagacctgatatcctcttcaatgctccctgtatgatgacattcttccttttttccattcttatggaacactaaaccgattttcttcagcccccaaccaacagacttcatctcgctcttcccttcctgatttttatcagtgctgctgctttcattgttgggcgacgtagatgcagtggaacggacactgccagcgcactgtattttgttatcaaggcatcgactcttgccttttcttggttcccaaatctgtgagacttcagttcctggttgatgtacccaaatcccagtctcttcttgtccttcgatgtttattggttccatattatcaggaacccttggagacttgtcagataccactgatgagaaggaacctttatttgtaacgtcggaagcaaaagaagcccacatgtcttccttacatattgtcactccttcaaacggatcatcgttcaactgtaaaagaatgcatattgcataagagttgatcatgaaactcttacgttaaagaaaactaaacagaagaaactcaatctacctttgcctcgtcctcaagtacggttatagcaaggtgcaatctccccattttaatgttctgaagaggcaaccacatatcatttctttggccgcctcgaaactctgcaatgttcactgaacagtcgccaagactgtcatcgctaaatcggtctttgtctccaacttcaatgttaagtatactaggagaatcccatgtaaagattggtatcttaaactcttcgtgccatttcggggacaatgttttcttctgtatcttggttttgaatcggtaagcaccaagtttccctttcacataaggatcagccaaacctgaaaccagaacatccaagtctttcaaactgaaaggaaaaaaagactaatgcatgtggtaatatcaaaactaaccatttagatcagatggtttaagatctgatgcttcaaagacttcaactaagacgtgtgcaaccggttctttctcatcaacaaagaaccaattatctggaacaaacacagacaaagaaggtactcatatggactgattggatgaaggtttaagaagtttgaggaaccaataaaaagaagtacaagatagaagtcatggattgtgagcatctcctgcaatagttacctcctgactctgggctaacaaatttctccatatcaactaccagcatatttggctgcaaaattagacacaagcttcatgtagctagagtaattgtaatgcagtgtttgcttaactacagaggggattaatccagagcatccgaagagaaaggcgacaaacaacaagaatcttacctcaacaagagtctgctcaaatgcaacagacaaaagtttgtcctgattgagaaagaaagatattggttggagtgttagaagaggaaaaactcaaaaaatccagagaaagctcatcaggcgtcagtacttactagccatcctgcaatccctggaagcacagcaacatcaagtccatgagtggtaattggtttaacagtcatttggaaataaggtggctctgcaaaacacactcgtaaacgcccgagaaaaggccatcgacgaaggaacttcactccaatcaacaccttcaatagttaaagataccgatatgaagtaagatacttcattgaaggaagcgtgtaagtgaagctgcagaaaagaaaatgcactacctttccttcaacatgcattcctgtcaaatgcaactttgtccacattccaaacccaagtctttttcttaacttcacagcgagtattgcgctcatatcatctgctgtgaggaaattcattccaagttccagtacctgtacacactccaatataagttatactttctctatagaacttagagcttatagaactgaaattgtgcaactataccaagtgatcatcacccgtagattgccgtagaaccctaatatctgtcaacaaaggagggtttcttcccaaataaaggtgttgtatcacagcttttttctgcacaaattatcattccatcaatactaagtcggtttttcgactgtaaactgagctacagttagtggcctagctagtactactacaaagggctaactagacacaaaacgaaactggaaagactcaaaatttgaaagagttaccgcagtccaaggtctatacttgtccaagaaccaaggtatgatcggacgaagaatcttctgagaagcaatctgttccatacaaataggccatatcctctccactgcatgattcaaccaccgcaccgattcagaatcagatagaacctacaaagttgtatttaaaaaataaaaataaaaaaagattaccatttcatgcaaacaaaggtaaagtcagtatcttccaatacaagattgagaagaaccctagaacttaaacaaatgtatacacaaagcaacttaaagtcttaaacaacaaagtagaaaattacacgtctctggttagcttgcttcctctcttcaaactgcaatttcttcctcaatctcatcacatagcgttcatgaacctaaaagaaacccaccacaacaatatttttcaccaaatccaatgaaaattgaagctctaacatctaaaagatacatttctcccgagacggagcaccacaccacgttaagattaaccagagagaggacatataataccgcgtgtgatcgattcacgtaagatagaacccaaagtaacagtcgcacaatcaccacatgatggattaccgaacactccattattattatacttcctttggttacaaaacccagaagtgaacaacaaactagtccaaagattcttgcttttttttcttaaatccaaaggatcaaacaacaatctcatgaaacaaaaccatccgaaacgagtcgcacttcatgtgtgttggttaggaaaggacaaagaaacaagtaataagatgatttcagtttttgtttgttctcgtggattttgattagttagttcagagaaaaagacacagagacagaaccaaagaaaaaaaaaacatttcgatctaaatttactctgttttcttccgcgaagccaaagaaaaacgctgtcgttttttgaaaagcgaaacgcgtcaaccgcctgaaagagtgcaaacgtgtcagacacgtgtgaggagacaaggataaaggtcccactccaatgtcattgttcaattaatcgtgaattagacgatcctatccgttcattttaaaaagcattgatctgatggacggcttacaatttgacttgtttcatataatctcatctccatagaatatctacttttattagataacaatagctatctattctacattttatattaaaaataatgaaataattccactaaatggtcaacaaataatttaatattaaatgttattctaatctattggtatgtagaagaacaagtgggatatttttctatattcatctctctctttatc

SEQ ID NO: 38123 - DNA, 309 bp, Arabidopsis thaliana landsberg
tgggacttttcaacaggcatgaatacagcatcgataggataacttctgtcttcaaagttatttgacatttttagactatatccgcgattcctctcaatttttaattcaatacacaaatctattggttctgttaaggtagctatatgctgtgtattatcaatgatttccacagcgggcggtaaaataatgtctcgagcagttatatatccaggaccttggacacaaataagcgcgttgcgcgttccatatagattctgtcttagggcgatctcgttctaattcattaccctttcccccctgtgttcttgc

SEQ ID NO: 38124 - DNA, 3352 bp, Arabidopsis thaliana landsberg
  unsure (1)..(3352): unsure at all n locations
gggcctcaactccatatgtaccacttcaatccaaaagatatgtcggtactaatttgtaaaattataaccactttaaaacctaactaagtcaatattctataacacatagcatgttgcctcctcttaccacttaaaaaacactacaacatgttatatgttttcaaccattgtaactcgttatcctctcgagctgatcggccaaatcagctttttaagcaatcaatcttgcgtggtttttgcagtaacttataagaaacgtttccatataatgctgagcccattctcaatttccatcagattatataacgtctaactgtttctaagtaatgattttatactccatataacatataaccgattgctataacatgctgtatacacgtctaatatgattattatacatgtaaataaatgaaactatatcgcaaatagaaatggtaagcaataatgcgaaggcgttaaaaagataattatacgaagaaataggaaaacaaacatcaaattaagatttacaagtcaagtaacgaccgttacggctttataacattgacgattaacctaacaaaaattatttgcctactacaaaaatatttcagtcttataattataaagcttcctcttttcttcttcttcaattcatccgaagctaaaagaaaacactagaggaggtgaagatttttaaaaatgtcattcttatcattttctcctatttctctggacttattatctagtaatgtcttcttaaccattctagcgattatcatatccggtttacttaaaaccattacgtaccggaaacacaattcgaaccatttaaatctcccgcccggcccaccaggatggccggtgatcggaaacttatttcagttcacgcgctccgggaaacagtttttcgagtacgtcgaggatctcgtaaagatctacggtccgattcttactctcaggcttggtactcgaacaatgatcatcatctccgacgccagtctcgcccacgaagcgttaatcgaacgtggagcacaattcgcgacccgacccgttgaaactccgacccggaaaatcttcagctccagtgaaatcacagttcattccgctatgtatggacctgtgtggaggtcattgagacggaacatggttcagaacatgcttagctcgaatcggctcaaggagtttggttctgttagaaaatccgccatggataaactcatcgagagaatcaaatctgaagctagagacaacgatggactcgtctgggttctgcaaaacagcagatacgctgcgttttgtgttttattagatatctgttttggagttgagatggaagaggaatcaattgagaagnnnnnnnnnnnnnnnnnnnnnnnnnnaaacgccgttgatccaaaactccacgattaccttccgatcttaacgccgtttaactacaatgagagaaatcgtgctcttaagcttcgtcgggaacttgtagatttcgtcgtcggattcatcgagaaacgacggaaggcgattcggaccgcaacggtatcgtctttctcgtatcttgatacactctttgatcttagaatcatcgaaggaagtgaaacgacgccgtctgatgaagatcttgtaacgctctgttcggagtttctcaatgccggtacggacacgactggggcggcgatcgagtggggaatcgcagagttgatagcgaatcccgagattcaatctcgactgtacgatgagattaaatcaacggttggagatcgtgcggtcgatgaaagagacgtggacaaaatggtcttgttacaagctgtagtcaaagagattctccggcgacatccaccgacttactttacattaagtcacggtgtaacggaaccaacgactctctctggctataacatccctgtcggggtcaacattgagttttatcttcccggaattagtgaagacccgaagatctggtcagagccaaaaaagttcgaccctgaccggttcttatcagggcgggaagacgccgatataacaggagttgctggagtgaagatgatgccttttggtgttggccgtaggatctgtccggggatgggaatggcgacggtacatgtgcatttgatgatagcgaggatggttcaagagttcgagtggttagcctatccaccgcagagcgagatggattttgccgggaagttggtgtttgcggttgtgatgaagaagccgttgagggccatggtgagacctagggtacaatgaaagccgcaggtttgtagcatatccaacttttaaaaatgaataaatgctgtatggaatacatgcataaactgataaacactctcatgtaaaaatgaatacaagaagcatattggtactcaagtcatgttttccattaagaatcttttagaattctgttatctttgagggtaaaaacttaactatgtttgtaataaaagcttagaatgagaatttggtaaaacaactgtcatgctaaacactaaaaatgggagaatacaaaataaacttgagatatgagtattttgtttgttacaatttatgatgctaaagccaaaaacattgagaaaagaaaaaaaaaaacataatcttcttaactgagaaacgttgacatgcagaatcacacgttagaagataactaccgtgtgttagcaaacaatttacacgattacaactactgtactagtcatgaaagacaagactttaaatttccatcgtacttcttgtgcataccaaactcagcctcataaaattaaatgaaaccaatcgcaaaactggttactttaaattctcctcacctaaattatcatgctctgctctgtttttataccttcctctgcttttcccttccactcttaatcctccatagctacaaacaaagctcagtgaaaagaagaagaaaaacaagaagctaaaaatgtctatcctttcgtttcctcacactttctttaacatctctccttcactcttctacactatccttatatccagtttagttctactgatcctcacgcgccggagtgctaaatcaaagatcgtgaagcttcctccaggtcctccggggtggccggtggttggaaacctcttccaattcgcgcgctccgggaagcagttttacgagtacgttgacgatgtaaggaaaaaatacggtcctatctacacgttgaggatgggaagtcgaacaatgatcataatctctgattcagctctcgttcacgacgttctgattcaacgtggaccaatgttcgcaacccgacccaccgagaatccgacccgaaccatcttcagctccaacactttcaccgttaacgcttcagcgtacggtccaggatggtgatccctgagaaagaacatggttcagaacatg

SEQ ID NO: 38125 - DNA, 1984 bp, Arabidopsis thaliana landsberg
tcgttattatgaaaggacctttatatatgcatataaatagagacactttgttaatatagtggatcataatgggtcgattatatagggctggttaataatttgaataactttctgttaggtttctaacaaaatatgatgtgcttgataacaacatcaattgcatatataaatagcctctttcattttcataatttatatataaatgtgagcatataagtacgttataataaaatgaaattaaatgtggatatatgattcaattaaaagttttgtcttctcacaacatagtggatcagtctcataaagtatatgtaaatcacgtctaaaatatatggacatttctttggtggatattaattattctacaagtttgcattatatttgaaatatatataatcgcgactgatcaacgtgaaaaccctaaaacatcaaggatcaagcaaagtggcatggatattgcattaatctagttttcacaatttagcatgcatatactatatttatttatttttggaattgctaggagtgttgattacgtatatatatactatcatagatgattagggttaatttaagacttttgggaattgcatctagttgtatattattatataatcacttaatttgaatcatttggatacagcttgcgcatttagatacttataatagttctatatctagaataggcgtgcatgtgtatatttataaatggacagacaaatatctgagaccaaatcgatcttcattgttgtaagagtcaatggacagataagctaacgattgtataaagtctcttaactttctgccaatttacctactaatctcccactatccccatttgctataatttaaaattactatcattttatgacaagtcttagtaatacggctaatgtaagattattgactgtacaatatctgtttataaacattatttgtaaaaattaagaatactaaactggtatttcttgtattaggagtcaatactataataaaatatattagtctttaaatatatataagctttgaatatgtcattaaaatttataagtattattttaatttatttatatatcaaatattatttccaagttattttaacttactgtcgtttaaatagctcagaaatgaaaatgtgtaagaaaacatgatagggtcatcatttattttagccaattaaaatctgacacctaataataataaaagaatttaatttaattataaaatctaatttgccactaaaacaaaattatgtatcgatttgggttaattagaaaaggttagggtttagattttatgattaaatgaggttaaatatcggtttgggtttagaaagtcgattatggtttagattatataattaaacggattaaatatttgtttaggtttataaacatatttagattttataattaaacgaggttaaatgtcggtttgggtttagaaaatacgattagggtttagattctataattaaacggattaaatattggtttaggtttataaacagatttagattttacaattagggtttagaaaatacgattagggtttaatttttttacgattaaatgacggtttggatttacaaaggagaattaaggtttagattttgtaattaaacgagattatatatcggaattgcagatgaatacgatgtctctatcgactcgatattcgttcaagacagccagccgtgagatatcgtaggctttgtcgagcattcccatctcgatcattgttgtcactctgtaacacagagaaattggccggttatctaaaatgggagatatactttgggccattttaggtggagttaacacttaacaggcctgtttcattgtaattttaaatccactcagaaaacaacaaaaattccaaatcaaacatgcctatacaaattattaaactttgtaaatgatgaattcttttttacggaagcagaaaatgaacacataatctatgtcattaacctaacttttaa

SEQ ID NO: 38126 - DNA, 2647 bp, Arabidopsis thaliana landsberg
atctgctcatagcagttagctgaggtttcctacttcatcagtataaactgtgggttttgagatgttgtccatgcttatggcttgataagttaaaaccaatgtccatgctcttgtgatatagaagattgtcttccatgtaatttctacaggtatgttccctcctttctccccccaccattggcatctaagggtaaaggaccagagaataaggtcagtagttagagaccatatcagtattttatattattctggttcctgatttaaagtaatggtttaactgattattagtacaatttttcctctttctagagggatgaagagagatcaaaggagatggaaaagggaaagactcgaaacatagatcattttgtggaggagctcaagcgtgaacaagaaataagagaaaggcgaaaccaggatcgcgagaattcccgtgaccataatagtgataacacggtatgtcgtcatagtctttacttttaaccaaatacgtactgttgtttatttagagatacgtactgctttctggtattaaggctgtacttctctcagtcatctagccgctttgatgagctacctgattattttgatcccagtggaaggttagggtcattggacgatggtgacccacaaactacaaatctatatgttgtgaatctttcatttaagtttgtttctattcaacttaaatacctgcgttgttttccatagctatatatcataattttcttcccttgcctaaacttttgtggtattgtctttttttaggttgtttaaaatttttttctgcggacttttggaagatttgggccaatagctagtgttaaaattatgtggccaagaacagaggaggagaaaaggcgagaaaggcattgtggctttgttgctttcatgaatagagccgacggagaagctgcaaaagagaaaatgcaaggttagctataccgttcagtatggaactgtgtatgttcatgcgaggttctcaacttaaatacgttcgcagtgtacaatatgataaaagagcaaaagatgaagattatttctagatttgttttctcaggttcctgcatagcgatagcattttaactaaaacttcagatcagcatattttagtaggttctttagtgcaaagcctgacttttcttataagaaattgctttaacgtgttcagttgaaggcatacgtaaagagttcattgtttggtcagtgttactgcttttgtttggtgcttccattttttctttcttcatttatacaatgttgaaaactactgcctcctaacaatatagaaatttattaatatttgactatctgatttgataataaatgtgcttccttgatgcatgtgctatgatttgcaagacactaaatattttttactccatttcacagggatcattgtgtatgagtatgagctgaaaattggatggggtaaagtagtttttctgccatcacaagcactaccagctccacctcctgggcatatggcaatccggagtaaggaggtctgtggcagctagttgctcctttgagattcattttatccctgaatgtgactgttgcgtcgtttcattttcatacatttagatttagttcatgacggctgcttttgcttatatgcaactctaaaagctttcatttgttttaattggcagggctgcaatttaattttttctgttacatcgggtccaccaatgaattccgttccaaatcaaaattctgagctggtatgcaaacttcaaacttggtccatatgacttaactttttatttaaaagttccatatgataagcgcttcagttaccggatactgcttatatgttatccttcatatatgttaatctttagcacaagcatttctttgttaacttgaatttcatcttcaggttcttaccccaaatgttccggatatcactgttatttctcctgaggacgagcacctcaaacagattatagatacaatggcccttaatgtactggacggtggatgcgcttttgaacaagctattatggagagggggcgtggtaatccactttttaacttcttgtttgagctgggctcgaaggagcatacctactatgtctggaggctctattcctttgctcaggtacattttaattgtttcattattaggaatatatgaggttctcgttcatttttgtaataccctgatgatttttctcgccgtcatttagggtgatacccttcaaaggtggagaacagagccgtatatcatgatagctggaagtggaaggtatttaatctagccagctttgaaactgagtcaggtgctggattgtgtttaccttagcactaatgcattaacacagttggttttcatttattatagatggattccgccaccgctgcctgcaactaggagcccagagcatggaaaagagtctagaggcacatacgcagcagggaaaagcagggtaatctccttacaatctaacatatcatatcttcttcttttttgcatgtttttggagaagtttgtttattgatagctgataccttatcacttataaataatagtgcacggaagctgagcaaactctaaccgattcccaaagggatgaatttgaaaacatgatgcgcgaactaactttagaaaggagtcaaatcagagaagcgatggggtttg

SEQ ID NO: 38127 - DNA, 2708 bp, Arabidopsis thaliana landsberg
  unsure (1)..(2708): unsure at all n locations
actttcttctttacacatgattctcgtttcattaatattttttattcgtgatcaaagatgtttacgttttttattcgtcagtgtgagaccatgcataaactttttaaaaattcttaatagcttaatgccttaagaccatcgtgttttaatgcttctacatatattaacatgtcctccttattaatcagtcactcaaaatgattaattagaagggatgttttgctttaattgatacatcctaataaactcagtaaaccttagggtatgattttatggatagaaagaagatattaatttggctattaaattaactttaaacatttatatatacatttttgcagccatgaaataaattctgtagttgagacttatttacaatggttgccactggattttaatatttgtttttgataattagaaaaaaaatcttcgaattaaatatttgacatttaacaattttcctaaaatctctctacattaactacacgattggttattaaaataaaactttcaaaatatttaatatcatttaattactacaaaattatcattattgatattgtttttctgcatgactattacaattcaattataatcatcaaaccgcagaaatatttgataacatttaattactaaataattttaaaaataaatgattcataaacatatgataaataagatcaacattaataaaataaatgagtttttttacgggacgggttggcggggacgttacttaataacaattctaaactataaaataaaaatattttatagatagttacatagatagttacaaattgcaaacttttatgtgtactaactttaaaaaataaattgtttccgcggtgaaccgcgggttaaaatctagtttatatatattcgcttattgtaaatcaatattaaccaatacggtattgactcgtttcaaatacattaattcaataacatttttgatataaaaattagatattaataaatcatatattcatattaaattggcggattaaatatattacgatgatgtataactatagtatattttttacttttacgtacttatttataaatatattaatatatactctaggtatgtgaaattatgagattctgtcattagaaaaatatataagctaatgccacctattatttaccttttttaataaagaaaataatataagataataatcaaaaatttatattcttaaatagttatacctaggaaataatagaaactttaatttataaaaaaaaaggaaacacgtattggtgatcaatttatcaatccacccttgaaaatacagctaatgacattatcattgctttgctttaatttttatttttccttaatttaatttacaccacggcggccccacaccaccccaaattacgaatacataatagttggaaaataaatggaaataaaaataaaatatataattatcccttcacaacctcatccctccttcgctaccttcggaccttcctcattcctcctcttagctttagccactttttaaccctagtttttcccgccgccaccatcccccatggcttccgaggcgaatcagcttcagcaagcgcaactcgcgatggttctcggctccgattccgcgcccttcgagacgctaatctctcacctcatgtcttcttccaacgagcaacgttcctccgccgagtctcttttcaatctcgctaaacaaagcaaccccgataccctcgctttgaagcttgctcatcttcttcagctttctcctcatcccgaaggtcgtgctatggccgccgtccttctccggaagttgttaacacgcgacgatgcttatctatggcctcgtctctccctctccactcaatcttccctcaaatcttcgatgttgtattgtattcaacatgaggaggctaaatcgatctctaagaagatttgcgatacagtctctgaacttgcatccgggattttaccggagaatggatggccggagttgcttccgtttgtattccagtgtgttacttctgttacccctaaattgcaggaatcggcgtttttaatcttggctcaattgtcgcagtacgttggggagactcttacccctcacatcaaggaactccatggcgtgtttcttcagtgcttgagtagtaattctactagctccgatgttaaaatcggcgctctgaacgctcgtattagtttcgttcagtgtctggccaactcnnnnnnnnnnnnnnnnnnnnnnnnnnnnnnnnnnnnnntgatcaggacgttgaccgaatctctgaacaatgggaatgaagcaactgcacaggaggcacttgagcttttgagtgaattggctggtaccgagccacggttccttagacggcaagttgttgacatagttggttcgatgcttcagattgcagaggctgattccctcgaggagagtacacgtcatcttgcgattgagtttttggttactctggctgaggcgcgtgagcgtgcccctggtatggtcaggaagcttcctcagtttattgacaggttgtttgctgttcttatgaagatgctcgaggatattgaggacgatcctgcttggtacagcgctgagactgaggatgaagatgctggcgagacaagcaactacagcatgggtcaagagtgtttggatcggttagcaatttctctgggaggaaacaccattgttccggttgcatatcagcagttttctgcttac

SEQ ID NO: 38128 - DNA, 6970 bp, Arabidopsis thaliana landsberg
tgagtttctcgaacaatggcgagaggagggaaagaggaaggagaaaaacacatagggttactaaagctggcgcaaacgctgtcgtttttgctaattttcatggctggaatcatcatcggtctcgccgcaagttctcacatcgatcgctacttcaattctttgccgaggatgttctcatcaaccactaacctccaatcgattcctttttcgactcctgattactccaattgcacaatcatccaccgagactgcacaggtaacgacgacaacgagagcgacgacggaggagtcaaggcggagaaaccaaaggttcgagattgttggagcattgatgggtttgttcggccagagaatctgagtcatggaatgactgatgatgagttgttctggagagcttcgatggttccggtgaaggaagagtatccgtacgatagggttccgaaagtggcgtttatgtttctgacgagagggcctttacctatgcttccgctttgggagaagttttttaaaggcaatgaaaagtacttgtccgtttatgttcatacgcctcctggatacgacatgaatgtctctcgtgattctcccttttacgaccgccagatccccagccaggtacgttttgatgcaggacagtgaactttttgtgtcttgcttgtgttcttcagtggatcagaacaaaacaaatacttagtttcaccagtgacttaatcttgtatacaagaacagagtaatagataagtagataagaaatatagtcattctggatcatggagatctagttctctagaggaacaacatgtagatctaatcggcatgatggaatccaagttacactggcgcgtgactatttgagattgtttataggatttgaaccttttaattgtttcttccactgtcagctacatctgtttcaaggttgtgtataagatgaagctttgttgctaattttgctatatggtgattatttggaacatagctggttttagtttaatgttcgggaacagcttttattataaaggtgatctgttaagctgtgatctgcttagctgtgaactaggaaactataagagactaattcatagacacattagataagcttctcttgttgatttttacaccttttattgtagtaatccctttaattttctctgtatgtcacaatgatcctggtaattgcataacgctttgtttggttcttcaacttggtcatctgatgaatcatggatggtctgtgtcattgtatgctagatctacttgataaaaaaatctaaagaattctgtctggttctgatgggttttttatacttgaattttttagagagttgaatggggatccccactattgacagacgcagagaagcgtcttctagccaatgcattgctggacttctcaaatgagcgttttgttcttctctcagagagctgtgtcccagtttacaacttctcaactgtctacacttacctaataaactctgcttacagttttgtggactcttatgatgagccaacacgttatggccgtggccgttatagccgcaagatgctcccggatatcaaactccatcactggcgcaaagggtctcagtggtttgaagtaaaccgtaaaatcgccatctacatcatctcagactcgaaatactactcattgttcaaacaattctgcagaccagcttgttacccagacgagcattacatccctactttcttgaacatgtttcacggttcaatgaacgcaaatagaagcgtgacatgggttgattggtccataggcggtccccatccagctacatatgctgcagctaatatcacagaagggtttctccaatctataaggaaaaacgagacggattgtctttacaatgaagagccaacttcgttatgcttcctttttgctcgcaagttctctccttctgccttagctcctcttatgaatttgagctctactgtcctgcggttttgagaaaaaacaaactgattcatttctcctcttctttcttcttttatagggatgagatgagattcttctacgagatatataatatacataacataagactcttgttattgcttatatagtggaatactgttgggtaaaatctatccattatgaggggttgtatacagacgagcgtaatggacaagccttttgtatgtgagagtcttgcttgtgccgacctgcagagctaatctagttgaagatgtacgaatatatgattcatttggatcactttatgaaagaaatggaatttactgttctgatcgaattactgattttgaattccattactctttagaagccattggcttcaaaagaaccatacatacaagtgaagaagcaagggcaacgaacgtagtagattatgatgttgatcctaaagaaataactactagagtttgcaaaaaataggaaccacaaagcaaaagccaaattaactatgaggagaatggtggtgcagaagaaatagcgagtttgtcaaactagttcctcaactccactacctttttttcttgtgtctcttggcactcatgggaaggccctggctcctgttgttgaggaagatgactgtccacagagtttgaccacggtgtctgattagccacctctcctggcacgggatttaaccactgtgactgctgatggctagctgtctgattagaccactgttgctgcgctgtccaccctgactgctggccagctgtctggttagcccactgctgttgctggccggttgtctgatttccccacccttgttgctggccggttgtctgattagcccatggttgctgctggctaggagtctgattagcccatgattgctgatgaccagtgttctgattagcccacggttgctggtgaccattattctgattagcccattgttgctgctggccaggcgtttgattagcccactgttgctgctggccaggcgtctgattagccaattgttgctgctgaccaggcgtttgattagcccactgttgctgctgaccaggcgtctgattagcccaaggttgctgctggccagctgtctgattagtccatgattgctgatgacctgaaggacttgaccaccccgattgctgagaccaagattgctgctgttgatatcccggtgcctgtctcgaccatgacggtggctgttgccctgccgtctgattcgaccacgattgttgctgctggttatcagacgtgttggaccaagagggattctggccattattagccttgtaagctcctcctgctgtttgacctgcagttccattggcccaacctgaattggaatgcaccactccttggctcgtccatggggccctgtctctaggctgctgcggagctgcaggtgtggttccaaacactgcgggtaccctaggtggagtgttaccagactgcccagcgtttctaaccggccgggcaacagagttcaaaattttctcaatctcctcacgacgtcctgccttctcaaaaacctcaatgatgaattcccgcagcacagtagtaaccccaacattatgtctaatcatctcaccaacaatgtccttggcttggtcaagtgcatcaccatcacaaagacctctaaccaccacatcataaatggaaggatctggttttggttccctctctcccatcttagtcaaaacttctgcagattccgtgagcttaccattcttaatcagctcaccaaagactcttgcaccgaaatcagcaaccacccgtagattcacatcaaccatcctgtccaacatcttgacagcatcgtcaattctctctgccttgagataagcatcgatcattgctctatgacttggagcatcagcaggcaaagatctagatacaccttcagcaaagaacctttcagcttctgttaacatcccttgttcacagaatcttgttactatgttacagtaacctaaataatccatcacaaacggtttggaggtgaccttacttccgaccttcttgaatgtattaatagcttcactaaactctcccatcttgaaacattcattgaccattataccaaccgtatccgaattcaccgaaaggatattcggaggagcgtgattatccaacatctcattaaacaaagcccaagcttcatccttcttaccaaacttaagaaacacttccaaaagtacattaccagtcggtggatgcattctgaatttcttatctaacaaagacctgtaagactccatagcttccttatcgttccctttctcaaaccagtactccataaaggtagcattcacaatcccatcataaacagtacacttagacttcaattcatcaaagaactcaacagccttatcgaaatcaccaaggtccaaatatcccctaatcagattgttgtacaccgtggaatccgcagcttgacctttgctcaacatctcccttaataaactcgcagcatctccgatccttccagcttgaaccaaacctttggtcaaatgtctataagtaactgaggatggagcaaaaggagcattagccaatatgtgtctgtacacttcaagggcttcgtcgacattcccttcatcacaatgagcgttgatgatctgattgtatgagactacattggggacgatgttagactgcttaaagaaatactgaaatagagaaatcgattcactgtaacgcttggctcggtacatagcggcgatgatggcgttacaggtgaagacagtaggtcgagtattggaaaacacagactggcgagcgagctttgatgcagcgtcgagatctgatgctctgatcagtgattggactctgttgtgaaggttaagcctttggccgacgagagcggaagttgaatccggaagccgtggcgcgttgggatcacgttttggaggaggagctgaaggatcgcgacggagagcgtggagaggaggttcaattcggagacgacgtttacggcggcggcgctcagcagcggcttcttcggctgaagagaaggccatggtacgatgcgggatgggtggatagggaattggaggggtgtgattctgaggaatctggaattgggaaggatcatttggaatgggattaaggtttgggtatttctctgaatcctgattattaccagtggtcgtctccggatcttcatttgccggggaaagtgagatgttgtggatgcgttggtggaggaacgagatggaaagagggctacgggtagtggtagtggttgtacagagacggcggaggaggtgactgagagacatggtggagggaaaatgatttagggttttagaggttagaggaagacgaaaccaatgacgatggtgggagtagagagagcgagctcgtggcttaaacccttggatgtgaagaaatgggacttttattaaaaagtaatgtcgaaatgaaaattaaaggacgacgtcgtagtgtttaaatgagggctgtttggtaatacgtgtaatgttattccaaagacaagtaaagaaaggttggattatttagggcttctccttcaaaggcccaaacgatattaacagaccataatacgtgtctcaaataatccatagctggtgagatgccaaccactaagcatgcactctgcatatggatggttgttggaaagtttccatcctagtgaggaaatatcacttgaagaagtcgagaaattttgccatgcatgtcgtggtttgtgtgagtgcaaaactagcgtgggttctgatgatacaataaaggtgtgatcgtggggtttaaaatttaggaccataataggctttttgtgaaaattgcagatatgggtccgggaagtaaataacagttttggaaaagttccagtatctttatgaaaaactcggcatcacattcaaactcggtattgactcatattcaaaacgagtccataataaagaaaaaaatcaaactttcttgaaactgaaactttatacgaaaatgttcgaactgcatgcatactagtttttgaagaaagatcattaacagtattaaagatatatgtgaaattttatatgaaaagatgctcatataacgtgaaaacaggaatttgttgaactttacatggaacaaatcatgatttacttcttgttcatcttcttcttaaacatctccatgccccatattttgacagcctcaaagccctatgttatataaagagggaccatctttgcaatatccttggcgttatcttcgtttttcatcttgatgagatcggtgtttggggtgaccttcttcttcttctcttccacggtagtgattgcttctcgacaaaaagacttcagcgaaatgaactagaacaacttggaagatcctttgtgaactgttttcgtcgtggtgatctgggtaacgacaagagaatcttaatcgcttgaaaccatttttttgtggagaaaagtttatcaggaaaagaaacaagaagggattgatcatacgatatgtaacgatatatataatgatattaaaggggtaagaccatgtacatagctgatataatcagagtatcagaagcccatcaataattgtttaatggatcagagtatacagttggacctgatcagagtggaatgatacttctaatacccagtatcgagtgacgtgacggcaactgattcgtcaggaaaaaacagagaaaaaaaaaattctaaaaaatcacatatacccatactttatgagtatcatctataaccataaaagatcattaaaaatcattgaaaaaatttaaataataaataatactaaaaaatgtttaataatactttatgagtatcacttataaccatgctctaaatttatactcgtgaacatattaaacgggcctcatttggcccggcccataatttgttggctaggcatagggaagcgttttggcctttttttccaaaaacaatttttgctttgatggaattaaaactattaatacacaaaaaaaaaatgttcacttttacttttaggcgatggcgagaggatgtcagtaattgggttacataaatcggaatagagtta

SEQ ID NO: 38129 - DNA, 3319 bp, Arabidopsis thaliana landsberg
  unsure (1)..(3319): unsure at all n locations
tacaagaaagctaaagttaggcccaaatagctccagtaaacttgtcctcttcattgcattacaatatagtgggttaaataaacctcttcttagatgggcctcttgtagggtttaatttcactttgcaactcaatagcaaatccggtaacaacaaaattggccgaaattacataacttaaaaagtatttctttttctgggtcaaattgggctaattttttttttttttttttaattgatgtgtaagtgaacttctaaaaaatttggccaatcatttgacgcatctagccaaatagtcgaagtatacctgaagtagaatccattctttctacacaggcatactatatttcctgtatatatcctctatttatagtatgtgtcttggatttctatatttctcaacctagctcccttattattctctctctctctcagtttgttttcctattaagtcacataaattttcgaccaaaacaaaagtcacataaataaacttctctttttgtatatcatacatcatttattaatttcggttctttcacgtatcatcaaaagctactaattaacgagttgttttcacactttttggttttattacacgaagtgatatagttttatttacaaaataaaaaaaattaaaatagcaatgttataaaaagagaacagaaccttcagcttcatagaagaggacataaccttccatggaagctgaagcagaaaacgaacaagaatcaggtgaagaagaaagtttatatatgccctgagaagagttgcgtccatcatgatccagctcgagccctaggagaccttactggaataaagaagcactttagcaggaaacatggagagaagaagtggaaatgcgataagtgttccaagaaatatgctgtgatatccgattggaaagctcataacaagatttgtggtagcagagagtttagatgtgactgtggtactcttttctccaggtatgtattacaacacccttttttaagtcaaatttttttgttaaagagcgaaatttaaatttcatgaaaaacaatgtcatacaacatttagtttaatttaaattcaattggctttaactaaaatcagctaagatctctttattgaattagtatatattggatgattggattggaacaggaaagatagtttcatcacacatagagcattctgtgacgctttagctgaagagagtgctagatttgtctcagttccaccagcacccgcacccgcacccgcatatttgaacaatgccccggatgtggaagtcaaccatggaaatatcaaccaaaatcatcaacaacgacagcttaatactacttcgtcacaattggaccaacctggttttaataccaatcgcaataacattgcctttttgggacaaaccttaccaaccaacgtttttgcgtcctcatcatcgccatcacctcgtagtgcatccgactcccttcaaaatctatggcacttacaaggacaatcatctcaccaatggcttctcaacgaaaacaacaacaacaacaacattctccaaaggggaatctccaaaaatcaagaagaacatgagatgaagaatgtgattagtaatggttctttgttctcttcggaagcacgaaacaacactaataattataaccaaaacggtggacaaatagcatcaatgtcagccacggcattgctacaaaaggcagctcaaatgggatcaaagagatcatcatcaagctcaagcaatagcaagacttttggtctaatgacctctatcttcaacaacaaacaagcagagaatatcaaaattaaggaagttgatgaaagaggtttcacaaaagactttcttggtgtgggaagtcaaacaccgttcttggccgttattaatggtcagccatactcttccatacgtggcccccgcaggcctccacggacgggcactccaaccaaaaacataaaccagtaatcttgtattgtccatgtatactataaggtaaattacattatgttatatgagttttgagaaatatcgagattcctctgtttatgatattctctaagtgcagagacgtgaagtatgagattcaagtgacgagaggatggtttaagcacggcgaagaaaacggtgaaatatgagacttttgactcaggagagaatctctgagtcaactcggtgttgcagatgggtccactcggttgatgaagatgggaagctattcgggtccacttctgcnnnnnnnnnnnnnnnnnnnnnnnnnnnnnnnnnncaaaacatacgctatgtcttttcttattcttcttattcttctttttctttttcttgtaattatttcatgttttaattttgaaagaccctaaaagaaactatgaaaagttcgtagtttgttactttttattttttcatcgtagaaaggttaaacctttttttgaaactttgatatctaaaatggtttttttttttttttttaataaaatttaaaatttattcaaaaaacttttgtacaacaagtgcatcgtttgagtagaaagtttgtatttaaaacatagaaatcaaaagaatagagactaatgagctacgactctattatgatttatcttgaggagaaccatgcgctcatgcatgcatcgtaggtgcgattcccttgctctcttattgatgagatgcggttttgaacttgcttgccaagatttcggactagatggactgatggtgtttcagcttcaccatgtttccgacaatttctttctttccaaattgagtagatcgccaactgaaagacataccttattaagaagaggttgatttttccaatggttttgtctatgagtgtcttgtggacttcactccatcttgttgtgaattttgtgccaagaagagtacgacttagcccggaccacacctcctcagagtacttgcatctaaagaaaagatgatctcggtcttctaatggtgcttgacagagaacgcataatgggttcactccaatccgccaacgtagcattctgtcacctgtggccaatctgttccttgttgcaagccatgagataaaagagtattttggggttgaatgggcgaaccatatacccttataccattctgttcgtggcttggcttctcggattgcgtcccaagtttctctcgtactaaaaaccggtttaaaccggtcgtctctccctttccagagtactacatcattttctccagcgactcttttttgtacgtgtttcctgcaacgcagtctcaatatcattcaaataaccaagatctgtgtcgccttcttcgatgacattcaaatgcatctgccacgaggagtgaaggcttatccccatatc

SEQ ID NO: 38130 - DNA, 907 bp, Arabidopsis thaliana landsberg
tgcttgcaggacagagtgccctagtggccagggtgtcacgctccacaagatcgtgacagccataggaggtggtgtatcggttgctaaggcgcacgtctttggaaggctgtagtcgggccgagaacgtcgtctcctcccccaatcgagttattccacaccctctcatcgaaagatcgtgcaatcacccaacggtgcacatcagccaaagtaggtggttattctcccgaagagaacttcatttgaggcgaccctgacgacgttattgattggataaacggggaagccaaagcttttgaagagatcctgagcgatcgtggggatatcatgcgttcttcggcgctcgacggaatgctggctatcctcgagaatgctggatgcgaccatattaaaaccatggaccagaccgaagctgccttctccatagatgatacgaaggatccttcagctgaagcaaccttgatgggagggaaatttttcaatgatgtctgggtgaaaggcggacgggaaattgccagcgaaattataaagaaaagtgaaaaagatacccatgatgcccgagaagaagctaagcgaggcgtataggtattattattgaatttttagcttcggtgtttgttttctggcttcaaactaacaacttgtttactacagctgaactttcaccgctacccgagtcatacgacccccaggccgatcccgttatgaaagaggcgctggatgtgatgagtgttgtcaataccatcgtcgacgaagtcgtcgataaactgctgaatgagaccgtagagaaaattctcaaagaagactaggcttttgttgtaatgatactatgtaacatttgtgtataaaacaattatcaaacatgtatattaatgtaatatatttctttgtgatgcatgaaatttacgta

SEQ ID NO: 38131 - DNA, 6707 bp, Arabidopsis thaliana landsberg
ccgttaattttcatatacataggtcacaaattaactttgagcatcttacttattagctttaagcatactaatgcttttgtgggtctcacactagctaattgaacctatgggcgccttaagtttacaaacacagagctcgagaactcgcaagattagctggaataagcagaactactgtggtacattatttttctgaaacactttcagggataacaactatcaggagttttgatcaagaaccaaggttccgtggtgacatcatgagacttagtgattgttattcacggctgaagttccattcgaccggtgcaatggaatggctctgcttccgccttgaacttttatccactttcgcattcgcttcttcacttgttatcttagtttctgcccctgaaggagtcattaatccaagtgagtcaccacccctttttattattgattttgttttggtgcagatgcacaactaaaaatctcccacgcctttctcggtattttgcttcttaaaggcttagcaggactggcgattacatatgcactcaatctaaataccctgcaagcaactttaatatggacgctttgtgatctcgagaacaaaatgatatctgtggagagaatgcttcaatacacaaacatccccagtgaaccacctcttgtgattgaaacaactcggcctgagaaatcatggccttctcgtggagagattactatctataatctgcaagtacgatatgggccacatttgcccatggtgctgcatggactgacatgcacttttccaggaggcctgaaaaccggaatcgttggaagaacaggatgtggcaaatccactctaattcaaaccctttttaggattgtggaacctgcagcgggagaaatcaggatagatgggataaacatcttgtccattgggctgcatgaccttcgttctagactaagtatcatacctcaagatccaaccatgtttgaaggcacgattcgtagtaacttggaccctcttgaggaatacactgatgaccaaatctgggaggtttgttggctcttgtttctttccatgtttctgcagataacaaaaggaaggttctcacacgattttctcgtcctcttttcaggcactcgacaattgtcaacttggggacgaagtaaggaagaaagaactaaagctggattcccctggttagtgttaataaaactattgtttacaagagtcatcttgaatctggttatcacatctaatgaaatgaatctcttatattttagttagtgagaatggacagaactggagtgttggtcagagacaattggtgtgcctgggacgagtcttgctcaagagaagcaaattactggttcttgatgaagccacagcttctatcgataccgctactgataatctgatccaggagactctgaggcaccactttgcggattgtacagtgataacaatcgcacatagaatatcttctgtgatagacagcgatatggtcctgctcctaagcaatggtttgtctgaaaaaaatctcaaattcattcgatggaacttgtgtgcatatgaaacattgagaaatgtcttgttgtgttctatttgcagggatcattgaggagtatgatacgccagtgagattactggaggataagtcttcctctttttctaagcttgtggctgagtacacctcaagatctagttccagtttcgattgaagcaaagactctgctattttcctgctgatgatgacgatgaagaaaaacttaggatgtctgaatctggtttagccacaacactagctggattatgattcacacaagaagaaacactatcttttgttaaaagcttttgttcttagtttatagcttctactactgttgaacccctaaaaacgattattctacatcgctagtttcaaatcaatgcaataaaagattgttcacttctgattgaaaatttcagaaacgtttctcaataagtcattattgatttgatgaaagttaaaacaaaaaaccagggatcaaaaacaaaaaacaaaaaaacagagcttgatagactcaaaacagatgaaagtaaaaccgacgcagcatctttgttgaagagcaaaccgggttagtttttattaaatcaagatcacacgggtctatgaacaaaaaccgggacggtttagtaatctctttttgcgtggttgcttggttggtggatgcgataggggtattaatgtaattaactattatctgcctgccacttgctcacgagcgactttggtctgagaaaaacaattttgacggaggaaaggctgcgccttttttctccgcaacttcaccattttcggcttttcgctgccggaggggtttccccattgccagctatgaaccttagttctcattctcaaaatcaccattttactttcactaaacagataactatccttttggtctaccaattttagacgcttctgagcatttacagagacattgactgagtaaggaggagccgtcttatctttcttcatacttgagctcttcccacacgtcacataccggaggcatttttagcgaagtttctagctccaaggttctgtttttgtttgctctagggttttctattatcaggttcttatgatgggtatggcacttgaattatctgttctgggtcgatctgtcattgactctaaaaccttaaatttgaagagatatggtcaaaaatcgaagctttcaggaagatttctgcccagagctgagctgcactgccctgtggcgttgagttcttctaaacactccaatttgagttttagattccgacgaagttgtgaatttagctacagaagtcgctttatgctgtttagctccagtcaatgtcacgagggcagtcaacgaaagtccgattctggtgaaaaggagctggagtcgattaaggttttgctgaaacgtggaattgtgataggagctctagtctgtggagttttcttgtatggatgtcagaaagtgttggcatcggctggtgtggtcgaagcaggctatgaggtgtttggtcagagcgtagtgttgtttaagaatgctttgcctaaaatttaccaggttcttacggttcttagagagcaaggtctaattttggctgcgctgctcagcctctcagcattctaataaatggcagagacgtccattaccactctgtggccgtggaaggtaaaatcagaacattcattttggtgtgatttagtaatgctaatgctgtttagttgattttggaacaacgagatctattggcaagaatatgttgtttaagttactcaatttgaaaattccatacaatttttttgcctggtctccaatgttcttataatgttgtatctgattggttttgacatattgctgtgttatgtacggcttatctcaggtgcgtgagttggctgagaaagaaccagagaatggtgtattcagaatgctccggagtgatgtcaccagattcttgacgactatacttattggaacaacgtaattgttttttcctagatatgaatcgtctttagaggattgctataaatattgtctcttatcttaggtcttgtggttggtcttagtgttgtgaatattgcggcaactgcactggtcactgaagcagcaacagctatatttggggaagctggtgttagtgctgccactggattgatgacagtatgtataattgtttcaacactttttcatacctgtaaactttataatccttttgtttggtttagtacaatgcctcttttgtttctgtctggatattctttgatcagtataattgcttcctaagaatttgccattcttgggtgactatataggtggctattttactcctgactgagattactccaaaaagtgttgctgtgcacaatgctcaagaagttgcaaggattgtggtaagttaaaattaattgtcagtggttcactctaagcaaactttatgtggatatccaatggctttgctcattgtgacccttctgctatgaaatagtttaactgttcaaatctcatatgtgggtagtaaaaagacatgacttattttgtatgactgtgcataggtcaggccagtggcgtggctttccttagtattatatcctgtcggaagaattgtcacatatctgtcaatgggaatactgaaaattcttggtttgaaaggacggaggtatgcatcagtctagacttgttttaatatttgattcggtttggtggattgtcatgccttctccttggtaaaagttagcagatcctagatgtaaatcttgtggccttttttgtgtgtgtcagtgaaccatatgttactgaagatgaattgaaactgatgctacgtggtgcagaattaagtggggctatagaagaggaagagcaggtatgagtttgttatatatggattttcgatgagtctataccatagacttgtgatagttcacatgatacatgttgcaggatatgattgaaaatgtgctagagattaaggatacccatgttcgagaggtgatgactccccttgttgatgtagtcgcaattgacgccagcgccagtctagttgatttccatagtatgtgggtgacccatcagtactcaaggtaaaaaaattccatagacttctcacttaagccgtttcccttggattattcatcaagctcaattaattttcttctcagggtgcctgtttttgagcagcgtattgataatatagtgggaattgcatatgctatggatcttctagattatgttcagaaggtttgacagtttcatttcctatttcttgcttccagtttttgttagggtttctttctgttaattgtgttgtagaatgaaatatactgtgtttgattttgaagggtgatctgttagaaagtaccactgtggtggacatggcacataaacctgcattctttttccctggtaatcatagatgcattcaatctgtttaatctagatacactagctttgacattcgttgttcacacggaataatctttgatgttatgtcaataatttgcagattcgatgtcagtttggaatcttcttagagagtttagaataagaaaggttcacatggcagttgttcttaatgaatacggcggaaccatcgaagtatgttgctggttgtcctcttcgttactttattttttctctcctgctctcttgaaaggttgtctaatttctctccatgcagatagtaactcttgaagatgtggtggaagagattgttggtgaaatatttgatgaaaacgattcaaaggtaagctcatcctagtttcagcttgttgccattcttcaaggttgggttgaatagtaggagattcagaacaaaacgggttatatctgagagcagaggagattcaaatttctcacttccattgttttgggctcaataggaggaaattcagaagaaaacgggttatatcgtgatgagagcagaggggatatatgatgttgatgccaacacttcgattgaccagttatctgaagaactcaacataaagatggcagaggtaatatactctgtagccgtgtctttagtgtgtccctctagaaggaataaccgatcttgaagattgcttgttggcagagtataaactatccttttgtttcccttttcgcagggccatcagtatgagacagtctcaggttttgtctgtgaggcctttgggtatatcccaaagacaggtgagagtgtgacggtagttcttgaaaaggaaaactgggaagagaatgatgaacaagacgagggtaagcacgagcgtacaagatcagaaggagaagcaccaagtttatagactagaggtacatagattcatagtactacttctctttgcactaccacattctgcaaaatgcatatattattctcttaactgttcagacagatactagcagggaatgccagagaagtgagtgcagtccggttcgaacgagttaatgatatggatcaagtgtgatttgtgaaaggcccgagatggttcccaagttcgtaagaaaatggagaagtgaggaagattccgatggtaatctccaagccaagagaatcatgcatcgaaacaaaagtttagttccatatattgtaaagagaattaagtattgactctaataataaatttgattaaattaaatgactcatttgcaataattacgtagctaaatgggcttcacttaccattatacggcccaatgaacactggctccgagttttgccaagatataaacgattcatcttcttcgtttcatgaacagaagaaacagagcaagtttacacacagagagttaaaaccctaaaccttttcgtttcccaggaacaatggctaatcgcgaaacagattcctcaccggagattcgctgcgtctttgtagaaaccaacctcgacactcgtctcgcgttacctgtgcataaagatgaaatcatctccgatttcaaaggtctctcttctcaaattcatcactgaatcggcttactaaaacttatagttactgcgtttctctgattattgtggtttttggtttatagacaaagtactcaaggagcataaacaagttttcccagaaattggagaaatcaatatctctgcgatgaaggtaattggaatttgctactttgtttcatacattaggaacaagtaattgatgagttgctttttattttatttttcaagttaaaagacgaagaaagttttatcatttctcagaatctttgaatgggtgtaagggctttggatg

SEQ ID NO: 38132 - DNA, 3104 bp, Arabidopsis thaliana landsberg
ccccacttggtttcttcactgtgtctataattctttgacttctccgcctcctccgatcgcactcctatctctctacgagtcattcttctatggcttccattgctgcttctgcttctacttctctccaagctcgtcctcgacaactggtctctcttttctcttcttccctcgaatctctcatctttttcttactgaatttatgtcgggatttctcccatcttgctatagatctgatctgattcatctcgacctagctgttcttcttcttcttcaactgtagatctaattcgcagaatcgcttcctcatctctatattgatccgttgaaattgctctgtattcattctttgccctgtaatcttttgcattgaggtaagttagctttccttttctggaattttaggctctgttgaatctattttacttaactcggtcgaatcaccggaaaaattatcctattcctcttcgaattggatttgttttatatctgaatttgcatagattcgaactcttggtaagagcatgcgggttacatagattttagttgcttttgtttccttcttttggtttgtttcagtgcaaatatattgctttgcatttggagtttagttttgtactgatggaaagttatattcgaatatgatggcaggtgattggggctaaacaagttaaaagctttagctatggaagcagaagcaatctttcttttaatcttcgccagcttcctacccgcttgactgtttactgcgctgtaagaccttgtctcttctctcatatgatgttgtttctattttacttttgatctctcgagccaattcatcattcaccattgttgattgttgataaacaggcaaaacctgagacagtttacaaggtgtgtgcagttgtcagaaagcaactctcactcaaagaggctgacgaaattaccgctgccaccaaatttgctgcacttggtgctgattcccttgatacggtaactactttctcatgtctaataattggattcaacttttgaaatgggattgttcattggacttattgatgcataatcaatgcctctttaaacttgtatcctgctttcaagctcatattgtcgaatgtttagattgcaagtcttgtgaaggatcgctgcttctccttatacacacatctctaaacatgttactgagatacacatactcatgattcttgtatattggtaggacgtactcatgcttcgtgtgtcggggttccaggtgaagatagttatgggattagaggaagagtttgggattgaaatggcggaggagaaagcacagtctatcgccacagttgagcaagcagctgcactcattgaggagctcttgttggaaaaggccaagtagaaaatcctttactacattagcaaaaacgaaaaaaaccaaaacccaaaccactatcttcttattgtttggttagctagagagcaattgtgtccgttgagattttatgctattttcggataattattacaaggcttgtattttaatatttactttcgtctgaaacattttactttcacctttaaaatattagtactttctggtattcaaacataagttttaaataatataatatggttgatgatctaatgaaagatttgagtgcttgacatttttttgtttctttataatctagaagttttgttgtccgaagattccaaaattcaggggaaggggcataaacattttttttcttacctcacttcttttgctatgcaagtttaaaaaaaataaaaaatttttttgctatgaatcaaacgaaattagagatatcatcgaaatgtctagagtaatgattctttttaggcaatgaagattgaccacaaaagaaggcaacgaagtaagcggagtggtaatgcatgacatgagtcatctaaaaaaagcatttgtttgaataacactctcatgttagaagacttctgtgttgcttataaataggatcgcatgttactataactattcaatctattacctctaatgttttgcttccaaagaaaaaaagaaacaatgaagttcttgatttacctcgttgtgtttgttcttcttttcaatggtttgacggccaacagagtggaaaactctatggttcagaaatattgcaatcaaagttcaaagtacgcggaacgatatttctataagttttgcattgcatctctcgaagagaatgcggaaagtcagaaagcaaggaatagcaatgatttaacattggtaggaacgaataacgctttatcaaacctaacaaacgtgaaaagaattgtggagaagattttcaacgagagaaaatataagggcaggctgagtaagaagttgttgcaaaagtgccttaagctttattctgaaggctatgacgcgttaacctcagctttgaagtacattaaagtgagagatctgtttaaagtttcggttcatttgcagaaagcaaaagaagcaccaagcatttgcgaaatgggattcaacggcgacaataaacaaatatctccgatgaagaaagaaaacgatgttcttttcgacgtgatcaatattccttacagttttaatatgaatcgacatggttagattagcgcctgaaaaggaaccggaggttgcatgagttttattttaattgaaaaaagttatgaaagacaagcttagatctgttaatcaaaatgatatttagtatttactaaaaatatatatgtgtgtgcatgtgttgagaatgttttgtttagttctcataatcaacatgataattacggtttaaattaaaagattatatccatggattaactactcatagaatatccagttcatatcatttgcattttttccttttcttttttgataaaagcaaatatttttgctatatattacaaaagtatatagatcaaataagtcaatctaaaatacctacagtttataaattattatctaagaaacattaaaaaaatacaaaaagtttcatataagtattgagataattttaatgttgatattgttcatcacttttttaagtgaaacataaaacgcacatcattcactcctaaaatttaattagaatttctaatttttttatattaactgtcaaaaaaatatttggatacagctt

SEQ ID NO: 38133 - DNA, 8133 bp, Arabidopsis thaliana landsberg
  unsure (1)..(8133): unsure at all n locations
ctcttatcgtgcccccatctacgggtttggggaacaaagtccatcatgtgccatttacagattcttgtgcatctagtatgtgttactcataagctctatctcaaaatgctatcgttttgtatgaagttgcctcctgatgaagaaacccacatgttgttacagtacacacaagacccatggttcctcagaaggatcttacagtttatggatatggaagtgttgcatggaaagaccgtatggaagtatggaagaaacaacaaatagaaaagctacaagtcgttaagaatgaaagagtaaatgatggtgatggcgatggattcattgttgacgagctcgatgatcccgagctaccaatgtaagttgaaaccttttactgcatatttgttagtaaagaattgtgtatatgtattttcttgacatttctttgacgtggttcaggatggatgaaggaagacaacctctgtcacgaaagctacccattcgttcgagcagaataaacctttataggatgttgattgttctgcgtcttgtgattcttggcttgttcttccattataggattctccatgccgtaaatgatgcttacgccttgtggctaatatctgtgatatgcgaaatatggtttgcggtttcatgggttcttgatcagttccctaaatggtatcctatagaaagagagacatacttggacaggctctcattgaggtacgaaaaagaagggaaaccatctgaactagctggtgttgatgtttttgtgagtacagtggatccgatgaaagagcctccgcttattgcagcaaacgctgttctgtctattcttgcggttgattatccggtagacagagttgcctgttatgtttctgatgatggtgctgctatgcttacttttgaagccctttcagaaacagcagagtttgctaggaaatgggttcctttctgtaagaaatacactatcgagccacgagctcccgaatggtatttttgccacaagatggattatttaaagaataaagttcaccctgcatttgttagggaacgccgagccatgaaggtaagtttgtagttttagtcatctagtcaccctcactttgattttagtgtatgctatattgaccttttattttctttcagagggaatatgaggaatttaaaatccgaatcaatgcacttgtttccaaagccctaaaatgtcctgaagaagggtgggttatgcaagatggcacaccgtggcctggaaataatacaagggaccatccaggaatgatccaggtaagaaattggttttaactatggaatcgagaatgctctctctttctctctagaagttcattattgaagtaccatttgctgaatgcaggtcttcttagggcaaaatggtggacttgatgcagagggcaatgagctcccgcgtttggtatatgtttctcgagaaaagcgaccaggattccagcaccacaaaaaggctggtgctatgaatgcactggtaagtttctgatcttggatttttgacttcttcattctgaccaatttttgttagtctaatctgggtacttttcaaatgaataggtgagagtttcagcagttcttaccaatggacctttcatcttgaatcttgattgtgatcattacataaataacagcaaagccttaagataagcaatttgcttcctgatggacccaaacctcgggaagcaagtttgttatgttcagttcccacaaagatttgatggtatcgataagaacgatagatatgctaatcgtaataccgtgttctttgatgtaagtcacacttacctatacttgcgtctaattttcttgttctttcaaattgcttttagacacgaatatacattaaactcacagtttcttgagtttgtcgtaatttttccatgatatgttttccagattaacttgagaggtttagatgggattcaaggacctgtatatgtcggaactggatgtgttttcaacagaacagcattatacggttatgaacctccaataaaagtaaaacacaagaagccaagtcttttatctaagctctgtggtggatcaagaaagaagaattccaaagctaagaaagagtcggacaaaaagaaatcaggcaggcatactgactcaactgttcctgtattcaacctcgatgacatagaagagggagttgaaggtacaactgtttttatttcttctttggtttccgttatacccatatgttgctgtttgaaatattgatccaggggaggggattatttatagttgacagttgtctaaatagtttccatactaggtatctcatcatgtcttaactatttggcatttgtgaaacttaggtgctggttttgatgatgaaaaggcgctcttaatgtcgcaaatgagcctggagaagcgatttggacagtctgctgtttttgttgcttctaccctaatggaaaatggtggtgttcctccttcagcaactccagaaaaccttctcaaagaggctatccatgtcattagttgtggttatgaggataagtcagattggggaatggaggtataatctcatttgaactcctacatgaatctgcattgttctgacatatccactttggcattcactttgtttatattttccgctgtctttcttcagattggatggatctatggttctgtgacagaagatattctgactgggtttaaaatgcatgcccgtggatggcgatccatttactgcatgcctaagcttccagctttcaagggttctgctcctatcaatctttcagatcgtctgaaccaagtgctgaggtgggctttaggttcagttgagattctcttcagtcggcattgtcctatatggtatggttacaatgggaggctaaaatttcttgagaggtttgcgtatgtgaacaccaccatctaccctatcacctccactcctcttctcatgtattgtacattgccagcaaattgtctattcaccaaccagtttattattcctcaggtttgacagctctctctgtctatctatctctatctctatctctagaacaaaccttaattacgttctgtttaactgaaaccatgttgtgtttgtcatctatttacggttccaaatcctgatcagctggttctattgttcctctattgcagattagtaacattgcaagtatatggtttctgtctctctttctctccattttcgccacgggtatactagaaatgaggtggagtggcgtaggcatagacgaatggtggagaaacgagcagttttgggtcattggtggagtatccgctcatttatttgcagtcttccaaggtctacttaaagtcctagccggtatcgacaccaacttcacagttacctcaaaagccttagacgaagagaatgactccgctgaactgtacttgatgaaatggacaacatttctagtccaaccaacgactctgttcatcacaaaccttgtaggagtggttgcagacttgcagtgtttgattttgcctaatagttgtttgtagttgatgtcttaagggaacataggcagcgtttgattttgcctaatagttgttttgagggatcaatatattattcgattcaatcccatttttcataccatatatcaagaaagatgaacaacaagagtcattgtcatgaaacccaaacatttatttagcaaaagagtttcagaaaaactgactcagaagattcccacaagagtttttgtgaaatttataggcttgaaacaaaagaaattacttcaaactgtcaggttcttgtagaaaaggagtgacttcatgcttcagaatctgtgctcaagcttctcctgttccttgaaatactgagcatacctgcattcattgtgtgtatttgaaagaataagcacaaaagatgactagaaactagaccataatatgcagcacccgtaatgtttagatcgatcaggtaactaatagcttcacaagcaagaactcaacagttttaatagaaccacactcaanancccaaaatcttcaacaattattaaagtggttttctatgcctttgttgaatgcagactcaagattatatacaatgcaacacacacttcctgagcccttccccaaacttaaatcacacagttcactgtgtgaccaaacttggaagagagtactcaggacaaaaatcatcacagaaacaaaataaaaacaagagatggtataatacaatggtgaagtgagatgcttagctcagttgaagaaggagcggagttggtcgtcaatagttgcatgtgattgctccaaggccattgaagaatctccctgttgtgtctcagcttcgccctgggggtactcgacctctgctcctttgtcgcagccagcaccgctctgatggtactcgacctctcttcttctactgcggccagcactacggtcgcgtaagcttcgggactggagaagtcgtgtaatcctgctgctagatcgagccactgcagccttcttctttctcccgagctcccgaggctcgaatgatgaatgcctcgcagggacttgtgagactactaggtcactaggcttaggcctgtggtgacttggctcaggccagtggtgacttggctcgggcgcgtcatatctcctcgaaggcatgtcctgagggagctgtcattgcggaatagttgtagtggaagaggagcagctgatcttgtccttcagaaacttgatagccctgaggcacttggcgagtaacttatcctgtttcttgcaccacttctgcagcttgctgttgttcctgtgagcttcgctcaaactcttgcttttcctcgctggaggtatatgctcactgaaatgatacatgctcgtgtcaaactccgcctccctatcctcatctgtgtaagcaatctcatcctctgtagcttctgttgtagggacattgtcatcagtcggtggagcgctctcaaagtagaggtaatcacgcgcaggcttgaagtcaatgtttttgacctgaagtatggttgtggcctcggtgcagggaagcagaatgttggctgttcgggtcaaggagtgctcggatttgtagcgatagaaatcgccaaccatgtcgtgctccagaaactcacaacgacgcaaatgatctaaatccatcatcttcggatcaaaccctggagacgtgagaggtacaccacatgcaatcagaatcggtgtcacaacaccacctacacaaagggctcctcgcaccctcttcttcccgttggtgtgcgcccacttcctgtatccacacaggtggatcaacataagcataaccgctggtgcatcattgaggtcgcccttcaggaccttcttcccctttgttctagggagaatgcccttgagtgcagaatcaatcatctccatgtatgtgttagacacggtgcatgtagattccctagagtacagaacattcgctacagagcgttgatagtagcggatcacagggcttcaaatctggttgctcttggacctcgcagagttgagcgccatatcgttctcaatagttaaccacaaattcttcaactcttccctctcgaacttgggtttagttccctttccactggggaaaccaaacaatccttccaagctcctgatagatagctggtaacgctgctcgctcactgaaaaagtcaagaaccccaacccttcactctccagctcatttgctgtaagtccctgatacctctccacttgcagagtggagagaaactctattgtttccttcttgtaggtgacgtacgggtaagacatcagtgtctccagatgacacttctcaaataagtgctgtacgtcctccagtatccccagctgggctagagtctcataacaagggtacctcgttccccagaagtcgttcacctcgaaaagtctgatgtactcctccattgtaacttcatcaggcttgttcaacagcttcgtttctctgtgccatgactcaggctcatactcgacgtcaatatcttcgtcgatcaactcatatctacaggtcatcgctctctttcctctagcaatctcagctctcctttcattgcgtccagctactgagcgttgggtctcggctctgaagctctcataagcctgttgctctctctctggtctagttgaccaaggttcagcttcatcgacgttgtaacccgcatccatggaggattcgccactgtagttactcatattgattccctgaaaaagaatgtaactcaaaaccaaatatcaatatgttagtccgaataaaacacacacactaaaccggtcaagtacgcggtcgagtaaaatggtcgagtaaagtgagattgtggcttcgagtatagcagtcgagtgaacacgaatgagagacggtaacagcgtggtcgagtatacagcgaacggagaggagacggtggcggttttaggagcggtcgagtgaagagatgaacggaggcaaaattaatgccgaggtcgagtgaacggtggatagttgagagatggtgaagccggtccggtggtcgagtgaacggtgagaatagagagttgagagaaagaaatcgaagtagaggctgaggtgctcttgcggtcgagtgaatgggaggcgagatcaagtgaagaatgttgaagtatgaatggcgagatcgagtgaaaaggaggcgacggtgagacggtgaaggtccgtcggtcgagtaggcggtgaatagagaggagcggcggggtcaagagtgaaaagggagatatggcaaaactggtaccgtcgtcgagtgaaagagagaatgaaggcggtggcgcgagcggcggcggctgtgtcgtggtcgagtgagaagggagacgaagccggaggggtgagatcgagtgtttttgtgtggtcgagtgtttggagagggagagagatggtgaggtttggtcgagtgagtgttgtgagggagagatggcgtcagtaggaagagatgaggttggatcgagtggtggggaaggatagggtgagatcgagtggtggggaaggagggaagagattttgttatctctaaaaacgcgtgggggaacaaaggtgagaggtggtgggccacggtctgtctgtttgtcctgaagcactgttctctgttgactagaaccttctgtaatcctctgtaaacttgttaaactccctacaagtctctgtagcttctgttggtcgagtataatttataatttcaaaattttgttttttgagatggtgactaatactcgaccaacttactcgacctcatggcttctgagtgcaacagaagtttttcaaattcttgaatttttgacatactcgatcccgtgttgctctgtagagtaaaatttttaaatttttactctacctccacactatttctctgttcctgagaatcacaaacatagccaaaaacaaattaaaaataacaagaaaataaaagttttaattacagaaacagtcttgggaattcctctcaagtgagcttgtttaaagtctctagcttgactcctcacactcattaagaagaaaatgggtgatagagaggatctgcatagtcctctctgatctcatcatcatattcagcatcctctcttgagagatgcgtagaagaatactctattcttctttcctccaaataggcctctttctcttctggtggataatctatctcctcagaccatcttgaagtaaacttttatctcgggatagtatcagtcccgcattttgattgagctttctcttgcatctgatccaatttactcttaagttcctcaactgtctgagctagcttctctatggtttcttcttgctcatcagatttctttttgagatctcgcaagtcaggtgtagaggttgtgcttggtctggtgattgaatctgaaggttgaggctgagccctgatcttttcttctagagctgtcctttgcgaagtttcgttgatgtcaaactgcagcttgatgtgcttcccaaggttgagacttattctcccgtctttgacatctatcatcgctcccacggagctaagaaaggtcttcctaggatcagaggattcttaggttctgcttccatctcaagcacaacgaaatctgtaggtacttccactccattaatcattactggcagatcttgtagcaggccaaagggttttcttgaagacctatcagcaaggatcaaagtcaggtcgcaaggcctgtactgagtgaatt

SEQ ID NO: 38134 - DNA, 4459 bp, Arabidopsis thaliana landsberg
caactttctagttatatatatacttttctacaccaggtttgggttcgagtccacacataattaacgacacgattatagtgcacgatagaatgaactaaaacagctagagcgtagagggctcattgtctataaaaatccttcgttaacttgcaagaaaccaaaagtagagggctcacacttaagtctcctacatgacgattatatttcgtcaaaaagaagcaattagttagctttacagcatatcatttcgcctaggttttccatcgtacacgtaaattttcatgcaagaaagcagaaatatacaaatactaacttttagataatgaaaaatgagatcagattctagtcaaattttgttaaaagtatttataaatttaaattgcaagtcctcaaaaagtacgactaaaaatgcttttcttagaaaatgataataaaccggcgttttatatataagtgtttctttttctcttctgtcaagaagtaaatcattaagaaccaatatggcttttcttaaactaatctccgtgataatcacatctttgatcattctccacacaatcccatcaacaacatcgatctcactagatgcaccaacaatgattctaatcggcacttactaactatagagatagttgtcccaaaaaaaaactaactaactagagagataaatcataatcaatacatgtactatttctactatacttaagcaaatttgtataccactatcttaattcttaacactgaacatactatacactatcttaactcccaactcttgtaaaagaatatctaattttaagaaaagacttcaaatgcttgttaaatttctagtgaagatgcacattctaaaaacttgtaaaatggttaaaaaaaaaaaaaaaaaaaatagccttattaaaattaatatctcctatttctctatccaaactacacggatgaagcttattgctattcatccaccctttttctcaattctgtcctatttcttgtgcatgaaacttctccatcttgtaatcagataaatcatacccaaattttttctttctgaaaacatatatacccgaacattaattactatcgtcctttctcctaattttgttaagaaacatgtttgtttgtttttagtactgaaaaaggatggagatacttgctagatcctatgaaccttttctctctaggacaaatcagtaaccaaacaataacttagcaaattaagcacgacagctaatacataaaatgtggatatcaaacatgcacgtcacttccttttttccgtcacgtgtttttataaattttctcacatactcacactctctataagacctccaatcatttgtgaaaccatactatatataccctcttccttgaccaatttacttataccttttacaatttgtttatatattttacgtatctatctttgttccatggagggttcgtccaaagggctgcgaaaaggtgcttggactactgaagaagatagtctcttgagacagtgcattaataagtatggagaaggcaaatggcaccaagttcctgtaagagctggtatgttacacacacagatgtattcatgactaagaatattctcttctctatatataatattcggaaatctttattgtacttttctttttggtctaaggagcaaattattgattcatatgctagtgtatggcaaaaccaatacaaacatacaaaaaacaactggttattcagaataattctttatgcagtttatttaaacgaagagttttatataaataaaaaagttatactatcttttatttacgtagcacatatatatatatatatatatatatagcttattcttcacaaacaaggaagatgctaagctcatgtaaagttgttaaactatttcactgggctgtcttctggtgagtgaagtcagtgaaaatttatgaacaaacggtttttgtgttgggacatgtctctatttctattggtgtgcatagattcttcatgataaaatatatagaaggagacaaataagaaagcagtcttagtatgtaggtatgattaatatatcaactattggttttgtagggctaaaccggtgcaggaaaagttgtagactaagatggttgaactatttgaagccaagtatcaagagaggaaaatttagctctgatgaagttgatcttcttcttcgccttcataagcttctaggaaataggtattaattgttacctcgatactaaactcggagagtgcgtcattagtctaatactagtaactcgtatgtatacgtaggtggtctttaattgctggtagattacctggtcggaccgctaatgatgtcaagaattactggaacacccatctgagtaagaaagaagaaccgtgttgtaagagcagaatgagaaagagagacattacgcccattcctacaacaccggcactaaaaaccaatgtttataagcctcgacctcgatccttctcaggtaacaacgactgcaaccatctcaatgccccaccaaaagttgatgttaatcctccatgccttggacttaacaccaataatgtttgtgacaataatatcatatacaacaaagataagaagaaagaccaactagtgaataatttgattgatggagataatatgtggttagagaaattcctagaggaaagccaagaggtagatatgttggttcctgaaacgacgacaacagaaaaaggggacaccttggcttttgacgttgatcaactttggagtcttttcgatggagagactgtgaaatttgattagtgtttcgaacatttgtttgcgcttgtgtatgggtttgctttcacattttaatttgtgtgttttaataaataaggtaaatgtttttagcattttaatgaaatatttcaagttttcgtttttatattttgaagaaaataaaagattaataaattatgaagattggatatctttttgttatctacacgacaacagtaaaaaggaaaaaaatcttattttcttaaaaaggatgacatattatctacatatttcttaaaaaagtttttattaattcaataatagcataataacaatgctattagaaatatactatagctgtagataaaacactattataatacaacaaacaatagcaaacataaaaccgttatcttatgtgtttattttattgttgcgagcgatgatatagcatttctaaaaccgctgcaatattaatcgatagcgttttacggacgctattaaaaattgttttttgtagtgatcatggttttaacaaccgactgacccaaggcgagtataggcgcggcgcgttgagtagtctactcattggattttgtaacgggtctaaagtatgatttcacttcgtttagctaagtagaaataatttagataatttatctgcttgattgaaattgatccctgacctatatatatatattcctcttcaagtataagaaccattagacaacgaccacttggttataaataaatataggtgagttaatagattaatacaataatgaaagctctattcgtcacgtaaaaagtgttctttaaaacaatttaaacctaggttatgtaggcacatttgtattattcaaggattatctcgagttacttttcttctatcttctcgtttattatttttttgtttattttactagaagctcgagtagtgtataccttctacttgttagattctttgttaggtccagaataaactgtcttcctaaagacataaaaataatttgaccaatgatataatttactgtataatataaatagtaaaaagaaaactgtttactttaatattttacttaaaaacttatattattttgttcaagacatcatatgacatatactgataaactaaaaaaaaggtttaaaacatcttataatatgaaacagaaggagtattaattttttgacattaatcttttttttttgaaaaatgtttttgacattaatttttcaagaaaattatgactagaaacgtgaatttcttcagaatttttaaatttattattttaaattgactattagtgaatctgttagtttctaacatcgaacatggttgaaaatttgaaatcaacgaaaataacaattagctagtctggtccaagaacgtagtaggatgagattttagaagaaggtaataatgtgtaagactgataatcatgcatgaattattttctgtaacacttatctatagaaccctcaattgtaaaagaaatataagaattttatatttattaatatacgataatttcatacggaaaattaataaataaattcttatatttgtttttaaatgtatgtaattatgtaaaggcgaaagtgtcccatgcaattttatatatttaatcaagtgaaaactcgaaaacagaaaacttgccgcacttcaaacaagctttttggcaagtaataaccattctgtcccggttgaactataaatgcatggaaaaagcaccg

SEQ ID NO: 38135 - DNA, 2640 bp, Arabidopsis thaliana landsberg
gtgcaagatttatctgactccatcggcagcaaagaagaagaaaatgaggagctgaagaagatgatcaagtggtcgtaaaaagaggagcagctggatttgcattaatcgcagcctcatgatattgtgtatcagccgcatctttttccttataacttggataacatttctaagttgatcagttttgaacaacaaccagtgatcccagaggattttgaagattttttggctgacttcatgaagcaggatggagatgaagaatccatcgacactgaaggaatgatggaacactacactaactgatctcagccagcttatagtcttcttcatgttcttctcctaagcatttgtcttcctctgaaaaaagaaaaaatatagaatataccgggtctttataagtctgatgttcggaagattcatttagctcatttgcatcctcaatctttgtttttctcatctagtacgtctgatgtcaagagccattgaataaactcagatcttttcgtctgctctccctgatcttgtgttgagacagatgaggaagattaaccaaactatcccattcattgttaatctggtaccttctgaagaagataacaacatctttacccagagttcaatcaagtatattttgcaaaaactagcctagtataagtcacgtgtaagatgcatgtagaacacagatttttttttgttttggtatcaatgttaagtatttataccattttcgaagttttgacagaagttataaagattacaagtaatggaaaaataaatctacagaaagcacagacaaaaacaaacagtaatggaggaaaactttaaccaagagcggaaacaagaaaagaaacaccgattccgagaagctaaactcgaaaatttgagtgatttccacaactcgaaaataccaaggagctggaatctcatcctacttgccacgagcaaaccttagcagaagtccgtcctcaaaacctctcgagtaaggcacatgtaacttctcttcaaactaacgcaaaacgtaaagacaatagagaactaaaacacaaatccgacgaagtcctcttgacaagaagatggagggttgttctcgtactcgcttggcgggatgggcattcttaattgtttaaaacttcaccaattgaagtcttatggttcatcatcatccgttgtaagttccgcttaacatcgctatcaccgacaagctcatgatcttcttgtagatgcaagatttaccacaacaataaatcatctgttgactccgagaaaccgcttgaaaaatctgtctacaaagactgcaaaattggaattctataaaaaaatttatttctgtttcgatacaaactaaaccgaggcataagcttcacctatagacctaacctgaagtctactccattattcattaacgaataatcttttggcaaaaatattaatcaaatggcaattttgaccaaattctcatttcatatcctctcaagttggtaataaaattaccaaatattttattaacaaaacaatatgaaaaagaaagaattatataatcgagaaaaatagagaatatggaaaagtagaggcgtacgacaaagaagaccttaacacacacaattcaagcaatatatataaaaaaaatccaatctttgttcctcaatcctctgcttcgcgtttttcttcggcattgactctatcaatcacaactttctccgggatcgccgatttatcttcgtttcaaccatgactcatatccttttgattctctctttgcttcaatctctttagattctctgtttctcgtccgattgcagaatttagggttttgttttgcagaattagaggttaaagttttcaattttagggtttgtttgggagaagatgcaattgtagtttcgtttctagactgctctgtttagggttgtataaagattatatcttattgagtctatcttgcttatggatcttataaggattctgaatttgtgaaactagaacaaagtgtgttgttttctttaattcaagcttttgatttttgatgcgtaatcgtcacgtggaagtcagagagagcgtgaccgtgaaagagctgccgctcgtgctggtggaaagggtaagaatggtgacgatggtttgacgccggagcaacgccgtgaaaggtataaacgaatctgaaaaaacgaatctttagttgggattgttctgatctgtgtggttgttgtgtaatgattcgatctgtgtggttgttgtgtaatgatttgatctttgtgtaatggttgttgttgtgtaatgaatgattttagagatggaaaagcattgcaagagaaggcggctaagaaagctgctcaagctgcaggtgcgagttctggtggtgcagctggaggaaaaggagctgttgctaagaagtgatgatgatcatttggtttgtcttttgagcatattgtagactttatgtttgaaattgggttgtttagacctgaagctttgactcttgtctgaaatcccattataatgtctttgtgttgaatttgcaatttgatgcttatggtgaaatcttatttggtctttctttgatctgttatgagcgttaacgctacaattatactgtctcttatgaatcttaatactctgagtttatgtttcactctcagaatgttggaa

SEQ ID NO: 38136 - DNA, 4862 bp, Arabidopsis thaliana landsberg
gacatcacaataccttgaatctagcaggtaatgctttgcacaagtttgactaagatgcaaagaccaatattggttggcaagtgacaatgaggaagagttggagtgaatgtaattctgtaaaaagatagcacaacttaatagattggagtaaagagaaaaagctattaatcacaacatttgttttttctttttacataacgtaactcttgtgatcatcaacttcaactgattcttcagtaagaacattgagatcttccaaagaaagttcaggatgctctggatctttgatatctcttatacgatttgtagactgttaagggaaaaaagaaaaaagatgatccaataacaatataaacataactacgagaaattcattgtcttagtaatgaataacaaaaattaaggatatcaaaaatctcgagctgatcaattggttctactgaaaactcatcggtactgctttgatcagtacgagaacgccgtgttcttttcggataaataattgggttcttattgggtaatacagaatccatgttttcttctcctgaacgcataaaccctaacgatcaattagtagaaaaccgaagaagcttatcgaatgagacgtgggagacctcaataaacctaaacctaaatataatctgagtcatgaagttaattatacaaatcatataaaggaaatatcgggaaatactaaaacggtgccgtactctcggtaatctaattctcgtatccatttttcgttttaattgtttcctttttttaaaaggaatattttcttttacatacactatggttttcctattcgaaaagtgaactaatctggttaataataatacatggtggattaggaatgataattccctatataaacactttaggtggtattggcaaaaaaagaagaagaaaacttgaggtgagattggtcgagatttctggatacataaagaagttaacagaaggaacaagcgcaagaaaaggccatccatacaactatcgcaagtgtgcacttccatagccatgaatggagaagagacgacaccttttaaaagaagacagatgacaattctgatgcttcctaatgatttgctgttcaactgcttagcccgcatctcaagattgtattatccaactctctcgttagtctccacgagattccgctctctccttgcttcaacggaactttatcaaacccgaacccacctgggccgcaccgagagatgtctttatgtgtgtttccgactatttaccgaatctgaccaactacgttggttcacgctctgtcagggaccatttaactccaaaaagtttttggttccgatttcatctcctaattttccatctgcatcttggtcggatgctgcaatagtcggctcctaacatctatgctattggagggttagtaaataagaattattcgtctagcgtcatggtcatggattgtattctcacacatggcgtgaggcaccaagtatgcatgtggcccgtttgtcccactctgtttgtgtccatgatgggaaaatatatgtaacaggaggttgcaaaaatcttgattcaacgaattggatggaggtttttgatacgcagacccaaacttgggagtttttgcagatccctagcgaggagatatttggaggctcaaagtacagaagcgtagagtatgaaggaactgtctatgtaaagtctgaggcaaaggatgtgacttacaagctgcataaaggtagatggcgaacagcagacatagcgataaataaagggtggtggtgtccttcattatcccattattgtgtgatagagaacgtgttctaccgttatactgatagaagaatcgaatggtatgactccgaaaaaagattatggacaactttgaaaggtgtggaaaaattgcgtagtttttctcgtgtaaacttggtgaattatggtgggaaaatggcagttgtgtcggtagagtatgtgttcggtaagaaggaggcaaaaatttggtgtgcggaaattgcgattgaaaaacgtcaaacgggagagatttggggaatgctagagtggcttgacattgtgtttagaaccaatgacaagtcatatagtttagagcgtgctcttgctactaccatttgatggctatgaatcatgactcataattgtgtaaacataatgaatcattcaccaacatatatgaaccaaaggacaagtcaaattgtgtgtataagattatgtgcatatcgtagagatttatgaagcgatttaatagtaatatgactagattacacaaaaataaagtaattgactttgtttgcctttgctaatcttttgtttttctctttgaaattatcagcatttcacaagttttctgatttcaacaaatctaagagcatctccaatggagagagctcctctattggctctctccatttctttatgattaaatttcacaaaaagtgattagagagcttttgtttttgttttttttaggttttcatcttccaatggtaggctctctcttacatgggttctcttgaaaaaaatatgcaaatcataaggtttaaagaaaattcatagccatgaagagaaatgttttcctgagattcagtgaaagaaacaaataaaaaagaaacataatggtgaagtttaatggatggatactcacactcttcttgaaagaagttgcaggtctctttttgccgcatagtgtagaggagtcccaacatgacgacctaaagaagcatacctgcaagaaaccatcccatgtatcatatcaaaacattggtttcaggaccaattttagacataagaagctacaggagaagacggattgggatttgggtttatggtttgaaacttatggctaattttccatgacagatccggaatgacataatctgcgagcagccaactttaaggacgaattcctatgacaccacaaggaaccagaagatgatctttatgtcattggaatgatcttgctttcaagtttccagaacatcttttagaagcaaaatcagagttctgtagccaaacaaaacgaagaaggaagaatcaacatcaaaacataaaactgtttttgaaacctgaaaccttcttcccctgagctactagattcagagttgcatcaaacttcctcccaaacatgacatcagtcctctaatcgcagcatcaaatcaagcaagtgacatataacaagctgaaaattgcttcaggtcaatcgcagcagaactctcatggccattcctccccaacaatagaaccagaggtaactccagttaatgctactgcattttcgacgatgtaacccaagtttcagatcaacccatcaaacagcttcaacatgagaccaatgacgctcatctcttcacatcttcgatgaatttaacaagactttcttagtatagtgatgtgtcgtccaacagtttctctcacaaaaacaaacaccaatatgcaacaaaggttttctagttcatggtggcaataaatacaatcgttactctcatcctctgatctcagagccggattatcaaacagttcaggcagaagtcgtttttcaccacaagctctttgtcaacttccctctctcgtaattacaagatctcgcctaaagcttttcatgatcccaaaaaaaaacgtgaagcttgcttctttctttaaattcaatttccattcagagcgccaaacatgagtttaccttgtttcattccaagatgagtctggctgcaagatattcttcagttttgcttcgagcacactcaaggttattcttcgctcttactttgtctgtgtgtattcagttcaaagagcttttgtagatattatccttgctgagtaatgaatatggcatccccaaaaaatagcgacgcgaggatcaaatatagtgttgaaaatatagccattgatgtaatttagtgtcgtttgcaaaagattgtgtgtggtggatagcaagtttcgcaccttgtttaagagagcttcagccacgcttacaaaaaatcatataccgcagtagtttattcatatctgctattttagaatatgggtttgcacttcttttaagtaactctttcacttttgtatttattttactaaactaagttggaccactttcaaacttttccacttctttcattaagtggcctttcagtctcccacttaatctgttgtcatttctaaatagaaaaatataaattgactttgtaaaattacttccaatagatacacaaattttaaaacaaagagaccttttatcttgtatagcaaaaattaattaatatgacctttgttacaccacttccacacacattttgacaaaattggttatccccattttacccaatatttaacaagttcatactagagttttccattttagagctttatgttttatatatgtagtgatctttaacattaatttacattcacaacttgattacttgacttcacagacatgaaagcttttgtcatttaatttgaaaatgagatgattttccacatttgtttcattttccacgtttgaagttttacaaaacgtttgtttctcctaaaaacacttgtgtcatccagactaaaaaaggcttttcatgagtttaagaatgaatttaaaattcataggcgaataaaagtaacttctaatggtaacatcttatcagttggtgcatcatagcacaatatcctttgttcaagattcgactttgtctttagaaagtgtttcacctgcttctctatgtcttcgtcatcataagaaatttcaccaaatagtattacttccaatagatacacaaattttcctttcatcttgtatagcaaacattaattaatatgacctttgttacaaaacttaaacacacattttgacaaaattggttatccccattttaccgaat

SEQ ID NO: 38137 - DNA, 1537 bp, Arabidopsis thaliana landsberg
ttcaagaactaagtaagattccaaacatcagagggccagcagcgagtcaatgtttgactttaaacccagaatttgttttattatgctgtaagaaaaaactcattacgagcgacccagcagaaatatgtgaataaacaattaaacaccctatgatgttattgttaagactgtaaactaggaaactaagccctctgcaacttatccagtatttggaaaaaggaacactatcaagaaaccgtaaatagtgtttttactttaaaagaaagaaaaagaaaccttgaacaacaattattttggggtatcttatagcagataaggctaattaagcttgcacattcactgagcttctgtagacttttcatttgaacaaaaggtgagatgttgttgaaaccctaggaaggtcttttatatcctcgatgatcaactctggatcttcaagatttaatctcagggagattgttgcggtttttaaacgcttagagttggccaaaacgtatgtcaagaattcttcctctattattctatccccatagtctctccactcgaatatctcgagctgtgatgacaagcattcgggaacatgactcggttgttttcatgaccatgggagatcctcgggattatagacaaatttttgagaagcaaaaatttgaatagtatagaggatagagagtccattaaagcaagaagaggaggaggaggatgatacttacataatttaccaaaaacttttttagttttggagcatttgcacgtaaacgtaggagtgtttccaacatgtctgggccatagggatatatgcttaactttattagtcgacagaagttgatggtggtacaacgcataacctggaaggaaaacagtcacaacttaagtaagtcgtttgatgcagcaatggagtttcaatgagatgaagttagagagcttaataccattgcatcagacaaatgcattcgaagagacaagactgaagaaaaagatgttagaaatttatcatccggatgataagcctcatctacatcgatagttgcatcctggagacagggcatatcctcgatggagaaagattctagtgaataatcagtgatttgacaggtgttcactgcaggagcatttacaaccaaacacctatcggtattgtctactacatcagagcagagattcttatacgttaactccaataaagaaggcactttgacagtaaacgttttcacattgtcatctattttccttagcacgaacaagaactcaagaacagggcagctcgataagaagctaacaagagaatcctcgtctttatacacaacacagattagttcgagctctgtaagggatgggagataggcggaagaaggaacattcacgagaatctggtcagagagagtcagttcagaaagagaggtgcaagagtaaaggctcttgggcaagctggttggacctgcggaccagaggagcttgattgttagcgtcatcaccaaacaatcaacagcttttgcaacccacttttccatatcaacatcatcagtggtagggcact

SEQ ID NO: 38138 - DNA, 1303 bp, Arabidopsis thaliana landsberg
  unsure (1)..(1303): unsure at all n locations
gacctttttttttagaaaacatccaattaagataattattaattacatgactcgcgatctgaccagttggtccaaatatatatgaaacacaaatttagtttaatagtattttagagtatttctcttttttttttttttatcggctggtatttctctaatttacaagtgtgttgcatatcaaacttcattcctttcagaattttccttttgtatcattgcatgggtctttgactcttttttgggtcctttttcgtcgaccattagcgtctccactttacctcctttgtttccacgcacaattgattctacatgggccacactggcccatatacattcatccaatcgggctatcatcatgtactaagcccaactcttttgaccggtgatcaaacagttatgatcaattaactccaattccttcgtatcccaaaactcgtgcctttgtaaattatccaatacgtaagataaacaaagaataaatattatttctaaaaacgatatgcttcaacaaaaaaaatttaaaattggatattccaaaaacaaaaccacgaatattcttcatttaataaaataaaacactaatattaatattatcaaaccaccatcaatcctgtaaccaattttcacttttgattgttcttccttattctcagctaaccatgaagttcggcaagagcctaagcaaccagatcgaagaaactttacctgaatggcgcgacaaattcctctcatacaaagaactcaagaagaagctcaagcttatggagccacgaagcgtcgagaatcgtccaaataaacgttcgagatccgattccaattctgtcgacacagatccaacggttggtatgaccaagaaagagcttgctttcaatagtcttcttaaagatgagcttgagaaactcaattccttcttcgttgagctagagtaagagtcatatcattggactaaaggtaaatcctccataatttatgtggatcgacgcaaaaacttacggttcgacgtaagactgataggtgtgatgatttgggatcaatgtgttagttttgattgcacatatataagcgttgcttcctgatacgtcggaagtttagttattctctcataatgaacatgtctgtcgacaattacctattactaacggcctgtctccggcgtgttttccggtgaagtccgtcnccgggatgnccggagggtggattcctcgtcgttcatctgnctcagtagtcgcgtttcgtttggnggcgtagtaaaatangaatgggcggtgttagttnnaggtttaggtccttgttgcgttctttt

SEQ ID NO: 38139 - DNA, 1420 bp, Arabidopsis thaliana landsberg
  unsure (1)..(1420): unsure at all n locations
ccggactcaaccgccaccgctgtgctaccgtcgttttcttcttcaccgccaattctacagcagtacaaacgccatgtaacacaaagaacagagtaacttctcctgtaggcatctcacgtatcaaatagaagaagagcaattcgtgaaccaaaccggagacgataaacgctgccaaaatccccggaaacagagcccaaccggaactcattttgcgttcagagactcgccgcattggtgcgtaaacggctggccggagaatcgccggaaccatgagattccaccggcgaccccagaagtcttgtagagatgtggctaagtacggtttattggactgtggctcaagatcgcagccaagagagataaaaacaacaactttaacaaacgttaatataatctcaatctctaagtagagatgcacaaaatagagacctaatagtatagtcggagacagattttgtctgtagctatacaaatgtaatagcactgcaaagattgcaagtttaatggcgaaaaccaatttgggcaaatggttttgagatttagggttttgctgaaccttgatggggaagcaagtgaagcagaagaatcgagggaaatttgttggaattgggattaaaggacctttatcgaaggagaagaggatgagtntgaaattagcaagccatgtgaggaaaaacgctgtgattaaagagaaatgcacagaggagaagaacaaaggaagaacaaagaacagaccacatatcggaagaaacagagaataatcgaagaagactggttttgatattgggtgttaagtagtaacaataagttactgaaatgattgcagaaacccatacttggatgaataacttgagttcttcctccatttttgtgttattttcttttgctttgctcagtttttgcagtaaccttaggtagttaagttttaaacctggttgtttggcgtgttaaaaaagtaatctaattgaagagaaaactaggaacatggttcacaggtcaacaaaggtttgcttctacgtgatctgtcttctgatttctgagtttgcttctgatttgtttctctaagtgctggctcttatgttattcgtactctgtctcgtttgatcagtgcacactatctatgaccttggaacaaatagccaaatgtttaaaatggaattcaagacctcatagagttgattccagagggaataacatttaatcgttgtaataattacatcatatatttataattagattatattcatacatatttgattagattcataaagtaattgatcgttttttgaaaatataagaactaaacatttgatatagacattccatagaacaacatattgtctcgtcggaatttttgtatactattccgttttgacaacgtttattacacttcttgcatatgtatcgcgtgagacgatta

SEQ ID NO: 38140 - DNA, 1509 bp, Arabidopsis thaliana landsberg
gtcaaactcaacaaaaacacacagaagaagagagcttgcaaatatatttatattatgaaaacttacatttagtgttcgttcatctccaagtcgggtgtgtaactaaaagctgatgatgacagagagattcaccaagccgagacaaagacacacagtaacagagagtttttagagactcttacagacacatcataacaagcgatagagacatatagacccaggaaaaaatattacatggttgagtgaatgtaagaacacaaaagataaaaataagagaagatgaaatctactaccaagactttagaaccatatggatacatcttgctgcttctgctgcattccatccatcgttcctactactcctggcatcgacatatctatctctgtaatcgaatgacgccatgtcgatcggtgtggaatcaactcaagctggaacatgttgccgctactgttattgttgttgtcatgtgcatcttcaaagttgttgtgatctgcagtgtcgaactctaacacatgtgttgctgttgttgttcccttgaaaaaacgtttgattgttgctgctgttgttgttgtttgctctgtttgggatgttcaagtcttcaaagaaacttccttccaccatgtttcctgggaactggagatgttcttgatggttatggactgtgggttgaagcagtgacacgctttgattttccatgaccatagaggtttggttgctctggacatttctgtcgtacatggacatgagctctgagatcatcttctgtccatcttcaggaactccaacgcccgataggtcgatcggttggactggttgctgaggaactactagtttcattccacccatatgaaacttggatgctccatacgctaaacgattgtctctatatggacaaaccatctggtggttgtcccttgaactcctgtcttgaaatccaagattcattgtgctgtgaggacactgaccattctcacaagtgtaacctgctgatctgtccattaccataacattcatatcattgttctgcttcctctttctcgtgaactataagtttaccgtggtggcgacctcctcctttatgggaaaatgttgcattttagcaaccccaaagcttgctagaggatgcatcatcactatctctggtttccgctcttccacatcgaaaccatgttgttccttctcgaaaccttcaacgtcatactcgctacaatcattaatgagaagcgacccgcttcctaatgatgaagaagaagaaagaggagggcatgactcgggataaagctcccgagccacaacctcttcttggttaataatggcaagccaagtagcactctctttcgccgtcatcttatcctgcaagcattttgattgcctcacaagcttacggatcttcgcaatatccggcgacatatgcttgatcaccgcagttaaaacaccgactttccaagctttcttcaaatcatgaggcttcttataaggaggaggaccttgctcatttggtaaaccaa

SEQ ID NO: 38141 - DNA, 4065 bp, Arabidopsis thaliana landsberg
tttgcagggtaaactaatttaataaaaaagattgtgcccttgatttctattcctttgaagtcatataagtggattgtttagctcttgttgtgttcttaaatcagaagcacataatgtcttcattctcaaacaaagttgtgctactttattttttgtaggtctgtcgcaaatggagctctaaaatggctgagagataacctctagagatccatcttcaactaacaggtcttgcattaaagctttttatccgcagaattcatggtaccaatgtggaaaagttcattgtttcatttgttaatgtgagggtctgttgcgaaaaacaacacattttttttttttggtttctttcagtttcaatttgatgcacagattgtgagaagagggcggttctcctctacctgcccctagttctaaaaatagtagtagagagatacaaccggtttatcgagttggttttggtaaaaaaagaagtgagagaattgaagggtttcttactaaaccgctccatttaatttggttggtcattggtgtttgatggagtcgtcttgaggaaatggttgcatgtgttgatggaacatgtcacgtggatgataaaaaaagaaaagtatccaagagaaggcttatttttttgtgtacttatgacatatgattatcagaaattacgaagcctctcgagttattttttcatatacagtgctgctgcatttttagccataggatttagaaagacaattaagaagatccagcactagcagacgcagtacaatcatgccttttccaacccgtaccatttataacaattttcattcccttttttccctttttgtgtgtttttgcattggatttccttcttaattttatatagataatttacatattcggtaaagcatactaacgcaaagttaaaatcttgtgtgacagatagacaggtacgactgaaaaggaaaaaataaaagtagatctttggagaagagggaatgtgagtgaataccaattttgccctccaaacatggtatatatgataaatataaaggtgaagagaaaaggccgaaaagaaaaaaagctcaaaaccctagccgtaataataaggtccaaaacagacgcaagagaagagtttagcctctctctctctctctctctctctctctattgagaatctctttcgatcaaaaagaaagaagcagagccgaacaaaatcagctcatcatccccaaagcccattaacctcgtctcgtctccttcatctctctttcttttgttttttcaaaagtttcgttattgcgcctcgattcgcgcttccctcagtcgtattcccgctgctacaatctgtgagtcctaatctttttctctctgttaagatctcatatcttagatctcgctctctcttcttactcgattttactctgcttttccagatcgcctgaattctcttctccaattcgtcaactatctcctcctggctcctacggtcacggtattaaacagatctctcttctaaagacagacctttctttcttctaaatcagtttctgttttaccatcttctctccttgttgaattggactggccttacttgtttgtttgttgttctgttatgtttcaatttttgtttctctccagttctgctggtattctagcaaagtatagagaagaaatctgattctattttgcttctccaggacttttctttccagccaaggatatggatactaattccttgatgctcattgataacaatggctcttttgagatcgatgaccaatcccatgtccatgtcgatgcctcccatacccttgaacctgtcaccctacccaccaagcgcaggaggaagaagtctgacgtctggaaccacttcactgttgaaactgttagccctggatctgccaaagcttgctgcaaccactgccgcaaatccttcgcctacattaatggccaaaagttggcaggaactagccatcttaaacgtcacattcaactgggtatttgtcccatgaaccgagacgacagcagcaccctcgcacaaatcgttactcccaccaccaccactgatccttccaagaaacgccataagtcttctgcttcatacacccctctagatcaagaccgttgctacaatcagatggcaaagatgattatcatgcatgattatccccttcacatggttgagcattctggatttactggtttcgtgcaggccctttgtccccagttcactatggcaagcttcaataccattcatgctgattgtgtcaatatgtacttgacccagaagcacatactttcaacctccatcactgacattcctgggcgggataaccttaccgttgatctctggacatataatcaatcacttgggtatgcgtttgggacggtacacttcattgatagggattggaaactaactcacaggcttgtaaatgatgctgacgcaccttctcctgactcagattttgctttgaatcagcctattgcagcttgtttatccgactggaatctgaagagaaggctttccagcatcactgttgggcaatcagtggtaaacaaaacctctattgaaaacctcagatgctgtttgtctgacaggaaccagaatgtattgaatggtcagttgttgttgggtaattgctatgcccgcctcctaagcagtatggcgcaagatctgcttggagctgaggattttaaaacacccataaaaaaagtccgtgatagtgtcaagtatgtgaaaaccaaagatagttgccaagagagatttgatgaactgaagaaacaacttcaaaccccttcgacaaaagatcttctcattgacaaccaaacgaaatgggacactagttacgacatgttattggctgcctgtgaacacaaagaggtcttctcttgtttgggaaactgcgatcttgattataaaatattaacatctcctgaagaatggagaaagattgagatcctttgctcgtccttgaagatcctttttgacgcggccaatgttttgactggctcaactcgattgacagcaaacgatttgttccatgaaatgacaaagcttcagctagatctaggcaactcagccacgagtgaagatcaagatgtaagcaacctagcaaacacactgaaagataagtttgacgagtactggagagaatgtttcctgcttatggctgttgctgtggtgatggatccacgcttcaaaatgaagcttattgagtttagtttctctaaggcttatggggaagatgcagataaatggatcaggagtgttgatgatgctgtacatgagctgtaccatgactatgctgaacagagtcactcctggctggatgctttatgtagtccatgggaacgatggcttttctgaaacagatatgtctcaagttcacttccatcatgaataccacaactcaaatgggctttcacatgatcaaatctttgaacaacctgaagatggaaatccactgaatgaaaaacctttggagggactatctggagaaggtcaggctacggggacagaatcggtgggaggcaataccacacagggagtagaacaagaaggccatttgggagatgctgggacacaggagaacaatattgtggaagggcagttggaagagagcaaaccaatggatgggctgacacaaaagcctcttctgacagaagaaaatctgcaatccaatggagagccaactacggcccaggagagccggctaacagatgagacaatggaggaaacacatgcgaaccagtcagctgaggagatggcccatgagacccagctggttgaggaatttccatgtgagagccagccttctgagaacgtaccccttcagagccagtcaggggaaggaaatgtaccggagacactgccaatggaggaaatcgttgaagacactcaacctgttgaagaagtgatgcaggaagaaacgtcacaggtgagccggccagtggaggaaataccgctggaaaaccagcaagtggatgataaggatataacccatcacgtacagccggtagaggaaatgctcgaggacactcaaccagttgagggagtggatcatgaggctcaagagctgg

SEQ ID NO: 38142 - DNA, 180 bp, Arabidopsis thaliana landsberg
atccggaaactgccattctaacccttcttgggggattccatccacaaacgcaaagtttatggctaaccgatatggcacatcatcatttagctatcgcaattcttttcctcattgcgggtcatatgtatagaacgaactttggaatcggacacagtatacaaagatcttttaggaagcaca

SEQ ID NO: 38143 - DNA, 1810 bp, Arabidopsis thaliana landsberg
taatctttgacctcacatgtaccaacaagcttcatagcttttggctcatagctctcaagaagtttttatcgattagccgtatctatcatttcatctattttatgttggctttgggaaaagcccctccttgctgtattttaattttgggaactcagtttttttctttgtttgtacttggatttttacctgaatggaatgaaatcaagttttggttcaaaaaaaaaaaggagaataaaaagaagagagtacatatgtttttggaggttgcaaaattgtaagaagaagaagaaaaatagtttattgtgttttgtggttgtttgacacaaaaaaaaaacttttggtggttaatgagagaggagagtgaacaattctcattggatgcttttaagagtttgttgatggttaaaatttattatataattaaagaaataaatattaacagggtaaaattggtttttgataatataaaaaaagatagaggaaagtgagaataagtggaggtttttgaaaaaatgttcggaggaaaagaagctaaagagattaaaatcttttattatatttaaataaattgacataaacaaaggtatatggagaagaatgaaactaaaaaccaaataattattatataattgaatatggtggccatgaaacaaaacgttgaaaacacaataaagagatcaagttaaggtgacttttctccgttatcatataattgaatatgttaatgactgaaaaatgatttttttttttaagaagtttaaaagcaaaaagaggaaaaacttattgaaagaaaagaagaaagaagaattagaaaatctagaacaatagaggaagagaggaagaagaagaattagaaagaagatgaaacaataactgcgatttaggttaattgagaatttttttattccgttttctaaaaagtaaagttttatcagatttgtttgagtaaaaaaaaattataaaaaattagcttttctaaataaactaacctaagtagtgaagcttgctttgatctatgcgtctagcctttaccattagactacctaacaaatacaaaattataaagctgaaattgttttttttttttttgcggccgcaagtttaggtttggcacgcttgtgcttgttgtcgactctgcgtacaagaaaaattcatatcataaacttgctgagcacaattattcaaataacatttttacctcaatcctattgatctatcgtggttattctcgattttttgaatattacaatcccacgattttctaatctcaccaaacataacattgtccataattattatgcaatttaaataagtttatagaattgtatcattttataagtttttatgacgctaaattagtttgatcttattagtcttttttctttttttgtaaaaatgttattttattacttatgtttgtagtttctatcaggcccagtttaaggcatgtattcaagattaaaatctccaacttttttcttttctcaaattttctcaaaaaaagtccatattttttaatttctatataaaatttgttttttaaaaatttgaacacaaaatcaattataattttgaaacagcctatacgaattcatatatttctattaaaaaactactttttcgagatatttacatattagttttactaattgatcaccgatcgaaatcagtcgatagcttttttttttatctccattttctatccccaaccgaattagcttaagtgatacacaatgccccgcatattttattttaagcatgaaattttcggtaaacagttccctgtatcgggaggttacttaaaaagtag

SEQ ID NO: 38144 - DNA, 2950 bp, Arabidopsis thaliana landsberg
  unsure (1)..(2950): unsure at all n locations
ctttgttcatttgaattaatgcgggttgagaagattctgaatcttgataaatggatacgattatgtgggatgtgttgttttgcaaaaaaaaatataaatatcacacgaattgttttattagaagtcccacacgatcatcatcaaagtagtttgttacgatcctgagaggctaatgaacaaactttgctacaaaggaggcggttctatcaagtccatcgtgatccttgagccaccccaaccgcctcaaccccagcctcaaccacctcatttgcctactgccccagccccagccccagcccaagcccaagccccagctcttgttcggccggctccggttcctgttcttgtttcgtcttccgctcctcaaccgatgccgatgtggcagccgtatcattgtgggccgtattacgaggcccaacagtaccaatgttatggaaggcccgtttacgagagctggggaggtggacgacaatgttgccacgaagatatgaactctcaaggatgctccatcatgtgaaacactgaaccaagtctcctcctactcatatatagactatagtatataccagcaaataaataactacacgaagttatttttaattgccttcgtcttaccaggatttctatttcgagtcctcgtctatgtatgtgaacactacagggttttgtttcttgtgtatatcacgttttggttctaatacaacttttatttgctcttcttttcttggtagtaaaatacaaatagtaagatttttcgcataaaaatatagtttctgttagaaaataaaagtatattagcacgaaagaatggaaactaaaaactctgagaccggcctctccaatgagtgacatgagtcgatgaatactcaactattatgtttttacagtttacttatccacagatgacactgtttctttctactgtgaaaagagcagccgtggtgcttacacctccacacgacaccgtttaaacggaaactaaaaacgacgtgacgttcttgtctgaaacacttaaacgacgctatagtgtactgtaactccagagaaggccttatctttctccaattctcaaaaccctctttaacactcttcctctaagctttttaaatcaatggcttccacttccacacttcttcttccatctctctcctctaagaatcttcacatcgcagtcccaataagaaccaatagcttcgttcgtcgaacaacaaagttctcaacaaaatgttcgtcgaatccagagtcaaaggatcaattcatcaatctcacaccagcacctgaatcaatcaacacaacaagcgcagagaaattcccaatagagaaacgaagaagatcagagatcatacgagacagaacacaaagaggaatcgagaaaccagagccaccaaacttcgaaatcggttggaaaagaacaaaagagataaacttggagaaacctaaaggttatgtaataatggatttcttagaaaagttcgaagctttaatggcgagagagtttggatcaaaggagcttttagctaaagctggtgagattgttgcagagagagctagagaagaagctgaggttttgagagatgaaggtaaagttgaagagagaatggttacagagctttttagggttttgaaattgatggagatggatttagctatggttaaagcttctgttaaagatgaaactttgagtcagaggattgaacaagctagagnnnnnnnnnnnnnnnnnnnnnntgttgctaattctttctaattccttcttcttctacttgcaaattgagtcaaaagtctatgaattttgtttatagttttacacaaaacagagcttcttcatctgtaaaagatcttatttttttggttctgtaatcatctctggatcattcatctgttactttaatggtagaagaaggattgaagatgagagtctcatgtgaagaatcaaaacaaagattcatgcttttggttttgcaatttgtgaggaagcttaagggtttttgggaggaaaaaacttaattagttgagaaaattttacttccactagtttcatatttcaagatatttcaccaagactcaagctttattgtacaccacacattaaaaatgcaaagtttaatcattttaacaaaagcttcacaagcagcagtagacagcaacaatggtggcagtcagattctacgctgtagagatgtcgctaccatgtttatgtccatgcccatcatcgccgatttctctttcattgtgttctccgagattcaatcttcttaacacaacaagcaggagactaggtttgtctagaaactgtagaactctgcgaatcagttgttcatcttcatctactgtcactgaccaaactcaacaatcgtcttttaatgatgctgagttgaaactcattgacgctttgatcggaattcaaggccgtggcaaatctgcttctcctaaacagctcaatgtgtgtaaaaactttaaactttctttaattttccgtcgtgtttatgatttgagagattctctgttgtaggatgttgaatctgctgtgaaagttcttgaaggtttagaaggcattcaaaatcctgtatgaaatgttttcttgtgaatccttttatcttcaaattaccaaattctgttatgttttgttctttgactcatttggttgtcttttggggaatgttgtttaaatgtttagacagattctgacctaatcgaacgtcgttggcgattgatgttcaccacaagacctgtaactgcatctccaatccaagtcagttcttctcacacattcatcatcatatctccattttttctagatgattgtaatttgtgtgtaagaagaagagcaatggaaggatttgtctctgcagagaacatttacaggagttgatgtgttcactgtgtttcaagatgtatacttgaaggcaacaaacgatcctcgtgtttcaaacatagttaaattctctga

SEQ ID NO: 38145 - DNA, 1387 bp, Arabidopsis thaliana landsberg
cttgtgtaaaatatatgtattaaggacttaattttcattaggaaaatctctagtgtctaaactttacgtatttacctatataaactcctgtgagctctaattgtgaattaatacaatcataatattcagtcatctataggagagaagagtttcgtttcatgattaataagattttaatgaagttcagttaatgagagaggtgtgtcatgcatgaccctcaattgccttcaataatgtattgagtttgatgttcgtgatcaattgctttcccttagagagcaagttgatcgaggagacttgttagacctacaattactaactaatgtataatttgttgatgatcgatgcatatgtatgtgcatttagaagttatagatcattgattagacgacgtaaacaacaatggaaagagaagaaaatggtctaggtgaacaacagttttacttcttgcgtaagtcatatttttggatggtatactaccaatatatatatatgtgtaattatgacctgatctgagtagaatattgactttagttacacgaaacatcaaatccatctataaaccaaagtatcttgatcagtcaatagaggtggtacatgttacaaatcatggtgtttgagggagaggagagttgaggataaaatgtttaaacagagtaagagcagccttaggtttgtaaagaggaacttcatgaccagctcctctcactgtggcaaacctaaaattccctctgtattcctctgtgaaacctcccacctgtccttcactaaaccacggaagccattccgtaacagccgttagattcatcatcttcagtgcgtacattgtaactgtcaccgaaatcaccgcatccgtgtctccactgaacacccaaactcgaagttgatcatgtttcatcagctctttgagaataggtagcatcgatgcagaatagtccgtctggttccaataagaatatccgagggcttcactacatatggtccacgtgtacggcattttcgtgacgtgcattgaacgctgaacctcgtcccagttaaagtaagcttccacgtagcgctctccgcacggatcagactgcatcaccgttgtgcattctttggattgattagtcaacgtggcgtttaggcacttatgagctaatatgttgtatttgttcatgttttctaatatatcttcgaaattcagactcgtatccatgcaaaacgtcgcaacatctggagggttatcatgtccgcagcttttcttgtagcgaaggaaagtttcttcagggacaaaaccacggctcgccaaaaactcatacccacccatatcgtccttgcccagactcgggttaccaatcaaaatgccacgtaggttgatgaaggtttggttcttgttatggacaag

SEQ ID NO: 38146 - DNA, 4235 bp, Arabidopsis thaliana landsberg
agaaacatggtgttgctatttagccgcatatatatgagggcttaatctcgtcgctatttaacaatagaaatagtcgacgtcatttgtttctaccaagggacttaagcttgtcctttgtcaatgcgtagttttgtggcttcggattttaaaaaattgtctctgaatttatatagatctaacaacctttgtaagattaatgctttagatactaatatactatcaatgaaaaagagtatttactttgttttcacatttataggaaaaaattagaaatcttcatttacaaaacgacattcatagtttgaggttattactttttggcgaaaagaaaagaaaagtttgaggttattactaacgatgccaactatcaaaacaaaatttatgttagtaaccaattatgtgggtgtttggttgagtagtaactttcctttttactgttgttcggcagtagctataaactttttgttgtatgattacatgtgttggttgtagatgtagagtttgattggtaaagttaattaaatattgaggattcaaaatttaagtttatcaatttaaaattataacataatattaaatgagataacaaataaataataaatagtaaatttcatatgtataacacattgttcggtcaattttataattttttttacctcaaaaatatgataagatttttttgttgtcttatgtttaaagtacaacgtactcatataatcttatgcttgtgaaagttaaaaataatttctgtcccgcttgatgattatgtcattttattctacaaattttttttggcgaccgatattaattagaactcaaagagtcaatccgagagatattgtttatatatatagtatgatgcaattcggtataattctttcataccaaattatccgtttttacatttacactacaaaaaattaagaataaaaaaaagtttgtgaattccttcttgtcattggggggagtatccttttttctaatttttcgtactctatgatcaaaaccataaataaagataaaactgaacaaacacaaaaacttggatccaaaaatacggttgggacattaccacatttatggcggcattcaattcaattgattgccacgcatttttccaaaagaatataccctatataaaaaaatccattaaatattatctttaacacataaatgaaatctttctcctacatcctacataatctgtgaatcttctttccatgtttacactgttataaagcaacttcaactaatcccgttttaaatataagctatctactctctcttagccataatgggaaacgaagcagcactaagatcatcaatggtaggtcttgcagtggtgatggtagtggtatggttatggacacagtctttaaagaagacggttgttacttacgccgtcggtatttctcttattggcggcatacttttgccggattgggacttctttgatcggagtttctctcggtggggctatcctgtcaccgccgaggaaagatcagccgctctcgcccgcaaatctcatccttcaaggttacttgtttatcttatctcaatatcaaactagttgttttatcatatcattatatattaatctttgaattattagatctaaattttggtttagctttattgccttaaaacctattggataaacataaatcatacatacaatttttttttgtcaaccgatattaatttggattcaaaagagcgaatctcaaaccatacatacaatgttaggttccatttgcaatgtatctattattgtatatctacgaattaggtgtacaagttatgattgaatttgcttattttcgtgaatattttctattgatttaaattgttagatccaaattttggtttggtttactggcctaattaatggataatggatacatctttggaccaagtaatgcaggtttagagtgtaccctatgaggatggttttatacggcacggtctatggatatgcagtgtacaggtggtggatgttcgtatcaaattattaaagccatattgtatttacttggtccatcatttttatggtttagtgttgttgattacgaaaatacttagcttcgttttattttggctttgtagaacatgtaagactaccagattatatattggtgtgtccacataacatggaccagaattgtcaaatggattgtggtatataaaagtgacccaaagcacatctcctagagcctctaaatgagcattctaccaccaaattctgtcccacatcagaaagatctttaggttaaaagtgaatgtctctaggttgtttcgcaagaaggagcaggaggggtaggaggaggaacaccgaagacccaatctagtacgttcaagtattttgatcgaaatacgtctctttcttgtgcgtaacaatgcattataatggctgtcgaaacgctgaacacaaccacatccgctcttcttaaactcttgggcggtcgaatgtatcctgcctctgtcatgcaagtaaagaagctctctatcgccctcgctaagcagtatagtgatatctctatccttctgcttttcttctcaatagctaaagccagacctgttgggaactgcaggagaagcctaacgttaggtattatattaacaatgatatatgatgagaatggctttcgtttgtaccgttgctatggccacaagcggtatgttgcatgtctcaaaagtgcggaatagtagacaagtccaagccctattttacatcattatagagatggtctaagttccaacttcaagtgagaacaaaacaaaaatcgataagagccttccaagaattgattctaaccaggcagaagagcagtaagtagcgagaaacaaacttgatctcgctgtgcccagaagacccttgccaagtatagagtattgcctgtgatgaaacatattatgaggtgatgaataaaatcagaggatatataccattcaatgagcagtttagacataaacctattacttttttagcaggtcttgacgatggactattagcgctggaatcaaatacacagggacatagacaggtaacgccctcttgtaagcttgaaggaaaaatgtaacaccatgcttaacacatgactcatttccatgtattatctgcaagtaacaacataagtattgcgtaaaaccatgcatgcagactcattgacgatacatcaactatcgacaaatgctttgttcgtcttaacaacccaaaaaagatagtatcatagaaaacttaccgtacaggggactttcatggtaggatccagtttgatatcaactccaacagacttgtaatatttctcaatcgctcttaaattagtgaacggttgcgcggttgcgatatcttttacgccttgtaagattgaaagatccttcccaccttgtttgttaaggaaagacttgtacgatgaaggaaggctttcttgtttcaaaatgtaagcagacctgaaaaaaaaaaaaaatcgctaatctaagaatctaataacaaccaagaacctagtaacaactagctgaaccacaaaagttaatatctttatagagagaaagagaaagcatacaaaatctgtgaggaagagagacacatgaggaataaatctccatgtttccaagtaagaggcttgcaaatggtaccaaagcgtttacttttaataccgcaccgcgatgcgagaaccgcagcacgcatcaatatataaacagccaaactcgtatgttgcgtatttggccctgtgagaagcatagatggcccagccaccaatccagcaaacagggccctccattttgcacttctggattcagattaaattacttcacagtgatcaaatctgaagaaattgatacttcactatttttgggtttaaatcacaaaataaaagttacaagattagtggggacaaacatgcctcttgtctcctgctaaagcagcaatagcttcatctacagaaacaaaagtcccagcaaaagttcctaagaacaatccatatcttaacgtctccttaatccccatagcgatagcttcactattcgaaaactctccggttttcctaaaccgactacgattagatttcagatcagatgagctaaaccggaaaatttgaaaaatcgatttcggttacctagattgaggagaagatctacgacggcgagcgaaacgagcgacgattaagaaaacagcccatccaccttttaaaccagtacctataatgaaacctttgacggaagcgacgatgatt

SEQ ID NO: 38147 - DNA, 1395 bp, Arabidopsis thaliana landsberg
atctctctctcatctttatcttcttctttttttgccttgtgggttgaaagtttctatattttctctttctcttctgtttacataatccattttcagctcaagcagctgaagaataacgatcaagaaccaaaaaagaagaaaacgaatctgttcttagctttgatgggttcttgcttcagttctcgagtcaaagcagacatcttccacaatggtaccatctctctccaactatcaattttcttgcaatctggaattatgcatctctctgtttttaattcatggagatttccgattttgattattgtaaatggtcaacatgtgtgtctgtgtaggtaagagcagcgatctttatggtctaagtctctcaagtcggaaatcgtcttcgactgtagcggcggctcagaagacggaaggggagatattgagttcgacccctgtcaaaagcttcacttttaacgaactcaaactcgccacaagaaacttcagaccagatagtgtgatcggagaaggtggctttggttgtgtctttaaaggctggttagatgagtccactctcactccgactaaacctggaaccggtttggtcatcgccgttaaaaagcttaaccaagaaggttttcaaggtcaccgtgaatggctggtactgtgttttcatttccccaaacttaagagtcatgtgttatatatgtgtgaatgcgtgtctgatctgttgtgttgtgttgtgctattcagacagagatcaattacttggggcaactgagtcacccaaatctagttaaactgatcggttattgcttagaagatgaacaccgtcttctagtctacgagtttatgcaaaaaggaagtcttgagaatcatctattcagaagtgagtcccatggatcatctttatctttgattaaatctgttttcttttgtttttggttctgatggaaaatggttttaatataggaggtgcatattttaagccactcccatggtttctacgggtcaatgttgcgcttgatgcagcaaaggggcttgcttttcttcacagcgatcccgtcaaagtgatataccgagacattaaagcctcgaacatcttacttgatgcggtatgtagagaaatatacacattcaaagaattagatgtcttcatagtactttcctgatgactttgattcccttaaacaggactacaacgcaaaactttctgactttggactagctagagacggtccaatgggtgatttgagttatgttagtacaagggtcatgggtacttatgggtacgccgcgcctgagtacatgtcatcaggtaaaaatctatcaccttaaatatgaattatgactaggttgatcaaatgttttagagcataaggataattgcttttaaatcctcgtatcatttcaggt

SEQ ID NO: 38148 - DNA, 1266 bp, Arabidopsis thaliana landsberg
gctgcgaggttctcttaaaagtttattttatttattgtctgcgtgcctcttttaaaataaatttttaaatgtcaatcatgtcaacatttttttctttttggtatgttatgtccacatttttactacatcatgcatcttctattgactttttgcatttgtatcctctacggcgcactttgacgaatagttttttaaagtattacattttatttctctaattatttaatatcccacataatttattattggtaatttccaaattctgaaaatttagtaccaaaatgcacttgttttgagacacggacaaccaacaaaatataaattggaaaaaaataagaagctaatattaggttttaagaacaaaaaaatagtgtaagtaaagcaattttcatgttttatttcagtatattattcataattttctcgagtttccggccttgtccaccgatagcatcattgattcaaggctccaaatgtagcaagatcactgctttttcatggtaagtagggtcttttgatagtgtttgtttcattattggtcagaaaccggcttctccccgatcgaacatcaaacaaaacatgggtccaatacaagaaagaaaagagtgagcattacaaataccaaaataaaaggggtctatagggaagtagcacaaccaaaggacttattacatagtaatgcaaacactaaacttagttttttttaaaaggcgggaaataaggaaacaacaaaaaaactgaaatctgtcaggtttggttttaacattttgacaacaatgttaatcatcaatccttgaagacaagctcgacagcttcaaagaacagaggtgccaaaaaaaaaaatcttattaatacattaaatgagaatcaatacattttttgggtttaatgaacaatgtgatagaagtaagaatcttaaagcttcgaaatcctttttaagaacaataaatgagaaattaatacattttttgggttttcaatacagaatctctagaagtacatgcaattgaataattgaattataacgagccatcttcagattgctggtcgaccctctccgataccaaaacgattttcggatcccagaaaccttgtatacaatgcaaagaggaaactcttagagtatcgtgagacggcacagccattgcatggagtcgtggacaaaattggtgaaacaactgctttctgatacgacatgtggtcagatttttggtgtctaaaagaaatgcttggataaagaggcttttatagatatgggaatcccta

SEQ ID NO: 38149 - DNA, 576 bp, Arabidopsis thaliana landsberg
gtctagctatggtgaaaaggggctctccatgtgggagctgttcttattctaccgcacggttccgaactagcccccccctatcgcatttcacccatgatgaaagaaacaagccgaatctttcttttgagacattctcgacccaataaaaaaaacattcttgggatacgccctgtccctggacagaaccatagcgaaataacctgtgctctggttgctccagaccctgctactaatacagacggtcacttcttaaaatatcctatatatgtaggcggaaacaggggaaggggcctgatgtatccttatggctgcgaacaaaaccaaacacgaactaacgctgcggcggggggaatcataccactgtttctacgaggtgattagcgaggataccaaataaccatagagcatgcatcgaatggacgcgaagttattgatattatccctcgaggcctagaacttcttgtttcagagggcgaatccattaaactcgatcaaccattaacgagtaatcctaatgtgggtggatttggtcagggggatgcggaaatactacttcaagaacccttacatggacaa

SEQ ID NO: 38150 - DNA, 1148 bp, Arabidopsis thaliana landsberg
  unsure (1)..(1148): unsure at all n locations
agcaactccgtgtgtaagatggtatatgtgaaattgacctctgtgaggatgatctgggaatccagctgagattgaaactgattaacaaacagagcaaatgattatgacatgctaacataataaaagaaccacacttttaattgacagattcgggggaaggaagaaacttacaggaaaattcaactagcaacacgaacgggtccaataacgtctggtcaatcctgaatcaacccaaaaagaaaaaaaaaatatgaaacttgaaggtgaaggcattggattttgcttttgagaaagaagaagaagagaactcactttgtgatgccatttctaacgacagctccttcaccttccttctcaagctttgctagaactttcttgattacaattcttggtacactattgttctcatacgtcatgatgatgatgacgatgatgatgatgatgatgatcttgggccatcaagttttggatctgcagacaagggaaggaggaattctcctttttcttcatcctcattgtcttttgcttcgtgtaccctctttcctgcggtaatactctcttatttttcagtataatctcggtttgtctcgattagaagaagttagtgttgatatatgtaaacttggcaggtacaatcaagactagaaagctcatttctagcatggaagcaacatcgagcagaaccatcaaaagtgaacacaggaatcatcaaaggtgctgataccgcatcagcttcaatccattttcctccattgtcgagtaacaatgctagattgaagatgggaaaggtagcaaaccgaggttgtgtccagagaagctatggaagctcaagatctcagtctcagttaatgtctctatcacgactactttcttgcaacgtatcatcatcttcttctcctcccgatagcagctccagtgaatacctcaaagactccggcctctgggaaacaccggttggggacatgagcgtggttttgtcgctgcaaattcagacaaaatgttctgatttgtttgctgagactcctgctgtgtcttgagtctctcttcttctgtagcattaactcgagttcttatgcacttcaaggcttctttttttggtggacaagatcattngaatnntngnntgatatctaataatatttaccgaa

SEQ ID NO: 38151 - DNA, 4473 bp, Arabidopsis thaliana landsberg
gtaccttgacgggaaatcggttccgaggcagactggtctatgcagacggatatgtgaagaaacagacgagaaaatggttggaaactccctttttgtcaagagaaaacctcatatcttccctgaaaaaacagaagcaatttttgatttaatttaaatttgtaaagtgatgattttaccaagatactctaatcgaaatcaaacatttacacactgaacctggatctattcgaacccagacccgacccatatctccaaacgaatttttcttcggtttctttttcttttcaacttcaactcctcaacgacgctccactctccttattcgaaacttcttcttttcgatttctcaacctccttgacgcctctcctcttcgttctcttctcgacaacaaagaacgagaaccctaatctctcatttctgaatcctaatcttctccttctataaccctaacttcccagccattttctccaaccctaaccctaatggcgccgagaacaattcctcctctaaagaagaggaagagaggattagccggaggaacaaagccaatacatgttgtcatgaaggcaacgacggagcctccgacaacgacagaggagccatcagcgacggagcaaaatccggtcgcaattgagggaggaggagttgaagaagaaccaattccgaccataatcccgaccgtagtggaagaaggagagcagtctgacaacaatgaggaagaaaattctgagaaggatgagaacgaatagagtgaagaagaagagagtgaagaagaagagaaagaagaagaagagaaagaagaagaagaaaaagaagaagaggagaaagaagaagaggggaatgttgccggaggagagtcctcagatgatagtagtaaaaccttgggcgaagagacctcctccgataagaatatgaatgatgagactgtagtggaaaatcaagtggaaattccggcgtcaatggtaagtatttctcaagtatttgaatggtatgaaactagtataacaggataatactatgatttctggagaatattgtcattactaggatataactatgtgtatgaattttgggtaacattggtagtactaagatagaactatgtgtatgatttctggataatactgtcattactaggatatacctatgcgtttctgggtaatactgtcaatactaggaaacaactacgtgtatgatttgtgggtaatattgtcattactatgatataactatgtgtatgaatctaggtaacattggtagtaatatgaatgaatatctgttgtaggagatcgacgaggaaaccgaagcaataccaccactgagtatgtatttcccgccctccgaatatgtgaagaaaatcaagctttcaactcggtgctatattcacgaagtgttgactacattcgagaatttgcagcctccgatgagcacgtccgagagggcatggtttgagaaccattcgagtttgcaacacatcttccacatgccaagagacccaaaccaccgacttatggggatgtggatgctccttcttcgcacgacgcgcattgaaaggaagaaagaagcgtggttcatcgtcaatggcgttccaatccgatatggtatattggaacacgcattgatatcgggcttcaattggaagaactatacacttgggtataaaaatacgaaggaatttggatttcaagaagaagcatttcaaaaatactgttgtgaaacgcgaagacatgagagataagctcataggaatggtaccggcgggtgaaagatcaaaaaaaaggttgaggatgatggtcttgtatttcttaagcaacattatcatagcacctatcaagatcaggaataaggcacctcaagtgaatgaattttgcctcaaggctgtgagtgatctcacattttgtaaaaattttcaatgtagaaggtattttttaaattacatgttaggaaccatctcacacacggtgaatcattttaatggttcagtcaccaacaactagaagtacatatggtcggttccgggtttctatcttccgatgaaggttagttaaaacttatattaataggtgattatttgcaatactaataatattgtagaatactatttgttattagatattgttttcttattctgtagcttcttgtattcgaggcaatcccatagttgaggaaagaatttattgacgacattgcaggagcagatcagggatctcctaagatgtgcaaggtgaagtttaagaaaaaccatttgaaaggctttcctcttgatactattaatgcagaattgggtacaactcaggtgagttgtcctagatatactattttatgaaacatttgctattctatttagttataataatccattcacactgtttatctttacaggtcattgattgtctcgtcacacctagaattgaggagcacaaactcatgaaaattatcaccaaagaagaagacgacattgacgtggctgatgtagtggtacacacttggttcaagcgttatacagagggccgtctaatcaggtttgatgagctctaccagcaggatattcaagtcctgaagatcaccgcatgaccagagattgcgggtgtacagcatattcctaagtaggtggacaagaactcccgagtttagtttctgtggtgcagatgattgaaaagttggataagaagatggtagaccagctgaatgaaattatagcaatgatttcagatttggataaaagagttgaatcgttgttagcattcaaggatgagcagaaagcagagaagagaaaggtgcgtttcgtaatactatattggtaattgagtaatactgagtagcactgtgtgatctagagtaaaactgagtaatactgatataatttcgttcggttgcagaattaagaagcgaaggaccaagagaaggatggtgatccgaaagagaagaatggtgatcaagagtaggattgtgtcccgacagagaaggatcacgaaaaagatggtgtcccgaaaaagaaggatggtggtccttcgaaacctgtggaagcaaaattcacaaagaggaccactcggagtaccaagatttgaatttggtttattttgtttggatttgaatttgggaatgttattttaggatttgaatttggtttgttttgtttggatctgactccggatttgttatgttaggattttaatttggtttttttttttttttttgaatttggatatgaatttgaatttgatatgttaggatttaaattggaatttgatatgttaggatgtaacgataatactggaaatacaagggaatacttgataacgatatattgggaatacaagggaatacttgcgacttcttctagttgccagaattctttttatcattgcgacttcatctagttgcttagttattctcttagcgttcttcatctcatcataccatgtgtccctctcacacaatcgatccataactgattggagagaaggaatttcgagagagaaaataaattgagatcgagagagaaagagtgaatttcgagagagagagagagagagagagagagagagagagagagagagagagagagagagagagagagagagagagagagagagagagagagagagagagagagatttggaaacctaatattttgaggcgaatttttttctgatattttttattctttcattttttttgttcttagtgaaattttggagccaataaatttttggttttccggttcaacctataataatgttttaagtgtgatctaatttatcataaaccaaaaagctaagcgccactccgtaacaatttttgcgcccactctacgatagcatttacattttgggtaacgctatctataatttctccgaactcaactataccataaatgtacataacgctatcatgttccgctattaataccctcatttcctgtagtgggccttaatcgtttggacttacgggcttgtatttttgtgtgtttttgtttattgtttgggcagtcaaagcccaaaaataattataatgagttattttaattcgatttaactgaagcccataaataaaatacaaaaaaaaattaaaagaaaagaaattggttatgttttgggtattaaactcaaaaaccgaataaaccgatacccgaaccaaaccgtataaaattttggttattttcggaagaactttaaataacccaaaataaccaaaacccaaaataaccgactcggttaggttcggtttacccgaagtcgcaactctatgttgtacaaatggattatttaacaatcactttaaacgtgtttcaaaactagtgatgttatagatgtgtataatagagatattaagataaaagattaccagatgagaaagaagaagatgaaaagtgatgttgctctagatgtcgtttaaatattagaagatggaaagatagatatgtattttcaaaattttgttgctcaagaaatgatgtatattactatata

SEQ ID NO: 38152 - DNA, 2449 bp, Arabidopsis thaliana landsberg
aaactatttttggtcatttggccaacgcgcaaaatatgatcaccaaggttgtcgtccttagatctacaacgcacaccaaggactttattgttcagctcatttttgaccaagagtgtacttattccgaatgtatttctgatgcatacactaagaagaatcacgaagataaagagattcttcatattgtttttttcttttggaaccaacaatatgatcaaatctctttggtctttgatttctttctccatgatgggtacttatatacatctttgattctgtttatagacattgatatttttttttatattttttgataattaggcattgatattttacaacaacaaaattaaaataggacaaatcggttaccaaacttgttcttatcttattttagttaaaacattttggtagtcttctttttaagtgcgtttcaagttgatctttatatagacaacagaaacttagtaatgatatttatgtacatttctaaattgattttatgtttttaaaatcaaatttgaataattgaatattttcttccttaatatcttcatttcagtacatttgtttattcttttccaatattttatgttttcataagttttcttatattgatcttttatttttcagtagaatatatatatgactttaatcacacagcttttttagtaaaaattattaaggtttattgtaatcgtatataaatactatgttcaattttgatcgaaccaaacacgaattaagactaaaagctttggatttggaaaattgcaaaatatgtttttagatattcacttaaaataaaataaaatatttagtctagtagtcaaaatattaattggttatataaaaggtttcattataatttcaaatctagttttaattagcttaaaaaattcactaattaatcaaagataagttgaaaatacattttgaaaaaaatataatctagtgacataaacatataatagttactaatatcacaaaaagatatatattcttattaataatccatgatttagaacatattttgttttctcataaaatatcttaaaaattaatatttgtaaaaattattaaccttctattttaagttactaacataagttaaaataggtatctatatatgtttcatgttgtttataaataggaggaagatggtgatgtatttttccgtttttatatttactgacctattttatatattatttatatatagccaacattcttatttaataacatattttcgagtctccgatatattacattctgtgttattaatttatcctagatatatagtactatacattgacatcaaaccaagaatactaattataacataaaattaagagcaactggttatgattggtttacatccagatgtacataaattcaggagtcctctggttaaaggacaagtagattcctttttcaccggcgaaccatgtagcatttgcattatttttctgagaggtgttcatacttgacttgtaagctataaacgaacggtgatgcgcccaatggtaaccctggtgtagattgcatataaattgtgtctcatggaagaaagcatctttgaaacgccaagtttgtggtggatcattgtgacgcaagtacatggtcttaaaatcgtcgtcccctgaataacaatggagcttcagggttgcgttttttggtaacctgtttactatcattaatacgtttcttccatgcgtatctccaatgtaaaacactaaaacaatgagaacaattgtgagacgtttcattctgtttttctggggatcttaattagattgtttttattttttttgtttttttatttatttataaagtttgcgattttgatgtatttatatatacaaatttgatcagtatatgttttttgaggttgtgctttaaattctgtcttctctttattttttgaggttatgcgttaaaattaggaatggctcgagtggtcatcatgtagaaatggcttgagtggttaaaattagaagtggctcgagtgttctacttgcaatttttgtggaggaattgttaataaatatttcaaccataaacttaataaaatggttaaaaaaatttcgtctattcctaggtttatagtaacctttcttttcgtactttggcgaaacattccctttgttatatcattatatcttttaattctaacattcttttcttcgtttttagttggatgctttattaatagatgaattttaaaaatatcatagatttaatcactgatgcccaatacaaatttgtcaacatgatatagtttgccaaacctaaagaagaaacatagataaaggttacattagaaggggggcactatagtggcactagttcactaggtcattcctttcacccaagttcgaaacctcaccttttaagcggttacatattcatctctcaagtgggcctcgagattaaaattaaaaaggtgttc

SEQ ID NO: 38153 - DNA, 1679 bp, Arabidopsis thaliana landsberg
ttggagaaagacgtcaaacacattgtcgtggttaagcatgctcacacggacgtacttcttgctacaaccacatgggtctcctcctctggtaaaaaccttcttatgcttcaagagacttacgagatctatttcctgtttataccccaaccacgcaaacgctggaacaacaaccagaaccgctaacaaagttcaacacataattgcgttcgtggtgtttagtacgtaccaggagaagtggagagggttttgccaaagaagttgcagaagtcttgagggtaattagggagagtgaatgcgtcaccggattcgactacctcacgtagcctctcccaccgtgacttcatcttctcgtagccatactcgaagaagctctccgattgtgtcctacatgtttttgtcagttcgtttagaattgtggtggctcgagtttgtgactccttcgacacaccaatggagtttattgttaagtagtgcaccatcttcttagccacctctatgtccttcactaacgcccaccttcacccacaaaacgaaacatatacactttacaattctataacaaaatctaaagagaaaacttacagaagttgaaggataagtaaattttaatttagttatcatttgcttaaaactatagccgtgtcaaaacaaacatgatttagtagttgcaacatatatgaaacgagcatgatttagttgttgcaaaacggcatgatttagttgttgtctacaaaacaaacaaggcagcaacgttgtttaagtgtttagttagcctcacccaatacgggacccagcgtggcctgtgatcttggagaaagtgaagagcatgatgtcatggtcttgacggcgagtgatgggagtgtagtggggccagtaataagcaaagtcatggatcactttggcttcgtcgtcgtctggacggttcaccaccgtctctctgatggttccgtcagggttattaggtgacgtcactagctcgatgtacggaccctttttgtcgaaaccccatgcgtctccttcccacttgtacatacccgaccgaacatatgtcgtctcctccacatatgtctatattcaaaataagaataaaacttttataatctcaagaatgaaattattaagaatgggaggaataaaagtggggacatgagcatgttactgatgtctttggggatgaagctacaacacatgtagtatgtaagaaggaaaagtgttttgtaaaaaattgttaaaatcaaaaagaaaaaaaaatggtggatcgatgtgttgtgttgtgttcgagaaacatgtctgtcactgtgtcttttacatctccaatcttgcttttcagaaacaacgcccactgaatctttgattcacatcaaatcaactttatttttaaaaacgacttacgattatagataaaaatacattaacattctaatgaagcttcttcaaagcatattataccagagaggaagatactttttggtaaaacaaattatataaattctttaatttaagtaacgtatgacatcccatataagtgaaaaatacaataattgcttctttgtcgggtttacatttggttaggcagtttttaaaagatggatccaaagcaacatttgataaccgttaaaattctgtctttcttttatttaagatttagtttatctattcagatcaatttcaagaatcac

SEQ ID NO: 38154 - DNA, 3277 bp, Arabidopsis thaliana landsberg
  unsure (1)..(3277): unsure at all n locations
tgctctcagtagaagatcttgcaaacgaggagggtttgcaacaaaagatgttctcgaccaagaataagacggttgaccagttagagattgaagagcatagtaaaccggagagccacgaacagaaaccatcaagttggttgattgagtctgagggtgattgaatttacaagttcccccaaatttacattgtccagttctcaaaaagtaagagcaatcatcttcgttctgcaaacagaactcatgagagaggcaaaattttacaaagcagtggtgagattagaaagttgaaatgtatacataccggacgtagaggatagcttaagacattaactgatacacttccatcaataccagctttgttcctaggatgatgaaacttgcaagtcactccgaatttgcaggtccctgtcttcagataaaactgcacagacacaacaacaaaaatagaagctttgagacaatgtgataactagaagacattactatgatagtaattcgaaacagagctacctcacattcaggctgaccaattctttcagggtattctcctttaatccttgcagttgctataacctagaaattggatacgagactattcatcagcttgtaatcacacacacacacagaccctcaaagctacaaactttgagtcaacaagatacagaggaaagaacaaacacagaaacagagtcagtaccagtttccggtcgtgaggatgattgaatcggcaagttgaaccaaacctacaaagtccagttcttatgtaataagcacaatcaggctctcctggtcgttcagggtaagaaccagtttccattgtttcatgtgaactcaaattcatttgccacattgcatctgatcataaatcccaacccaaaccaagaagaagaaactgagattaaacccaatccgtttaaaaacaaaaccaataaccaaaatttgccgatcaaaacagagaaaagaaagaagaaattgataggaccttgattcatcaaaggtgaaagagaagacatgggaactccggcattaaaatccatagacgtgaagaggaagaatgtctccgatgatgatgatgatgataataagcatcagacattatactgtcatcactaagaatgagtcaacggtaatcgatcttcttccaacaagaaaatgaagtgtagagaggtagatgacaatggaggaagaagacatctaaagaagaagaagaagaagaagaatcgtgtaaacagagaggtgagaggtagtgaagaaagaaagagagagagaaagacgaaaagcaaaaaagcgttctcgtctcacctccacacaaatcaaacaagaaattttgagaaaaatcaattaatttaaagtttgtgtatgtacgtagacgaatatgcccctactgattttctttttttctattttcgtaaagactagagtgcgacaatttttattttatcttctccaccaaaattggacggtagagaacacgtcagaaatttttattatctttgcccttttctatgtggatatttcattccatttattatgaattttttttgaatatacaacttttatttattttagttgtgggacaaatcaaatctaccaaacaataaagagcttttatgccaattatcatcaannnnnnnnnnnnnnnnnnnnggtccataatattgggtttgatggatccacaaccgaaactaacacacgaccagacatccatacatatgttctagtttcggacacacatttgttactattagataactaattgaaacattcaaaagcacaaatttttcaatccaaaattcaaattgaacatctctagtctaatcttgatttggttggagccttgctttggctctttcgagagcttttagcctattagcttccatacgtactctctgttcctcggaaatgttctgagctttctccattgccttcaatctattagcttccatacgtgctctttgctcttctgtcagttcactgcttttatccatgttttgttcatcgctcggtaactttgaagcattatcaaatatctcattcaacatactgtcttcaaaagcatcagcatttgtatcagcatcaacgctctttgatggtatgttctcttcgtcatgacttggctgatccatatctagattaccagcagaagactattcattacccacaagattgtaatgtaacagatattgaacttaagtgttatgcagccacataagaagcgtttccttttcgtatcaatatcttaaacttaaaagaagattcaagggaaaaaagctgatctgtttgacataccttgatcatcagaaggaacagtattttcttcctgcttttcgtataacttgtttggatcaactccactggcaaccctttctcgcagttcatttatacaattctaaaaggataacacatcagtatatatcaatgtatcaagtataaatgcaaaggcaacatagccattgagtgaatatatagtttcagtttctggcacctaactatgttagggaagtaaagaacgtatgagcaacctaacacagcctcagagtctagtaattcgaactttaaagcaacagatgattgatcaccaaagaacgagacaagcaatgtcattctggcctatataatttgtttcacgatgttagcccgtcagcaggattcagatcaagtataaacgcaaaggcaacatagccatcaagtgaacatatagtttttagttactggaagaacctaagtatgttacacaagtaaagactaacatatgagcacaatgatcatataccaaaacagcctaacaaatactcagatcctctatcttgcaacttgaaagcaacacatgagtgaacatcaaacaaggagacgaacaatgtaattctgattacagcaatctagactaaccactgcttaatacaatcatcggaatattttcaacctttaaatccggattcatagattcacaattgccacaaggaagaacgctttacaaaaacagaaaaagtggatcgagcaatgtagtaccttaacacgcttagtagaagcgacttgttgaactttatgcacaaagtgatcaaaggaaatagtaagggtagcaaaatgagtggtgccaactcacttgtaccaaaccggtattcaaaatttcccccaaaaatcgccttcaccctattaaaaaaatttaattcattattttaatccaaaaatttaattcaccaacttgtaaaccaatgttaaaaaaaccccgccttggttaaaaaccgaaaaattcttggcgggggtggaaaaaaaaaaa

SEQ ID NO: 38155 - DNA, 3740 bp, Arabidopsis thaliana landsberg
  unsure (1)..(3740): unsure at all n locations
cgcacctatgcatccttgagtgactcgtcgtcatctgcataaaccatgttttcgagcgacgcctataacagatatattttatgtaacattacaaactggaattatgtaaattattaagtgcccatgaatatactgaagaaaaggaaaagtatcactatactggaattaggcgtggcagaaactctttcaagttctctggaggtagctgagcatcacagtatgcaaacctgccaaacaacaatataactttatgttatcaaatgaggacaaggatcaatcataagagagaacacaggtataaaaaagtcctctatagagaaaataaagagaatagcattttaccaaaattcacatgcttcgagggacacttcttcgtcagggtctctattaacttgtaacatgtattccatgacattcctgagatgcggctgaaatagaaaataagggaagaagacaaatcagagatgcaaggtagaagaaatgctcaaactacacatatgaagtacctcaaaaaaaaagggaaactttggaatagatttgaaacaatgtgtatactaaaaccacaaagaaaaatacctctatagatgaggggagtacttccgtgagatgcacaaatgctgcgcagaccttttaacaaaagaagaaaagacattattacagaagcataagaacatccgatatgagataggaatctgattgaatcatatgtcatctaaagaaaaaattcttcaacacgaaatcactctctcctgtactgacaaaaataagaaacaattgacagaagcttaaataagaggcataccaattttctgacttctggtacaggatcattggctaggacaaacaacccctgaaggtacttatccaatgaattgtacaaagcctgccaaactcagattgttaccatttacggtccttaataacatataaaacaaaaacgaagctttacaagtagtcttcgcaatacttacagcaggcattataatgatatactggttcacagaacccagggcaagcttcctcagtgaagcatggggtgactgaaaaaactgctcaaaaaaagagaggtaatcaatcttaacgcaaccaatccaacaggacgaaaagaaatcaaactagaacctaaacaagtgctacaaccgagttccaaaatctgtgtaggaataagagatgtttacctgtaatagcctaggcaggaaaatgttgatagggcgttctgctaagccaggcacttctgtatccaagacatgcggaatatcctcacaaatctgattgataagaatacgacatgtagatattagaaaaactttgaaaaaaactccaaatatatcatcaaaaccaacaatcacaactttggattacacaagcttatggttcataaatcaaaggttcaacgaaaagagcaagaaacagaaaagagaacacatagctgctacatacctttgacaatgcatccatagcaccatccatgtgattaaggtcattactgtctaaacaagtaacaagagctggcaaaagctcttgccatccagaaactccctcaatattaacaataacactgatgatagttccaactgtagtccgtatattcctgtccgctgctcccagacaaggcagtaactctgacttgatatatttttggttttcttgagtcatggatggataagcacccctcanattatttttcaaaagcaatccagcagcttgacgaacctcaacagactttccctgatcattgtacaagcacacatcagcaatttaacaaacagacataaatgcataaacctaataaacaacagaatataaaaactcggtgtcttgcctagactgaaatagactatgtagatccactaattgaaataaattgagtctaagataaagacactatcctaaaatacacacacttttgtatttggatgcaagtaaacttcaagtcaattgaatcacaaaggtcatactattgacaaagaagacttattcagaaggagacatagacgaatgttgagtgaattaagatataaatgcataaaacctaatcaaacagcaacagcaacatcaaaactcaaggctagttcttgccaatgcaaatcaatatgagttatcaagtgaagaagacacaatccacaaattctacacaacatttatgttatttggatacaagtcaacttcaagtcaattgaatcgaaaagctcataccacaggaacatcaactctttgacctagacgcatatgatcaaaacgagatataccaatcattcaaggtcagaacaggcaaactcataacgagagaagcaatggcctaaaggctgagaatcttaagcaattcaaaggaaacgtagattcaactaaagctaagcaacaaagagaatccggtaagcaaacgaaaattcaacgatccgaactcattcgacaaatagactgagtcaatacggagaagaaaaaaaatctcaggaagcgaagagagagtagagaaaagttccaaaacctcagcgcgaacgaggatgaagacgagatagttgttgaaatcaggaaactgagagaagtgttgaagctgcttccaaatctgagacttgtcaacgacggaggaaggagaaatctgttgttcgagaagagaacagatctcagcgagaccatcgtctcggggttgccagaccaccgccgtcgccgccatgattgttgtggcaaaaaggtaaatatgactcgtgtgagagggcaaaagaatatgattctttggacaaaaaaaaacgcacagcaaaaaagtttggaaaagacagggacgacgaagaagaagaagagaatggagaggacgctactaagttgggttttgttgggttttttgttctgttcaagttttctcttatgggctttttatgagtttatctattttcttttaaagctgttaattaaaagagagagtttgcaaaatagtaacttcttcttgtttttgtaaatttcatttgtctcctaaatattctttttttttgtcaaccattagcttgaaaaaatagagaaaatattaattaatgttgtccaaagaatataggagaaaaataaaatttagtctataaatgtagttaatatgaaaacctgagttgtcccataaaaaaatatgttttttttgtagagtttatgttttaagaaatagaatttcttggattacgaatctagaattatcaaagcattggcttgtaaacacaatttatatactaaaattcatatgttcatttggatcggtcatttttaaaaaattaataatatatttttgtttataacttttaaaaattaattatattgcataaattagtatttgatttgtttaaagccttgatgtttatcagaaaaagaaattatttagggatattaaccattatttatgggatgagccttctatatacaagaaaggcgtatatggtttattcagaagatgcatagttgaagaaaaagtccaaggagtcctagaacattgacatggctctgcttatgaaggacattttgcaaccttcaaaactgttcagaagatactgcaagttgggctctaatggccaaccatgttcaagaatgttcatgagtttatagccgaaggataagaaatatcaccagaaaaaatgagatgccaaagaatcctatactcgagtttgagatgtttgatgtctgggggattgacttcatggaacctttaacccatcttcttagggaaataagtatatcttggtcgttgtagactatgtctccaagaggat

SEQ ID NO: 38156 - DNA, 1439 bp, Arabidopsis thaliana landsberg
ataacattacataccccaaagatctccatccgaagaagagaacaactgatacatctaaaactatctgaatcaagaagttgatgaactcccagtagccaggtgggtttggtttgatgaagataggacgaagagcgtaaaagaagagttgtaagaaaacccaaattgttttggcaaagatattggttactaaatgagcttcggtgtaagtaggaacatccatgtcaataccatctactccttggaaccgatgatgctcgagatggtatttttggaaagttactgacattggtacaccgattgggagatttgcgaaaataccgagacaacgattgtagacaggagttgaaaaggcaaggttgtgacttagctcatggattgctaagaagagattgtggttgaggaatgatccaaagaagtaagcaatggttagaatcttgagccatccagagttgtgaaggattgcagctgttgagagttgaagaataactactaatgtgatctgtatagacaacaaatacaaaattggttattcatttgggtttagataacatcaaaacaaattttaatattttgaaagattttgggtgaaatgtgacattcatcaacccaaaatctaaccaaattttagctaatagccctaacgatagagaaactcttatgtcaaataagcaaaatcttttgaaacctaatatttgtaactaaaatgtatgataagaaaatataattgaaaacaaaaatacaaaaattctactgaacaattttttttttttttttttaagattcgtaactcgaactgaaataaaatttagttgcttggactcatctccaaaatgtaaaaaaaccaggcccggctcagaggcagtgctggcagtgctaaagcactgggtccaccatttttttctaatttttacaaagtttttagatctaaattttttgatatttttgcaataagggtccaaaattttaaaagtttgtaactaacatcttaaattttctgaaaaaaaaaatttgagcacaaggtccaaaaataatatgagccggccctgattatatgcgacaatttttttaagtctggaatatattatattattaaagtgaaatatgtgacacttacatatcaatactttattaaaaacaaatgacaattacatatcaataattagcttatgtttgcctagtatttgcattcaactacaaaaagatgaatttcatataaatcatctaaagagggagagaacgtggatggcataagatccacgggatcaataggcctaagcatctaaaaattatagagctagccctagctataagatcataatatacacaagtcacaactactctatatataatgtgtattatttatgtatattttgtgtgtgtctttctcctaaggccctgatcctacaatagcttttgaaagctatagaccaacccgaaga

SEQ ID NO: 38157 - DNA, 2103 bp, Arabidopsis thaliana landsberg
aagccaaacaatagcaatcccaacttgtaaagtagtttattttattgcgcttgacaagttgacttcacagaaggcataggatgttttaatcccatcccatcactattcatatttatacctgtaatttctgaaggcccaatgtaagaagttgtacatgtttttagtgcctcttggaatcattattagaacactgaaaaacatatcaggtcaacttcccttagctagtcacagttagtggagtttactttgaagaaagtaatattaaagagtcttaaaacttttcataatatttttgcaactattttgtgaattattttatttatttactaacagagcatagagttgaataatggtctgttccatctctcttgatgtcaaatctaggccagaaaccttatttgcatcagtggagagttgagtaaaagaataaagtattaacacataaaaaatgggttacctcaaataacagtagactttgttagaatttagtaaacaatgataagctacttggttgatactaattactacctcattttatgttgatggtcccttgcacgagaagtggatgagaagttcatctaatgtggaatagcaattcagttgatatgacttagttatggagatttatcgtatcgaatgttttaatagaagtcaaatatttgcgtatgctatcaagaaccaaagatgcatttcaagttagatggaaatagactttctagctagttcaattgtattaaaaaattggatcactacaaacatatttggtaattgtataaaaaaaaaaaagggtgcttatttcaatgtttttgttaaaaagaaataagtatggatagatttgaagatgaatttcaaaacctctgaacatctataattacttcaatatataaaattcaatgtattcacaaaagtttctagactaactcaggtctgaatctagctatttctgcccacctaagatagttcagcaataaaagaacttttgtgtcttttatagaactagcattatgaacaataagagacatatatttttttacagctatcctaacaggttattgatggtctagggaaaaaattaacatgttgacacacgggagtggacgcactcgctcgaacaatgagatgtatgatgggcaacgacaaacgaaaggtacacattctatatagacttctctggactggtgaagataatgttcttcctaacagagggggcaaccttctatacatacctataggcgatccataaagataaggatgagttggattattgaactttatctgatacttttccaagtacaaacgttaaatacgatgacttgacacaaaacatgcatatgcgactgtatattattattcatgtaaataatatccttcaactattgtttatttgagttaatatgataaaaatgttaccaaaaaatatatatatatttaagtttaataaactctatttatttaataaaaacaaaaagttcacgccagatgtgacatatatatctatcttgcaaatcagattctgaggccaacttctacaacacttctctttttccgaatgttccgaatataatgtcccgtcttaatgtattgatcacttctcatgagtcctgaaaacatctatattgtctctctctcccatttgtcggacccaaatatgattgatcgcttgctttgtccaattctttttagaacaaatgttgtagtcatggttaatggtcatggtctattcaaagctctaaaaagtcagattctaatcaagtgatcagataacagataagcgtctcaatcgtttacttgtttagttttcgtcttagcgccattaaagtatcgtttattttaatttattttatttctgattaaatgtttctttattttactattttcacatttgctatttcatgatttaggattggcaaatggcaaccgtgaatctattttggttttgagaatttttagcatttttgagaatttttcagcattcgattttgctgtacttttcattttcaatgcattaggtaataggaattagtctgtctaatgaaaaatcaatttgtgatttaacgaagatgcacataactaaataatgcaggtcgtttttaagaattaagg

SEQ ID NO: 38158 - DNA, 2243 bp, Arabidopsis thaliana landsberg
atattatgtgatacaaaatgaatggtttgatatttacatgcgcaaccacgggcctttgcatcgatgacaggcttaacaaccaatccagttcatactgtccatcatctctctggcaattccactccaacttctgatgtccgtaccctcttatctgcttcttccatcgggctgtgtcagtggaacattagtggtagcgagggaaggtagaggtcacacatcacagaagttgaagaattttatcattgcatttttgaggctctaacatgttataatttcggtttttttttcctttgtctagcccatcattagtttcggaaacgggaaacccaggtgtatgcatatcctcctcgtactgtccccgcagcaatcatatagtagcttcttatagaccaagagttggatcatctgatgatacagtcccgactcagccctcattgactcaaacaggagtcagtaatagtaatagtaatggtgtagatggatttcatgtttgtcacaagagaagaggtgttgattcgtattaccagaaactatcctccacacaagctattgtagatcccatccgtttgccaagaacagcgattatagactttggtggggaaaggaaacaactttttgcatcttgtgacgagtccactcgggagctcatcttgcaagatccttcgacttttactatttctcaacggttgccattgtcaagtcatcttccgcttcaagatgtgaaatactgtcacgtcaatggttcggatctgctcggtctcttaacggatgatagattccagtttcttaggaacgaatctccatgatcgttgttgtagagattaaaaaacagtttgttgaagagcaaacatatatgtaaagtgaccaacttctctatctttgattgctactattagttataaaatctatatagctacaatatccataaattgtttaaagctttgaatctatttgttcagttaagttcttttgtctagcgataagtcaaaaatcatttgccttaaaggaatctgaaaaaaaccttcaaagtatatttcttctttactataagtatcctttatcttccacactgcacacaccatttctgtaacaatggtatcatcaattctctctattcacaccaacaagaatttaaatagctagcgaatccaaaaagaaagaaaacaaatcatcttcttatcctcgagcaattcgtcgctcgaaaactcctttttcccttcaatggttaggcacaattggcccaatttgcccgaatcccggaatgaagaacgcgattgcttgagcgaaaaggtatagataataatgattcttcccaaaaaacgcgtcataacatcccacaaataacagatacattcctacaccgagttccaacacatgaattctgccataacacacaaaaaaggtaatattagaattggtttggtacagtttaccagtaaccgaaatcaaattgaaaaagggaagaagttttttacctatctccaaatctaaaacgaataaccttctttgaagtcttgggggctgatttagccttaacatctgccagcttctctgtaacaatccactcattaactcttcctccttcgagtaaaccgataaaggaagcttttgtccggtgaagagacatcacattctcgaatagaatccaatagaacagcagatgaattgaccttttgaacaaaatcagaaatagaaaaggatttaaactcagttacgtgacatataagcaaccctatgaaagaaacagagataatgacttgagatacaaggaacagaatataccttggagtaccgacggaattgaggatagtgatgatggatgggatataaaccgaaccccaaatcggaactttaacctccgggacgagaattgtgagaggaagaacaacgcagtagaaacaaaatgtgacccaatgtgcaatgattttcctcacaaagaagaagctgtatatcacgtacactttcttccagaatctcactttctgcgccagatcagtaataggatcagattaaagaagttaaccaaaagaagaaaaagtgtaaatttttgttattattattaccttgtttcttacgatctccataaccattttcctaaagagatttgcaggtccacaagaccatctatgttgctgaaaacggaaggctctaaaagtacttggaagctcacttttcacctatgcaaagaaagtaaaaaggactcatatatttatgatgtataccaatttttccccaagtaataa

SEQ ID NO: 38159 - DNA, 5345 bp, Arabidopsis thaliana landsberg
  unsure (1)..(5345): unsure at all n locations
tataacaagcttcaaacatttgcttctacggctaatacaggtttgtgtctagaagctaaatcacttcatgaagaggctttaatatccttcttcctctcgctctcgatcgaaccagatcacgtacccagcattgtttctatagcagatgctatgatcaaatccgggggtgaatcacttccaaccgctaaaagtttcctgatgaatgccttaaaattagacccgagaaatcacgacgcatggatgaagctagggcacgttgcaaagaagcaaggcttgtcacagcaagctgcagagttttaccaagctgcatatgaactagaactatccgctccggtacagagtttcatttgacaaataatatgagtcgaatagtgcacaattctttttcttttaagccattttttctttaatatatgatttcggtactactaaacttgcttaagataataacactcgagtattatatattctacattaccattttttatagcgacaaacagattcagatacgggttaaatttcctccagctcttgaaatatgtgtgtagtttaagcacttaacatttgagttttctaagagattctccttctacgatcgcttccagcccaagttatgaagacaacaacgttaagtagacatttaccaacgaaatttataagttctgtatttcaagagattattaaaccattctactatnnnnnnnnnnnnnnnnnnnttaactcatactgtatttcaacagcgtaattatatatatgactaacgacatttacatatttgctatagaggatatatataattacgctaaacactactagaaagggtaacacacatactccaaaacctaatctaaacgttgcagcttgactggcaagtctatctgcggtcagtggttgtgtgaaacctccacgtaaagacataatccttggaatcgcaagcaagtttcgtaacatcgcaaaaggcatgcatgtactcctccttaccgtctcttccccaatctatcctcacccagcaagaaaacccattgttctcggtcatcactggaattttggattcacaaaaattgatcatcacttccccacagatcctcttccctctcaccattgaatccagccatgagcactcgggctgccccatcatttccttgtaagcggagttcacgagtctgaccctgctgtttgaatcggtgatcactgagggcaagtcatcggattcgacatcctcttcgacctctcttggtgatttcttgctggtttgagacggtggagatgggttggttagtgggtttatgtaggctacgttgatctttgagcaaaccggccttatgggctgcggtgatatgactctgcttgtggttgcggttgtggttgtggtgatgggtccttgtagttgcgtcaagaagtctctctcctgtatcacttccgcggtcttgttcagatcaatgacaccttttcctttgatctctggctccatgcatttggaggaaggagcagagcattggagaagaggcaaagtcaccaaagtagaagagacaccattctcaaaaccgtagccaacttgaggtaggttaggtaacctatgatgagtgaaagcctgaaacgacagtgttttaataggtccaagaacacgttgtgtagaaatagtagtactagaagaaccgcatgacgactttggtctcttcatagcaagagaagagggacccatcccgcctcggcctcgcttgcgggttcttgtaggtcgcgcttgaagctgaggccagaggttacgaaggtaaggagattggctgattttgtgagacatagaggaagaaggatcatcgtcgttcactcgaggcgtcccgggctttggtgcaatgggtctgtatttagacaagatctcagctgttttaagagttgtggtttgagaatggtgtgagtgggggttgagtatctttatcatgacgtcaagaatgataaaaaaactcaaagaagaagaagaagaagatatggatggtgagagatcaaagagagtgatgaggaagggaaggttataagaagtgtgaagggccaataagagagaggcgaatattaaggaagaaggacatttggggggagaaggatgggtacgtgttagtgagggttggggatagggacacgtgtgagaaaatgagttaatgtgccgtttttacaagaagagatgtggttcggttcaccaatcacagaggatgtcaccgcaacgcgtgttgttgctgggcgtcatgcgtgcctacacctatccactctcttctttttcttcagtttttgttttgaaaccacatgcaatgtacttaaaacaaatattcgaggtttgtttgaaatgtagtaaaaagcttcaaattatttattaatgttttagtgttaggcgttattggcgtcaaaactttgcttgttcgagatagttagaagaggtgtgggtaagtgattggtaggttagggagtaacacgaggcagttgcagcgtctgtctgcttcatgcaacggtgggagagcagaagagacacgtggtgtttttttagttgacgtctggggtcttcttttctcgtacgtgtcttgattttgtcatccttttttcttaaaatcctgacttcgccgtttaacatcctctatttggtcgacacacacacagtacagttactattctctctctctcgcctccagatttacgctttcgagggtttgccaactcttttttacttttctctcatnnnnnnnnnnnnnnnnnngaagtattctaatcattataaaaaaaaagtaatgctccacgttaaagattttacattatatagaacacgagattttgttaaaactattttgttccatattcacaaaatttaaagactgtcatacttttttttggtaaaggattttaagacttgtcatatacaagtataaaactaatggatgagaaagagagttatttgggttctacggtcgaaatcgtgcaaaaatgaccatatcgaagttaaacacaatggattgactcataaaaatgaagagaacacaaacggcaaaaacaaaaagaggttcttaatatagtataaatctaggtatgagctatacaaagctcaatatccactattgtattgaaaacaaagaaaagaaacaaaactcatttaaggctcttacaaaattttaggcatacatatggaaggaaacatacttcctcacaacttggccgattcatcctctgacactcttcaacatttctattcttagttccttactaagcagggcctcaagaaacaaaatggagcttctttagcttcttcccttgcttatgtcccgaatatatgtctgtctactggttgattatccaaactcttgacaacatcaatccacggtttctctatcaccaggattgagtttttagaaaggtgacccatgaataaaactgggtggtttgaaggtaagatttcgaagttctttcgctcattactcttaccctctaactgatactcatctaaccgacgttttcggtttgtaccctttccctttttcaagcccaagttgacaagtttaccttctagcgttttagacaaattgcatggtgtatccgagtcttagtcctgttccgccggcttcccagattcaatcaaacacttagctatgctatgcaaccaaagatacgagtattattatcacaagggttttttcatttagtgaaaattttgaaaaccaataaagtacctggagctgtaaatgatgacagatgtatgaacatggtgatggagagaatgagagtcctacgacctcaccaggaaaattttggtagctctttggcagacaaaaagtctgcagcaatgaccacttgctcaactctctagcctccacatccaatgcaaagacctggtttgaagaggtggagatcacaatcacattgttgtccctcggatgaaaaccagtggctgcaacagatgcaccatcaagccttgatatgaaccaatgctgcctgtgaataaaagccaacatcagaattaatatatcaatacaaacttaaaatctgctacagcatgaaaaataatattaatcaagcagagcttcacaaagttcccacctttgtgtttcgaggttgaatacatagatgtccccaaagcaattgatagcagctagccactgaccatctgagctagtaaacaattttgttatcggaggctccttaggtgttggagcttcaccttcatgctcctccctagatggtgtaaatgcatatactagttccaaactacttatgtcaatagtctgcaaagaaaatatgatacagaagttagggtaacttcagaacaatacaaataatttgaacatacgacattagattactagcaaagcacgtacatatatccttctgtcatgtcctgctattattagacgagagcagtccgaactgaaaatcatggaatgtgcaaatggaagttcaggaagtcgccttctactaacactccatggacactttgtaaagtcatttttcttcaactcgaacagactggggccaatttggtcagagtaagcaaaaagtgatccggtgttagaaattgcactgcatatgatctttcgggcatctctacttttaacacgaaccaatgactttgttgaggcacgaccactagaatcactgcttatattaagtcgaagaatatctaaagtactaataccctgaaccagtagaagagaagtcttattgaacatcgaattatgtaccattcgcatgggtactctctgaggcgcaggacatatatcatgtggggagaacttagtaaattcctgaatggaatatgcaaaaagctttgcatcatcaccagcagaaataagcatcggaacacccaaatgagcccatttatgataggtaaagttaactggcttcccctttttgcgatgtttacgacttgctttatctggcagtatatcatccggaaatggatctgcaaaaaaagaagggacttaacagctatatgtgtgttcgtgtgtataagaactaaagaccaaccagcttttagatatatgtttttgtgtgtatattggctaaagtatgcatcaaaaaagaaatttgattgcagagcatatttaacaagggattctcaaactttgaataaccataagtcgcaataagactctgaccttctcgactaattggtacagcaactgtaagagctctgatgtcatgtgtatgagccttgacataaccaatatagtcccatttctgagaggaagaaggcttcaaatcttgagaaccgttagtactaccagagagcttataaaggataacctacagataggatgaccagagaattagaatgttgaaaaccattgcaatgaaacaaacacaacaatcatttc

SEQ ID NO: 38160 - DNA, 1317 bp, Arabidopsis thaliana landsberg
aggccaatgatggacgacatggtcaagaagaaaacctgcacgctgttaccaaccgagtgtttagttttataaacaccacaaatgccagttccgaccacgctctttcagcaggactacactcttctggaggaggactagaggaggatggcatccaaccccacatctcctgtactttgatcgatgcaccgaacactgcatactgtattataagatacttagcagtgaatgttattgcatattcaggtgagacttccatattgcggggctatcctctcttgcaaaataccaacagagtatttgccataaccggttttgattaaaacaatggtattttccaaattttctacgttcgttacaccaatccacttttgccatcaccactccaccggcctccattttttccaatgcatcatttgtcatcgtttatccttttcactagcaagactcggtactctctcttctttttagctttatattagatacctttggaagtaaaccaaacaaaaaaaatccacataaagattgcttttgactatgtaaggaaaaaaaagaagaatatattttagatattttgttgttcatttgtttggatattgttaaactaatcatgaatgcgtataaaactgatcccgacttaaaatgacattattaagttatgttttccacaaaagtctcaccgaaaccaaatgctacagtaatcgaattacggaattagttttaaaattgccgtttaaagtttttttacgagtattaatttataatatttcttaagaatgtgataaattcacccaattttttctaaaatattggcaaaataatcttcaaaataaaaaatagtccataattattagaccttacaacaaatccattagaccattttcaatggttgtctctatttgttaggaaaaaaaattaaaatctctattttagagataaataaagacaaaaatagagtatagaaataataataaagatgggttggagatgttttaagcggcttttttgtagcttgcaggttccaatctaagtgagaacgacttttttttgttgggtaaaaaataattaaaaaaattgttttcacttgattgagacctgtgaagcttaggattttgattggtagcacatttccaaatttgaattgttttgttggagaccaataagaaagaaacgaatctgttgaaagttgaaacatacaaatttaatagatatataattgaaatatttgtttacaacttgtttgacaaatatagattgtttaccatcgttcatttaccaaatggatattttgaggaaaatatctttcttttggaatcatct

SEQ ID NO: 38161 - DNA, 1638 bp, Arabidopsis thaliana landsberg
  unsure (1)..(1638): unsure at all n locations
tacaaattaatcaagatcgatcaagattacaaatggagattatccgggcatgtatatgtttgtaaatatatgggcatattaagtttagttttttttttatatattaattttatttgtcatttttatatataattttcatttgtgtttattttagttttaaaaaggaagatgcctgaatttgtgaaataataaaaagaaaactaaaaaattaggtgctatttcgcacgcatcacttgagctaacacatgcatgtgttccttctatttcttgctatatacgaatctctttaagaaaatttaccagccaaaatctacaattctcttttttgtttgttgcatatataagtcaaggtttgaatttcataaaacggacacaataattaatatagataaatggttctagtttctaaataagaacactttattctatgcaacacataaaaaaactgatattgaacaaaatcatattataatctatgtgttcgacttctacattttttaaaaaagggactattattgtaaaccattccccaaaagtgaactttatatccaattcacatttttcattgaaattctgttaatatttttaaaataaataaccatgaaaactaatcttacaattaagaatactccctatcattctaattaatccgagttttagaaaagaatacaacattttaagatggtcaagtttgtcggcagttttttagaaactggcacatttatcatctagtttgttactctaggattcatcatctatataagacccacgagtgggtagttccaaggcacaacaacatgaacttgttttggaacacaggattttgtgttatagttttagtggttgcgagggttggtcattggtggtaccgatggtcaaaccctaagtctaacggcaagttacctccgggatcaatgggtttcccgatcatcggagagacattagatttctttaagccttatggattctacgagatctccccatatctcaagaaaaagatgttaaggtcagaactctctctctctatttatatatggcattttcttacagagatgaagtcttgtgtttgagtattgtgtgagtcttttaggtatgggccattatttcggacaaacattcttggagtaaaaaccgtggtatcgacggataaggatgttaacatggagattttaagacangagaacaagtctttcattttaagttatccggatggtttaatgaagccattgggaatttttagcttgttcttgaagattggaaacatccacatgcacatcaaacaaataactcttcatcttttgtcctccgagggtttaaaacggaaaatattaaaagatatggaccgtgtgacacgcgagcatcttagttcgaaagctaaaacaggaagattggatgttaaggacgcagtttcaaaagtagtcaatcttttttttttctttgatgaatttcagttacaatgttggagttagcatgttattacgtgctagtctcacactttttagcatgttttaatctttgtagttgataatagcccacttgacacctaagatgatgagtaatctcaaaccacagactcaagcaaagcttatgggaatttttaaggccttcacttttgattggtttctgacatcctatctt

SEQ ID NO: 38162 - DNA, 1045 bp, Arabidopsis thaliana landsberg
aagaggtaacttccactttcaaatcatcagtgatcatgaatgaagtatgatcactcctaacaaatactccaccttcaacaccatttcctacacttgctaggcctcctcttccatcaagctgaatcacttcattcatcaaaaccccacagctacatctcgaggtattaaaattgctatacctttcactacattgctcacgttccacaaacttaggacacacgaaatacttggtagcctcggaatcatctaccctcagcttaaggtttcgacatttctcatgattcaaactgcccggatacaaaagcatttgcttacaagcttcagtcctgaaatgctcaatgcccatactcacaacacttgcatctatattgttgaaacagcctattgctattttctgtgacttcttatacatctccagcaatctaacaatcgttcccattggcaaagtcaaaaaactaaagagtaaatcgacaaaatctttacccgcctcaacgaatacaactttgtttttctcttcatctatgagtagtttcaacttaatcaccggattcttcaaagtagctgacatgtcttgatacaaaatctgcactgatacaatgaaaaaaggtcactttttacacagccatgtttaagaaaatagctacattgattatgtataaataggtaacaattttataaaagctacacagagcagagtctgttcatataacatacatgctaggattcgtaatgaggctagctatgatcatatacatctttagatcaatagtctatcgtggcctcatgacaaatgggttcttagtgcttagaaacagaagatacgctctacgtcatctgttcttggtgaatctgcctattcatgtaatatttcacgcgtctatgatgctagtatattacgtcgtaaggttttcccttgctaatctttttaaagagtaatccaagcggatgtgttcttttcataggacatgagctttactcaagcttaagtggaggaagtggaacagaatagaaaagacatggtcataggccttaattaaggtttcgg

SEQ ID NO: 38163 - DNA, 1076 bp, Arabidopsis thaliana landsberg
tagctatgatctccgaaataatgtctcaatctgtgtgaagttctttagctatgttggatcatctttggtctgttttcatctctcagctcgcagcatctgagcgccaacaccacacacgctttcacatgcactttttgagcacttgtaatgtcttccatcaccttaggatctattactccatcaagctgcccattctcatgaaagcctttcacgtagctagcaatatgtttgtagtccccatcagagctagtggatgcaagtgctggtttaccagtgagaataaccatcaagaagactccaaagctgtacacgtcggtatattccgtcaccattttcgtggtataatatactggatcaaggtacccgattgttccctgaacacattcaacttctattcttgattttccctcagggaggtttatagagatagagaaatcagtccactttgggggccaattcgcgtccaagaaaacattccttggcttaatgtgtctacgtatgaggatcaaaagcaatgccatgtgaagatcagtcacattattttttttttcctttccaatcttaaaccttaaactcaaaggcaatataacttcctccccattgactataacacctcctctgtgattcaaaactccatgttctgcatattcaaacacaagaaccggaagactaaactcaagacagaatcctataagtttaagaaagttgttgtggttgctcatccgagcagacaagacaatttcgttgtaaacctctgctactctgtattgagtaactttatactcagagaatctcttgatcatgtaagatctatcttctatgatacctttgtaccatacataaaacccctctgcggttacaaaacaactggaaccgaagttacttgtagctttcaagatctggtcagaagaaaagttacgtataggaatggatttaccgttacaatcagcaataagttctttcaagaagatgcttccgttgtctaagaaccacttttcttcctgaatgtctttttccttttccttccttttctctaacgatccagatctcagactctgcttcaacttcttcaccat

SEQ ID NO: 38164 - DNA, 1189 bp, Arabidopsis thaliana landsberg
tgcctatcgtcctaggttttggtataagagattgatattcgcatgcatggttaggttgacttatacctgaaaccaacgacttggtttcgatttttgttttgttacatgtatgattgcctattgtcttaggctttgtttttagttatggatctgctataataattggtttctactcatcattcgagatatacaattgaaaattgaatggttcttatggtttatagattcgtattgtcctgataaacattgttgtgtgatcttttgaatacctggtatttttatttttcatctgatctttttcctttggatttgttttgtctaatacagaaaagcgtgaatgagattatgatggagtcgaaaggtggtaaaaagaagtccagcagtagtagttccttattttacgaagctcccctcggttacagcattgaagacgttcgtccaaacggtggaatcaagaaattcaaatcttctgtctactcaaacgtgagtttcctctataatgctatatctgatttcttcaatctctatggtatccattatgtagtctcttcttaactatgttttgctttttgtgcagtgctccaagaggccatcctgagtaccagcgtgcaccgatcttcataatatagttatagctacctttactttccagatcataattcccttctttcaaagctgcttttctgctggttcccggatccaatcgttctctcctcctactacaagtcctgtcggtcacacaacacggcgagatggccttatctgcaatcggtttcgaaggttactagaaacggctcgaggtgactttctttgagccaagcatttcccatgactccaagggactgggactccgtgctctgaccaagtcccagcttgatgaaattcttacacctgctgcatgcacgatcgtttcatctctctccaacgatcaattggactcttacgtactctctgagtccagcttctttgtctacccctacaaagtcatcatcaagacttgcggtaccactaagcttctcctctgtatcccaccacttctaaagctggctggtgagctctctctgagtggcacgtctgcgaagtacacttggggcttcttcctctgtcccggaggccacccttttgctaaccgaagtttttgtggagaagcctctgttcttgatgggccccttactcagctgggcttgaa

SEQ ID NO: 38165 - DNA, 3848 bp, Arabidopsis thaliana landsberg
catatgaagcgcactcaacgactctgtatatatactctcacatagcagagctaaatccgttcaagaaaccaaagcaaaagaaagaaagaaaaaagagagaataaagggaaaaacatattattctctctttaaattctcagcttcttttcatgaatctaaactaagaacccaattggtctcgagatctgaagaatcagcaactcaaaatcctctgttttcttttttttttgaggttttttttctttcttcttcggtattctccacgccaatggattcgtttagtactcagaaggctaaaccaagaaagatgaaggttgttgtgaagaagtctcgggctcaagtactcttagatttgttttaccgggtgatcgagataactctagttataattactctagccaagctctgttaccaactagtcatcacggtagagagctctggtctcgcaagttttctcatcaaccgtcaccttgctttcgtcttggggaatacgatagtcatcaccatagtcgtcaagtgtgggttctttgcgaatcaagaaactgatgcacggagaaacagaaacgatttttacgacgagtttgttcgggagagctcaagaggagaacggaggttacacaccgatgtgatatgcagagaaaaacagagtgaagtcgagagcgttgcaaaacaaagcattgaagaaaacagagcaaaacagagcattgaagataagagacaaagcagagcataaccgagcatgtcagagaacagggcaaaacagagcactgaagaaaagagagagaaacttaaaaagtctgagatcagtggcagacagagcagtggcgatgagagtgagaagaaggacataactgtgaagaaacaaagacaaatcgttgctcaaaatcaagatagcccaatgaagagttacgaaaggagccggtcagagaatcacgagggctcgaagaagagttcttgtgtacaactgaagagatcagagacagagagacctgctgatagaattgtttctgatgatgagctacgatacaaaatcgagtctttcattgctagacagaggaggaaccaaaaggatgaagagttctgtattatctaaaatgtataaatactaaaaagcaaagaagaaaaaaagaaaaactttagtttatgcaataccattcacatatatttgtgagtgtttgtatatatatgggtaaaaatatttcaatgcccgagcataaattgttgttttagcttttctttttttggtttctttgtataattttgttaatcttatatattatgaagtataagttttctgtaaatttgtttatcttataaatgtaatgaagaagaagaaatctacaatgagtatataagaagagtctttgtgaagcaagttatatcctcatgagttccaaatcagaggcctcaaagttgtccatcttctttttctcagggttgattttcaaaatctgtttttaccgttaatacattagagacacacaagttatattgtttcctgatttgagagagagcaaaatatatttagtacttaccggcaaggttttaggggagatttgaagctgtttttgtatagccttgacgtgagctttgttaatataggcttgtccaatcacatggatgaaatcaccagctccaagatctgtcaagacaagaaaccatacaaaggtttcaactcttttactttagactcaagagctaataaaatgtgtacataccgcaaacatgagcgatgatgcatgtcaaaagagagtatgtagcgatactgaaaggaatcccgatactcgcttcggttgagctttggtatatttgacaagaaacttcaccatttgccacatagaactggcaacaacaaccaaaaaccaaatcattttcagttttgtatatcttgaaacgttgaaatgattttacaatggaaatgtaacaagtttcaagatgaaaaacgtgctaacctgtgtgaacgtatgacaaggagataccgacaacttgaaatctaatggattacaagcggcaagcatgatcctttgatcatgaggattgttctttattttgtttataacatcagagagctgactgaattcttgactggtaaaatgtaaaaccaatcagtcaaaagaggcacagcatatgagacaaacatccaaagaagagacatcacaaacctagcatcacaatgtttccagtgaagtccatgcaagaatgggttgtctccatcttcttcggtggcattcactccgaaactggaacataggcatggatgtgagttttgtatcagtaaaagtgcattttaaattctaaagtttgtgcttgcctgtcaagatattcttttgcctcatcggtgtcccatatatgactaccgttttcctgaaagaacatatgagatataatctatatatacatttttgcagccattttgtgaaataaatcatcaagttgggacttatttacagtagctgccactgacatttaataattatttttgataattagaaagtaaatcttcgaattaaatatttgacatttaactatcttcccgaaatctctccacattaactacacaattagttactaaaataaaacttccaaaatatttaatatcatttaaacactacaaaattatcatttttgatattgcttttttcatgactataacaattcgattataagcatcaaactgcagaaatatttgatagcagttaattactacaaaattacaaaatatttatacaatgatttataaacatatcataaataaaatcaacattaataaaataaataggtttttacgagacgagtttgacaggacattacttaataacaattgtaaactttaaaataaaaatattttatatatagatacaatttgcaaacttttatatatattaaaaaattaattgtccccgcggtgtaccgcggattaaaatctagtgtgacataaaataaaactgaagcaaacctaaagagtaacttccttttgtagaaatataattatttcaacaaaagattgtatagtaagatattttaaaacggaaatttgcagaagcccatttactagtgttagtttcaaagaaggcccattaaaaaaggcccaaatattgccggcttcgaaactcgacttttttatagcacacaaggtttcaactgaaaacattcctcttcgccttcctaaggaaaaaacactagtcgctcgctgctcttcaattttcttctcgaatctaatcgattgatttctccttcgattcttcaggtaacttttgattatcctcctctaatcaattgtgtatatcccaagctttctctataaattagggtttctgaatcaacgatttttcttttatccgtaggagaatcactgaagcttttgcctcccaagtagaaagagatatggtaagcgtttctttaactctattttcttcattgtttcagttattggcgattgtattctctgtttattgtaatcgtattgtgttaattttgatttgactcatcttctctaaagttcaatttcaaaattagggattccgagatcatagatattgctttgtttccgagatttgagttattcttaagcttgttttactaactttcaatatgttggatttgttataggcaactcttgaagattctttccttgctgatttggacgagttatctgacaatgaagcagaattggtgagtgttaaaacacttttgattactatttttctgtttacttggaggagctatgattgtaattgtagtttgtttgattatacatatgcaggacgagaatgatggtgatgttggacaggaagaagaagatgctgatatggatatggctgatttaaagacacttacctatgatgatc

SEQ ID NO: 38166 - DNA, 1574 bp, Arabidopsis thaliana landsberg
cctcaaaacttttctccaaaccgggttagcggggatttatatggctttaatcatagatataatgcataatggggactattggtgtgcattttatgaaaaaataggacattattgttctgtttctgacgaaacctcccatatgcaaaccaaattataaggtgaatcaatgataggtttcattggcaaattggtttcaattaaatagatatctcttgaagaagagacaaaatatctatgtacagctttcgcaacaaagctcgggacttgtcatgattctggtacatctttacgaccagtaggacatgtgaaatgattcttaagccaagcgccgatacagagcgcatgatagatatgtctgcaaacaggaaatactctgcattcttcattaacgacataaccactgagacaaatcgcgcattctcttgattctagtgacttttcttcatcctcctcatgggtgccttgtccaacaagcaacttcggtagtagggtttcgatcgcgctttgtttcagcccgcgctttttttttctctcgaaatctggtaaccgaacaccagtcgggatgaacgcgtggtagggaacgactctagcacgttgatggcctctttgcactccgatttctagatctaggtcgagatatggtcataagaatgggcggagaatgcaatcgatgatggcgtagattacaagaatgatagctgaggttgggatgggggcaacgagcaagatgcagagaccgatgaaaacagcgagaccaagaacgctgatgagactaatcacatcttcttctgagctcatgttgattcttacaagaaacaagttccaagggttttgtccaaaatggtgattttcaggtgacaacctaaagatttaaacagctatatatttttagtcatgatagcttgttgtttaggataaggcagtgaggaaattgtgtgtattctaagtttagggtttggtttcaaattcatatctaaagttttctgatttttttctctcaaaattatcctaaatcgttagaaagagttccattccatttgatctgttatttgcacacaaaaatcctacatgttttaaaaaaaaaaaattaaattatgttgtggatttggtcaaaatttctttggtgatttgaaattttttcattttatatttaaaaggtaattttttcttaatggtgatacatatgaccaaaataataaaaggatacatatatgttttttttttttttaacactgatacatatatgttgttattcttttcctttgtgtctgaaaatattttcactttatttttgacaaaatattatttacgcaaaaagtgttattaatccaattagattccataattaagttattcagcaaattgacctttgaaaggaattaaattggtcataaagtctaattaaactggtccaaaccggatatagtctcgctggttctgccaccgcttttcaacagaacaagttgtctctttttctgactgactctctcactcactgaccggagcaaagggatgtcggcgtgttcttcatcttcttcttctaagaaaacatagatggagatcgggatcttggc

SEQ ID NO: 38167 - DNA, 2315 bp, Arabidopsis thaliana landsberg
cgtgagtgttatgtgtttctgtttgattcattttagtcaattttggtttgagtatgtacagtttttgattggtgtttttctgttttagctctaccagaaagaagtaaatcgtgatcttcaggcattgtttggagaagtttccaagactcataacgctatacagtgagatatctcttaagctgtaatgaactattttaaaacttctcgggtttgaaaacgttcttgtttaacttcaggacattggataagactatttcaagcttagagatggagttagctgcagcaagatcggctcaggagtctttagtaaacggtgctcctatatcgaatgatatggagaagaagcaattaccggggaaaagacggtatttgatggttgtagggattaatactgcttttagtagccgaaagagaagagattctgttcgaacaacttgtatgccttcaggttctaatatcaccttctaggttctttatcttcaagattgctgatatcgatatgttacttgatggatgtttctaatgaaaatattgcttgtaggtgagaaaagaaagaagttggaagaagagaagggaattattatacggtttgtgattggtcataggtgagagtttgaatcttttagtataatgtcagatatcgaatcaaccactatgttcttacatagtttctgagatgattcatactcagtgttaattttatttggcattggttctttagtgccacggctggcggaattctagaccgatccattgaagcagaggacaagaagcatggagatttcttgagattggtattttttttctcaagtttaactctcgcgcttttggtgtccaaatccttgaatattggtttctcattctctgctactttcaccaggaccatgttgaaggataccttgagttatcaggcaaaacgaaaacatatttttctacagctgtttcgaagtgggatgcagagttctatgtcaaagtagatgatgatgttcatgtaaatatcggtaagctgaacaatcttcctacattcaatttctatttcccagcttgtatgttgctcacatcaataacgtggtcaattgttttgttgaaaatatctgccgcaactcttggggaaactcttgttagacacaggaagaaacatcgagtctatctcggctgcatgaaatctggtccagtactatctcaaaagtataatcccatttctctcacttaccttctttttgaatctctttctcagttttgttttaactcacattttgtctatggagcagaggagttagataccatgagcctgagtattggaaatttggtgagaatggaaacaagtacttccgtcacgctactggacagttatacgccatttctagagacttggcttcttacatttcccttaatcagtaagatttgaactcctttgtaccgcatcatttatgcctcattctccatctaacttctcttacaaaatgttccaggcatgttctgcacaaatatgcaaatgaggatgttacattaggtgcttggtttatcgggcttgatgtgacacatatcgatgatagaagactatgttgtggcactcctcctggtaccttccttcaaatatctatagactcagttcaatacatcttagatgattgtgaagtggtaaaaggttaaacttagttagttctatgcacctaactagaatgtttttttttaaaacaaaccttaaccagaatctggatgtaaatggtaatcatatgatatacactaaatatgattcttggtgaattgcacattgtgattttatttcacaagcaggcaacatatgtgtggggtcggtcgactggacgtgtagcggtatctgcacatcagctgatcggataaaagaggttcacaagcgatgtggtgaaccggaaaacgctatttggaaagccagattttgaggcccttccactacatatacatagatcatataaagaagtagttgttttcaaaccaaacgatcggtcatcaaatgaatgatcacccggaaaacaactcttctccttcttcttcatattctttatgaaccaagaagatagctacatttgttgtatatcatagtaacttgcatagtatagaggactatatagagataagtacgaaatgaaactcttgcagagatagatagcgtttgcgtttgagaagcgtttccgattagtagaaggaaattacaaaccaaatgctgcagcaaacgcaatggcttctttctgattttggctgcttttgctttttgggggagtgaagtacctggtgggtttaattacatcaatgcaaagtacgaatggttttaatat

SEQ ID NO: 38168 - DNA, 4720 bp, Arabidopsis thaliana landsberg
aactaatgattatagtgcctccagacactttttcatattctttcgcaagcaaagtctgcattggcaagcggttttaccaaaagaaaaaaaaaatgagatgattacaggaggtcttatatccaactgttccaaacatgacaagatatctaaggcatatcaactaattactcaagtaaaaatacgacaatcagcaaacacaacgcacctcagcaaactttgagcaattacggagaacttgatcctggtaggccttgtactcaggagttcttgcctataatagaacaaatcgacaagtcaaaagatcatgaacaagagttacaagaccaagagaatcctagagtagaccttaatcagaaagtgaaaggagatcatgcgaacacattagacaatggaacacagtttcaaaaaaagtttgatgactgaacctgcttcagagcaactgctagacccgttatagtgtgattatgtggaccaccttgcagtccaggaaaaacagcttgattaattctgtcctcatagtcatacatgacctatcaggtaaagttacaaacgacataaaattagtcagtaactggaagttatttactcattcatatacaatatagaaacgaaaaattcacctctttcccttgtttgttaatctcttttaaccccttcctaaagaatatcatagcccctctaggaccgcgaagcgatttgtgagttgtagtcgtaacaacatctgcatactcaaaaggagaaggaataacgccagcagcaaccaacccactaatatgagccatatcagccaacataactgccttttgcttgttacagacctgcaattttttatgcataaccttgaaaactgcaacttttgtaactaaacttcacactcaagagttgagacaatactttaccttacgaatacgtgcatagtcatatagacgagcataagctcttgcacccgcaacaataagtttcggtctgaaaagcacggcactcttttctagctgcaaattattgtatcacaaataaataaactttggtttaaaaactgttcaattacttaacataagaaccgtaaacgaaaagcttgtatgtattaaacccatatctcaatggtatattggataaagatagaatgttgaagcattaagctaagctggctatgaactaaccaacctggtcataatcaatgtaaccagtgttctcatccaatctgtatggcattgtctcaaaaaagatggatacagccgatattttcttcgtgtcagtctgcacaagagcaaataaaagaaatgaggaaaagatacaatatcaattccacaaagagatgagaaaagaaagtcaaataaataactgaccaagctagagagactagaacccaagtacctgataaccatgagagagatgtacaccatgaggtaaatcaagtgccatgattctttcatgaggcttcaacaatgcagtgtaaacttggaaattagctggtgatcctgataaagactgcacattgactacaaaatgaacaagtgtctccattagtaaatttggtttctagaaggatttctttaatcacaattcacaacgaaagtatgtaattagcacacctacccatttagaaggatctaactgaaaagcttctaatgcgcgtttttgacataatgtctcagccatgtcaatgtacctagtcaataagatgcaaacaaccttaagcatcatatactaacaacaaagtaaaccattgtaagtataacaaatacatactcatttcctccatagtatctagctccagggtatccttcactatacttattagtcataacagaaccaacggcttgcatcacagatagagaagtgaaattctctgacggtataagttcaaatccctgaaaaaactcgtaacatcatcccccaaatcaataaatcaaagcttctatatatgtgaatttgatcattctcactaaattttgttgataccttccattgtctagccttctctaattcgataatatccgcaacttcaggatcgatttcatctagagatgcattcaattgcttaatccactgataaagaaacagaaaagtttaaatcgaaataagccattcgttagattatatattatgacgcatctgatctaattgatgagcttacactagaacgagatttctccgattccgccatagctgcggttgataaagacgactgtgtataagagtcaaaaacggatcagaatcaaacgaaggataaaacgtgaatgaatctgactgtgataggattttaccatgaaacggagtgaaccgccattagaggagagaagcgagatcggtttcttaacggaagaggagagtctacgaagagccaacgccattttttttttttctctatctatcgtcttctctgtttctctgagtgagtgcgattatataaaagcggttctgcttctcagcttctgtataagtgagcattggagttggtgagaggtgaccgagattcctttgttttataagctttttttaatttctactctcggtgccttacttaattattattttgtttctatgtatttgtcatttgatattgttttcttcaatgcaatcatattttttttatttgtaatgtcttacaacaacaataaattatgttacttaggagtgtcaaaataggtaacccaactcaactcaactcaactcaactcaactcaactcataatcaaatgagtttaaagttaaatgggttataggttgaccaaactcattttgttaaatgggttgggtcaaaccataactcatttaatttgatgagttgagttgttaaatgggttaactcatttatgtaataatttaattaattattattataaaacaataataaataattattattattaattcattatcatcaaatttaggatatttacggattccactttttacggatttacgtttttggcgggaaaatctcggatttacgttttttggcgggaaaatctcgggtttacgtttttggcgggaaaatcacgggtttgcgtttttggcgggaaaattacgggtttacgtttttggcgggaaaatcacggggttacgtttttggcgggaaaattacgggtttacgtttttggcgggaaaatcacgggtttacgtttttggcgggaaaatcacgggtttatgtttttggcgggaaaatctcgggtttacatttttggcgagaaaatcacgggtttacgtttttggcgggaaaatcacgggtttacgtttttgacgggaaaatcacggatttatgttttttggcgggaaaattacgggtttatttttttggcaggaaaatcacgggtttatgtttttggcgggaaaatcacgggtttacgtttttggcgggaaaattaagggtttacgtttttgacgagaaaattacgggtttatattttcggcgggaaaattacgggtttacgtttttggcggaaaaattacgggtttacgtttttggcgggaaaatcacgagtttacttttttgacgagaaaatcacgagtttactttttggcggaaaaatcacgggtttacgtttttggcgggaaaattaagggtttacgtttttgggcgggaaaaattacgggtttatgttttcggcgggaaaatttcgggtttacgtttttggcgggaaaatttcgggtttacgtttttggcgggaaaatcatgagtttactttttctcaatttcatcgcttgtatatttaagaaatttggcaaaaatattgattttataaattggtttagatatgttggttaaacttaaactgatattggtttagagatttttgttggtttaattcaattttacaaaatttgatgggttaattgggtaaaccattgaaaccattatccattccaacccaactcattttactcaccaaaccaatcaacccaataactcatttgacccatcaattcatttgagtcaaaaatttcaactcattagggttcatggattcagttgagttgggttgacccataaattttgacccattttgacacccctatatataaacaattgtttttttttctttgtatataaacaattgtatctcaaagctacagaatcttccaattcgcaatcctttttctatagcaccatttttcattattttatgtatgactagagagtagagactgattcgtggtatactgcacattgatattttattagaaaattgaagattttatttaattaatattatttatataaaaattatattaaaaggtataccacaaacttatatatttatcaaaattaaatttttgtttttaaaataatttagatatatgctattgttttttatttatgatacaccttaagacgatttttataactaaaaaaattaaaattttaatttatatttgttttattaatattgttaattttgttatttttaaaaattgtataattgtattttgattgttaatcctatgatttcactcatagtataccatctaatattaatatcaacctaaatccgtcacaccatataaccccgtcccatgaaattaaacatcattttgtcattttcttataaagttcaaatataatattagaaacttcaaaaaagttttaatatcgatccaaattttataattgtattttaattgctatatctaagatttcaacgtattatacggtcttgtattaatatatttaaaaatatttataataattaaacttcttataaacagtactataccc

SEQ ID NO: 38169 - DNA, 4413 bp, Arabidopsis thaliana landsberg
agcccagagctggagctagatctctcaagtttaggagctgtgaatactgtgtttgcagctttgtttaggtttgtttcttttgatttagacttctgttcgtttcctaagcccccttttatgcaagctgagtatatgttctgaaacttccgatgaattagcaaacttggtgtgccgataaaaacatctgtatctgcaactatattggaggaggctcttaatggcagagtttcagttgatcctcttgtacttggacaagctgtgtctaaaaaggtgtgttgtttttagcggatgcctagtaatgatctcatctgtgtatgtaatgagtgtctgtctccatataagtctcatatgtgccatggttcttacaggttgaaaagcaatgtgcacacttttatgctgtcacaatatcagaagaggaagtaagtgctgggttggtctgcagagtagaatcatctagcaaaagcaaattcaaggttggttcgggcagagtttttcctgtcaaactggtatggaagtaccaaagtataatgaactaacgtgtgcgtctgcttgtgcagctactgtattttgatcaagaggccaacagcggattaagcctagccctgcaggtattgttgttatcaattgaagtgaaaacagtgtttttcagagggttttcatatatcatataaatataagtaactcaaatggttgttttcttcttgtacattgaattctacgtggatacaggaggacagcaaaagaacgggtaagataacatctgccggaatgtactttctcggtttccctgtctaccggttggatcacacaattaattcagtaggttcacttcactatgttctaaatttacttcacctcattctggtggatgagtttctttttccccaacaagacttcattttttttgctctagatggctcaagcaaaagatccagaaactgccttctttaaaaagcttgatggttttcagcaatgtgaggtaaccgagctaaaggccggcacgcatgtctttgctgtctatggtcagttttcctggtttataatctgattacaaattcatttatcttctcccttttatatctgtctggattcagtattcgattcaacttggtgatcatctgatgacattttcctttgttcaggtgataacttttttaaaaatgtgagctacacaatccaagtcctgtgtgctgccgcttttacgcaagaaaaagaagacctcaggtctgtagaagctcagatactcactaaaagagcagagctggcaaagtttgagacagagtacagggaagtacttgtgcagttcaccgatatgaccagtcgatacgctcaagaaatgcaatcggttagtcttattcatgaaagtttataaatttcaaaccaccattcacagaaaacgaagagaagatgtgtcatgactgagtaaattagaccagattctatgtgtaagtttctgaaatggttagcttagtctgattatcttatggtctttttgcagatcgatgagctcttaaagcagagaaatgaaattcactcagcatacacgacgattccattgatgaagcggagctcgagcaagaacaggatgagaaagagctcattcaagaaggcggcggctaaggcgcctgctccaactgaacaggaagaagaggaagaggaagaggaagaagaagaggaagaaagcagcagacagaagaacaagaaaccaagtacttgtgataagtccgagacactaaagaagaagagcaaatggttcaatttacatttgaaattggacaagaaaaaaccttgttagtttcttcatcacttttatcaaagaaaaagattcttatccattatttttctcccttaccttagggatcggtgtatctgtaaatcttttgctatttttctccttcaacttatcattagtattagtcaacaattttattttgataattgttatctgtcaaagttctcttaaacatattgtgccctattgaacccgagatcacatatgacaaatggatcgcaagtatggaaattttgtgatatccaattttgtaacagattattcaatttgacacatgcaaaaatttagataacacatattgatggcacaaaaaatttcacgagagattttttttttccaccgaagtcatgaatcatgattgctacattttcaatttcaatatattagcaactcaatatcacaagaccaaattcactagtcactaccaaataaattttgaatgtgtgttaaaaggggtaatcctaatttatcccttgtagtcattgtattgatcacaccgccttcttacttctccaagcttccccgtcttcacattcttctcactaactttctccatagccttcgcaaacgcgtcaaagaacgccgtttcgtcctccgcgtaaagatccaccagcgagcgcgtcctgttgtcaaacgcaatcgcgtgatcggactggagcaacccgtaaccgtgcttcaaattcttgtaatacatattatcaaatttccctggagtaaaaacgtcattaaacgcagacatctgttcatcattggtgtaattcgcacacaacttcctcagctccgccgcgtatttcggattcatctccaccggaccattttgatcagacttgttaaagatccgactcgcgaactctttgcaatgagagaaaccaatggtgtgagcaccaacaagagcaaccatttcttgaacggagaagcctctggagctgaattgatcgatgagcttcgatatctgcatcgacggaagcgggaggagatcggagacgagagacgatttcgaagttcgtgaatcgcggcggccgagggagatttcgtagtaaggaccaccgacggtgacgaggagatcacgtacagcgacggcgatgatatcggagcaagagactgtgttgggacaagcgagttctagagctgttttagctcggattactacgtcgaatccgtcgccggggagagagagattgattgatgaatcgcgttcggcggtgttgaaagcggtggaagaaacgaggacggaggcgtcgcagccgttggggaaacagtcgtggaagaagaggcggagagctgcggcggcggttgttggagttgagatctgtttgttggtgatggtttcgcggataatgtcgaggaatttagggcatgatttggagtagaaatcgacggttaggtgagattcggcggcgaaggatagtgattggaaggataagcagaggaggaggaggatgatggtgagattcttgagttgagattgttccgccattgttgaagggagattcagaactcttgagcttgagagagtgagagagtgagagagaaagaggcggtgagattttaatggaagtagaagagagagtgagagtgagagagtgaagaaaacgcgctttggtttagtgcaaccaccaatcacgggatagaggatccagttattttcttatatgagccggtttattacgtttattctcttaaaccggttgattgtgtttggttttcggttcgaattagaggtttggcaaaaatagttgttatctagtatggtatctacggtttaaaccgatatataattttatttaattctaaaatttaaactctaaccacttttttataaactcaacctgacatatgattttgtttaaattataaaatctaaaccctaattctcatttataaatacaaacggacatataattctgtgtaattataaaatctaaacccaagttcttatttataagcacacattgatatttaaccttcctttattaaaagtatacagattttatttttatatttgttttgttttctgattttaattttaatttatttttaaataaagtgtgacatgtcatattatgtattttgattagttattaaagagagggtgaatgaacaagaatttttctaaaaaaatgcttgtgttaaacttgattttttgggtgaataaactaaatacagtaaaacctctataaattaataatgtcgggaccaagaaaatttattaatttagagaggtattaatttatcgataaattaataatttatggagagattttacaaattttgtaattttttacaaaaatttgatctaaaaagtagtttctctatacactcaataatttttctaaaaatcaattacaagtagaaaaccattattaggtttaaaaacaaaaaaaaaacttttttatatgtagtaaagttattagaattgaattttacaaaaaaattaatataaattatagaaaaacaatactaaagtcatattttactaagttttacataatatatattcataaatatatatatatattcataaatttatacaattattaatttataatattgatgaaaccatatatttacataggattttcaaaataattattatctcattaatttatcgatttgtatca

SEQ ID NO: 38170 - DNA, 1715 bp, Arabidopsis thaliana landsberg
cgacgaacttcaactctacggcagcggcggtaaggaaggcacccccctcgtcattggcaagggcgcactacttagcgccaccacattccgctaccggccgccacgagggcgccttcgctggttattgttgcgacctattccaggtgcccgtccatgtgctcccctttcgtcaagatggtgtccatgggatccaggtggctacacacgtacaagtccaatgtgcggagggtgtccgccttatcttatggggtcaaaaaaaattcagattcagaataataagataagtcgagatgtaaaaggcttgtcttctaggtgtctggttttaggtcaagtagactcgatatttgagcacttgtcatgctgcagcttgaggacgagctgcttgtccaggaggggtgtagtgtcagggcctaaggaggccacggaggggatgcggtacagcagcgatgggcctctaaggaggattagataaggatagttagagataagattagttgagattatctaggagattagttgagattatctaggaaggttatcaattagtagttgttgagagtttttaggagagttttaaggagataaggatctctagctagataggggcggccaactaacctatttatgtaatcaatggatgagaaataaagtaggcaagaattagaagggagaacccttgttttgctcggccgtggacagaggccccggcgaaccttcctgcccatcgatacccctctccaatccttcaccgatctagcgaccataacatctggtatcggatagcttgggtttcgatctgatctcatggcttctgccgccaatttcgtggcgtcattctgacaaccgacgtccacatctccatggactctgctgcatgtcaccttcatcacgtcgtcctggcaaccgacgtccccatctccatgggctgcgccgcatgccaccttcgtcacgccatcctggcaaccggcgtccctatctccatgggcaacatcgcctgccaattttgttaccacatcctggacgtcggcgtgcccatccccagggacaacgccaaattttgtcacatcatcttcgttgatggcgtctccgtccccatgggcgacaccactaggtgcaaccacggctcagcaatcaccagctccatcgatgggggacttgtggaccaacgtaagggctgttctcgcaaagatgcaagccacgctccagaaggttgagcaagggctgctgcaaatcaaggcagcagtgcaacatgagcagaaccagctggcgttgtccgcacggctccagacgtcggcgactgtggtcatacaggctgctgctcgtggcttccttgcatgacagagagtgcgggagatgcgtcggtagatgctcgaggcagccttggtgatggttgacctcggtacacggggacgcgtcctcgccctgtagggtggccatcagcagcgccaccgggccgctatctccaagtgcacatggtacgtgtcccgcgggcaacgtagttcgactctacggcagcggcggtaaggaaggcactcccctcgtcatcggcaagtgcacactatttagcgccaccgcattccgctatcggccgccacgagggcgcctccgctggttattgttgcgacctattccaggtgcccgtccatgtgctcccctttcgtctagatggcgtacatgggatccaggtggctgcacacgtgcaagtccaatgcgcg

SEQ ID NO: 38171 - DNA, 1824 bp, Arabidopsis thaliana landsberg
  unsure (1)..(1824): unsure at all n locations
ataagagttagacgaccatctatttgtaattgttgtaattgatgttggtggactatttgttgtaattcttttatttgcgtttttaaactttttacttctccttgtaattctccagtagttatttgtttaaataatgtgggtgaaggatatttttcgattattttactaaggctaaatggttgtggagtggataattgattttccctttgtactaaatctttcaattttaataagtattcttttttagtttctggatcatcaattttgtcaataatatctattaaaaattgttgatcaatgtcttttgttattacatttatggttctacaattacatatttcatccgagtagttttgagaattttcagatgacgtatcactttcttcttctataatatctagaaaagggtcactactcagttcttcggagttntcggtttccgaaagaagtagattttctagtttttctctaatgtcttgctaatcgtaaatatctcattgattttctttttcatttacatcgggtagatttatgtctttgtcttttacagttccaacatatgattttctcttttttatttggctgtttaaactatgtaagtattttacttacataatattagatataaatactaaagtatatattatattatgtaagtaaaatatttatatctaaagtatatattatgtaaattagatacttatatctaatattgtgtaagtaaaatacttatatctaaaaggaggcaaacaataaagaccatcttctcctttacatgatcctacaatatttaatacactagttttaaacgtacacttacctgagattaaatttcaacaagaaagacatggctatttgttgttgtatcgtatttatttcaagcaatctacatctgaatttaatcctagatgtttattgcaagatgataaaggcgaaacaacgatactagctgtacatagtaaagatactccaacctctacatacacacctaaacaattaaaatggacagaaaaaacaagggcctgatggagtggaaaattgatattactcaaccaccaagaaactttgaacaacgaaccattactagtataaccgaacaatatgatggaaaaatattattaaaatttggatcttttagagacccatcatctctaaaaatcagttcatattatccacgttcgtctttctccgattacatgactagccaagttagtaccaatagctgaaccaattcaacaatcagaagcggaatcatctaattttcctacttccccaacaccttcagattttaaatcagtaaacgttatttcaaaatcgtttaaaattgataaagaatatctcaaagaagaatttttatcaaataaaaacaaagacaaaagaaaatggtattttgaaacttttaaagaaaaaacaattacttttgaaataacgtttacggataaaatataagtaactaaaatacgttttaaatcatactttctggactaatatgtggaaccagatattttgggttcgttccccagcagagtagccagggattacatattttgagcattagtactggttgataggtggttattaaattatttcctgccttttctagcttggtatctatgtgatcaatttgccgcgaaattgtgtccaaaatgctgtagaagtattctaagattagttaaaataagttttttactactaagttcctcagaagggtttcctacaaagtgcatggccatagtatgaagtaatacttctacagcattttggatttggtctttcttcataaagaccatcttctccttctattctcctagaatctgtatggtt

SEQ ID NO: 38172 - DNA, 1807 bp, Arabidopsis thaliana landsberg
gttatttcttaggcagaaaaaattacatttggttggattatttcacattgaacgcattcttatcattatcataagtcataacaacaacatcgtcctctaccaatacatttgccataagaatactcggcttcattacaaaacacaagacaacctagttgccctgcggaataacacgccattagcatgaagcaaaaccagtgttttcacgcccgacccaaaccgtccggtccgaccggttaatccgtgacccgaacacatttccgatttgggtttagtgctaaaacccaacaagtacaaaaccgaaaaaacccacaaaaactcgcaattaacccgtgacccgattgaaccggccgagtgtgggttttaaaaagttctcttgattttacaataaaatatgggattttagactttattcaattatttttaaaagttttttcagttcttaaattcatttgatgttttagattttggtgaaaactttacaataccgccttaaaattgaatcgaatggtgagagagacaatcgagattagttgttttaattcacgatgttgtattaatttatttatgtcattgatgatctcctaatatatttgttacggtgttagacatttattggatttcaaatttttaaccactttattattattgtttgattttttctatatatatatatatatatatatttgggtgtaaatgattttatattttgttaaatataatataattttatatttgattaaatatgatatgattatttttgttttatatttataaatactacaaattttttttattataaaatactctaaattttctattaatattaaatttattaaataaattttaactaattaacccgtggtccaacccggttgacccgatgacccggtgacccaaaaggtagtccggttcatcgtccgggtcgggtttcattgtgtaaatgatattttttgtggtcaaagttgagaggtactataacctttccatttattttcttatagatttataatcaaaagaatataacttatactttcaatttatttccttatataattagtcaaaagaaactagaaaataatgtttttaatttcttacctaattacgtttgaacaatggtaaagtgctagtattatatatttttttttttggcaaatatatattatgttatgtacactgttttctctacatttcaaatttttttcacattacgaaaatggttgtagcatttatttaagattttgtattacaattccaaattttagtggttccaacttgatgttatgggtaaagaatgttgttggtgggaggaaagtttacacattccaaaccaaattttacacattcttttaccaaaaaaaaaaacatttgcaaattcaaagcattatgtttgcagtttttgctggggaagaacaagctaccggccgtactgtgaaacttttgatattagaaacatcaaaacaagaaagtgaacatatcgtgggacctatgatcatgggcatgatgtatcaaggctaaacttcaaaagaaatgctcttttataactattacagtcgttaatggggatgggggataacaaacatcatcattttcttttataaccactacagtcgttaattaaataatttaaccaatacaaattaattgtaaaacttcggttacagaaatatggtggtgcatgtggagaaatttacaaaaattaatttggtcatctatgttactaaaacacacttatcttttttgtcaaacgtcttaaagaaaattctacaattaagcatttttaagacaaggaaagtctgatgctcca

SEQ ID NO: 38173 - DNA, 2595 bp, Arabidopsis thaliana landsberg
cttttctacaagtatctatatattaagtgtttgacccttaccagtgtatttacttgtttctaagatctctgttagcactcacacttatttttatgagtctttcgtttatttatctatctgaggtgatcaagttgtcgtatttactactactcttaaggattttgacattgacatacaatgtgaaaccatcacacttaaattttcttggacattgttgcattttcttctttttttctgatgttggagatgtttttattcaattgtatagatgctcattgcggactttcgtttcgctgttagattcgattattgtttagcttgttttgttatgctacaatctagatgactaagtaaaggtactatctcccttgtatcaggaagcattgaaagcaatgattggattcatagatgttgctggtctgtattatgctctggcccagctgactcacagaaacatctcccaaaaccataagtttcaggctgttggtcttggtaagtgaatcactactgctacaaaatattgctagctttggctgtgacattcttatttcatgttacatatcgatgatatgatagtggaattgcttttaatggggttgtaaaaaaaaatataaactccttttcatgactaattaccactgtagctatcaaccatttctagacttccctcaatgattctttgcgtcacggaatatatataccaaatgtgatttgagagatttgttctttcttgtttcagggtgggcattcgcgtattctgttttgcacaggttggcacctctctgggttggtgctcgaggactggagttcacttgggattatgttttgcaaggccttaagccaatgccaatctggtactttatataccagttcttacttctagaaagatccacctgtaactgtttcttacttccatataacgtttgcgtcaaactcaggtgttcacgatatctctagctgcactaggttcattgatgtggctacgcaagaacaagccgaagagtctgatccccatcatatacacatgtgcagtcatcatcgcaacaatgccttcgatcacaagctatctaaagagagtcaatggatggcatttcccgaaaattgttgggtttgagctggcgacttctctggtaatggcttttatcagttgtcaactcttcatcctctgtcagagaccgtctttgtgagtgattccacttcccagcagagctttttgttaatgggaaactcttgcgacgcacttgccttgttttcggaaggactcggttccatgaaaactttgatgtttcccatctttatttgtagaagaatattgaaccatcttttcataacttattgatttgggaagtgtcattcgttaaagcatagacttagaatcataattactaagagatatttatcttgaaattatcttacaaatctatcactaaattattggtgagttgattcttaaagaatctaaagatttcaaaagtttagagattttaaaagttttacagaatcttatggattcttctcagtgagttgtataaactctagcaatgattttcatggattttttgtttatggctaaacaaagtgttactagataatatttttccatgtttttgttttgtttatttgttttattttaccattgtttggtttattacactaaataaatttataaatctcatataatataaattgttgacatattttttgtattattatcagttttcataatcgttaatgtaaaatattactgttttttatgttaacaaatgaagagatacatgagtttatcaattttgagagagagtttgtcaagaaagactttattcatcaacaagcaagcggagttgataatgctcatatgcgaatcctgctagttacttccttgcttggactcctcaaaaagctttatgtctttgagatatatgaggccaaggttgaaaaagagaagagagatgctagagcaatggtactcttgatgaacaagaatcctcactacaaaaaagaaactcatttacatcacataatttgtttcagaaaattatatgatactaatttaaatcacttatttttaatcgatataaaaaatattatttaacatcagttacaataatagatgttgttattgatatatatggcatcatttcattaaaactaatacaaatccaaaatatttgcatcactttcacaaaaaatgatccaaccctaagaatttgcatcatttagaaaatgatacaaaatttgcaccaataacaaatgatggtgattaaagataaagcatcagttgtaaaaaaggatttaattggttacttaatttatcaaagttccacatcgctcccatgaaaaaaggcttcataattttcttatatatattgaccttggtttttgtattgtcaacaaagtgtaaacattaataagcaactgtttatacgaaacaaatataatcgtttgcttttatattaataaacaaaattaataaatttgtttactaaaatatatatttaatatgattttacaaattttaacatcagttatttgtaattaatataaaaacttaacatcacttattattgtaacaattattaacgtcattgtaacaaa

SEQ ID NO: 38174 - DNA, 5386 bp, Arabidopsis thaliana landsberg
tttttaaattctcgttgcgtgatctcatctttcaggctgaggattctgttagttttctagaatattctagtttatgttaaatgttgtttttgtggttggctatatggtgagttgatctactgttggtgagtgggaagtcactgctgattgtggaattgttgtttttggtacaaaaaacatcctcatttcaaggtgtgtgcgcgatcatgtgtgacttatttgttgttaagattgtgtgacttgtttgttgttatatataggctggattttttatggatccataatggatccctgcgattgttttgtcaatagatgttttggtttgtttaatgatttatgtgtttattgtgattttggttttgcttgtgtgtatagatcgtagatgagagaatcgtctcaataagtatttatgcatctctttttttatggtgcatgtaaagataaagtgtgaatcgcaaacgaataaagagatgcataaatttgatcaagaatacttaggcgatcatcccatctacgtgttatacacacaaacaaaccaatattgcaatcaacacaaaaatcatgaaacaaaccagactaatgaacaattatctattgacacaaccatctcagggattcaattttggatgcatcaaaaatccatcctacacatcaaaacaaacaagtcaaacaatcttaacagtttagataatcttatggtcacacacaccttgaaccaaatatgatttttgaacaaaaacagcaatcccacaactagcagtgactttccacttgcctaggtggactggtttgttttataattatccaatttaagatgtacttttctcaattcttatacaaaaatattttgtttgaccacaaacatgcgtattgcttgggtttattttcctaaagaacttgataaattgaacatcatgatgttgaatcctgaaatgaaatagcaaacaaatttaaaacttctcaccaatgtcttaagacaaaataatcgtacgattgataatgaaacgttttaaaagaactagaaaacaggagtggacactcgagctctagattctagttggtcaaaatcattaagtaattggaatagtggaaggggttaaaagaagcaactagagagtggagccactcgttgctctcttaagaggaaagaaaaaagccagtggttacgcaatgaagaacgtatgcttttgcttctaagcctttggttttttatgtgtggttctcttttcttatctctatgaaccaacaccaaacattttccaacattccttcattatatatcagaacaaaacattattcgttcatgagagaaacaatgtctgaaatagaaaagcaaaagccggaagaagaagaatcatcacgacatggccggatatcgaagaagaactcgtgcttcccgatgtgttacgtagtgaaggcgtgaagaaactgcatatgagtattcaaagcgagtgggattaccttcagaagtctgcttgtcaaacagctgcaggaagagctttgtggaaacatgttattcatgatccgcttgctcatttgtttgctggagagacacatttgagaaacctacacacaaagattcagactgaccgtctcaacaatgctcgaagaaagagttttttccttgggggctttgggctttgggcaccgcctagccgttcgaactctctggtttgacacaaggattcaagctgctctggagtctttccacggcgatgcagcacaggttgttctacttggtgcaggtttgttttcccctgtttagacattttaacttatgtgtgtatatatatatgtggagcatgagtttaagataagtagccaacatagaatgatgtaattgaatttcaggaatggatgcaagatcatacagactaaactgcttgaacaaaagtgacgtattcgaagtggattttcaagatgttttggaaaccaaagcgagcctagttcaagctgcagtaaactctagagatgagcttaggatgacagcgaaatcactagtcagagtagcaattgatatcagagacaacgattggtttgaacagcttaaaaaatcaggttttttgccagagattaacacggtatgggttctcgaaggtattctctattacctgtctcacacagaggcaatgcaagtactaaacctcatagctgagaagtgtggactaaccagcacagttctcttggcggatttcatgaacaaaccatcagctacacttccaaactctgtgttccacttttacagtgactggcctgatcagctcttaccaactttgggattctctcatgtcaagctttcacaaataggtgatccagatgcgaatttcggtctgctccacgatccacggaatctcttcaacaaacttctccgcctgccaaggactgcacaaatccatccagatgatggaaaaccatgctgccgtttgtatttggtcgaagcttccggttcaccgcctcaagataaccaagcgagcttgtaagctccttccggacgtgcatttggcactgcacgcttttgcagaacagatatatatgtgagtctttcacactagagaaattgtgtaggaggttaatgtaatttgatgtataaacgattgatatgaacaattcattatattctaaactctaaagttctatatttctatctgcttgaaaattacaacgaagaaagaacgcttgtcatgcctttcgataactagcatgatcgtccttccttactgtaactcaaacgatgaatgaagctcagcatcaagcataagagtatattcatatagaacgagatatcgtctctcacttagacagttgtaaaaaaagttggtacacctattcagccataatgatttcacaagaagaaaaggaagagagaactagacttcatctcaaatctcaagacagtctttgacacccttctcaaatttgtcaagataagagatagtctctgtaaccccatctgcaactttttttctgcaaaacaagttaaaacattgtactgctttagtgacatgagagataccaaatcatcatacaaatatagtttcgagtaacagagaacacatagaagacaaccgttcctttgatggattaagagcactaacccatactaagggagattcatgttaacctcattcgactgcacgactagggaaccgaaagacctgctacttaaagcaagtgctaatggaacaaacatgaaccatatattacggcattggcatgacatgtctataattgaacaaccaatttcattacacatttcaatagagagtcacactagcacatacctaacaagatcatcaagtatattctctgcttctaatttaactggatccttatcatcaagtaatgaagcagcattcttcacaacaagcttaaatgtacaaacctaatcaacaacatcatcatcatcatcataaaaatcaaaactttaatgtcattcataactaaaaaccaaaactttaagatcaatttaagattctagaaacctcaactccggatttagattgaaaatcaacaagagagcttctttctttaggaacacaatctcttgcagaagacttaaacagattctgcagattctccaaatctttctctgtataatcagattcactagttaacgaaagataagcagattgaagagcttgacgagttgcatcaatgggagcaagtaagaatcttgaagacttcttcttctgatctttaagccactctttaggtcctgctgtgtgagaaaattagtttttttttcaaaattcacaaatttggagataagatcaataaaatgaagagtgagtgagaagtgtgttgtgtacagattcctaaggagaaggcgaaagcgggattggtgggggagagagtgaggagaagagaagtggcggaggagagaagaacggtggcgtctcggcgagagataatctgtggcaggtggtcggagatttgtgcggcggcgattggtggtggtggtggaggtttagtgtttgaagagaagaaaggttgagaaattgggataagacgagccatggcttaacattaacgagctaagttatgtgtacccgctcatgtggtatttaccaatggtttcctttttgaacagatttttgtcttgtttttaaacacaaaacgacgtcggtttgtgaacataataaaaatgtaaatgttgacttatctttgctaaattggtccgtcagctaaggatgtaccttatttagcaaaattaacgaaaattaacgatttaattgaaaatcaactaaagtttaaaattaaagtcaccctactcaaaattggtgctttgtttcaccacttttgataaactggtgatagtttttatgacattttttccaataataaaaggggtagttatgcaatttagtagaagttaatgggtttctaaacaaacttaaaaaccaaatttttctttattgctttgctcgagagtgcctgcaactgcaacagttgagattttgagcgtgtcaaggattctgattgataacgatattcaagttcagcaatctcattgcagtagaaaatggaatcgaatcatcctcacttcaaggtccgcttcttttcaataggtttctagttcgattcatgaactgtttctgcagtcaatttcgaacttgtgaaatctccataacttgtgctttgaatgtatttgctaaagctataatcttgttgcgtttcaaaaaccatcctttggaaaaattggagtcttttggttgcttattgaaatttgtttgcagctaattttgggatcttcttcgattgctcgacgtaagatactaacagatatgggataccaattcactctcatggtaatttcttgttcctttgaaattattattcaaagactgcatttttgtatttgggcttctagttcaagtagaagtttactggtaattgttaatgtagagtgctgatattgatgagaaaagcatccgcaaggagaaacctgaagagttggttttggctttagctgagacaaaggtaacttcattagtcatctgcaataaaatggttgcttttatggttcatgtttctttttgttaatcttgtcatcacaggctgatgctattgtgtcaaaactacaaattagtgaatgtgaagatgaggaacaaccgagagtcttgattgcatcggatacagtatgtagtttttggtttagctaattactagtaaagtctccatctactatcaccaagttccattttatgttcttgggaatgcatcatcatcttctttggaaatatacactcttacgtcgtaatagctctgatttgtcctgcaccagaagttgctttatgggttttatctctttagggtcctctatatcttactctgaagctagtatttgtcattctttaggtcttgatctactcatgttgattctgga

SEQ ID NO: 38175 - DNA, 3419 bp, Arabidopsis thaliana landsberg
  unsure (1)..(3419): unsure at all n locations
aaaagagcagttctcttatcacccattataagcttttttttttggtgtatggtcctatagcatttttttcacagtgattacctgagcttcgtggttaaaaaagagtatggttattggatgaccagatgtcagacgcaagagataatgatgaccgtgtggatttcgaggagggtagctacagtgtgatggaggatgaagtggaggaggaacaagtagaagagtatgaagaggaggaagaagaagatgatgatgatgatgtcgttggcaatcagaatgccgaagaacgtgaggtggaggattatggtgatacaaaaggtggggatatggaagatgttcaggaggaaatagctgaagatgacgacaaccatattgatattgagacagcagatgatgatgagaaaccagcatctcctattgatgaagaagatagggaaaagtactcccatcttctttcacttcctcctcatggttctgaagtttttattggtgggctcccaagggatgttggagaagaggacctgagggctgtatgtgaagagatatccaaaatctttgaggttggagcggcttttatctttgtgtttcatgatatactctttgttggttctgtatttacgactgattttaattccttttctattaggtgagactgatgaaagatagggactctggtgatagcaaaggctatgcttttgtagctttcaaaaccaaagacgttgcacaaaaggccattgaggagttgcacagtaaagagtttaaggcaagctcaactgctaactgtagcttaagtttatcggtcattgctagtttgcattttacttataacaattttgtttaacctatacctaatttttgtacagggaaaaaccataaggtgctctctttccgaaacgaagaataggttgttcattggtaacataccaaagaactggactgaggatgagtttagaaaagtcctataggatgttggtactggagtggcgaacatcgagctcataaaagttagatgacttaatcaaattgattggcgtgcttgatcttacttaattgccttactaattatcttcttgttacttgtaggacccaacaaataccactcgtaaccgtggttttgcatttgttttgtactataacaatgcatgtgctgattattcaagacagaaaatgatagattctaattttaagcttgagggtaacgctccaactgtgacttgggcagacccaaaaagctctcctgagcattctgctgctgctgctcaggtattatttaaatagagggtttagtcaatctgcacaaaaacctctctcctggcaaagttggcacttttttgacaatctcttttgcgctatatactcaggtgaaagccctttatgtcaagaatattccagagaatacctcaacagagcagctaaaggaactctttcagaggcatggagaagtgaccaaaatcgttacacctcctggaaagggtggaaaacgtgattttgggtttgtccactatgctgaaagatctagtgcattgaaggctgtcaaagataccgagagatatgaagtcaatggtaagtttttttagtcatctagaaaacagctattgagtatgatgaacattatgctatcaatttgtctctaatggcgtatgttttttcgtctcaagagatgttattgagtaacacattccacaaacttgcaaactacaggtcaaccactagaagttgtgcttgctaaaccccaggctgaaaggaagcatgacccttcttcttattcttacggggctgcacctactcctgccccctttgtgcatcccacgtttggtggttttgctgcggctccttacggtgctatgggtgccggtttgggtattgccggtagttttagtcaggtatatatgtttctaagaaagagctgtttgtcatccttgactagtcttatcagccattgttttgtgtaacgtttggttttaattttgcattgagcagccaatgatctatggtagaggagcaatgccaacagggatgcaaatggttccaatgcttcttcccgatggccgagttggctatgttctgtaagtcgatggttcttgtaaacaaatttgttgatccttctctattgattcatatttactttcgcttaataaataaccaatatggattgctgtgcagnnnnnnnnnnnnnnnnnntggcagcagcaccaccacaacgaccaagaagaaatgaccggaataacggctcaagcggagggtcaggcagagataacagtcatgaacatgatggtaaccgaggaggccgaaggtaccgaccctactagtaaccatagagaaaaataagcaagtagaaaaagaaaaggagaagtgtattgggatttgtttgtagtttgtttttggagaactttaaaaagctctctctcatgtgttataaaatatgaaatcgaaaccttatggtttctggtttgatatggagactgctggggggataggattgagtgattcgatctttaaattatgagactttttagttttttctcttctgaataatactctttatcaattatccatcagatttggtgtttttgctttccctagcccttgtgcaacgttgtttacttatacaacaagtaatcactgggtctcatcacataacattacagtctgaagatgtcaaacgaacttagactttcaacaagaagcaaagaaatgaatcaaatcaattgcaataatacaacaacaatgtgcaatgagaattctttttgagtagagagttatctacattggagtgcagttgaaggctgtttcgaatatgatttgattgattttgtttcaactttcaatcaagggtcgatgtcagaacaagttggaaattcaaggccttcaagggaagttatgttatcgatatcgtctttagagtacaatgggaggagccaaaacgccttcttcttcccaaaaaccttcacaagatgaaaacaaagagttatatatttaattaactaacaatccatggaatgatgaaaacaataaaatctcacctgctcgaagtttttcttctttcctaagtcatatttccatctgacttctccatttttctcatgaacctaaaaaaataaggcaatgattcagagaagagactcatattttcaagacttagattgtttgtgaaagcaagaacatcaaagatttacctcaactgaagtagtgttggatgagagaagagaaatatgcatgactacgaaacaaagaaggctgagaacgaacgcaaagttaagaactgcatcaaggggatagaatctgtaagaaacataaagacggaaaatgagacccagaaaaaagctaagcactttctgggaaaaggaaaacaagaaaaagaaccgtttatactcaccgaatgccagaacgagagaggacagattacccggagaagaagaatg

SEQ ID NO: 38176 - DNA, 3245 bp, Arabidopsis thaliana landsberg
  unsure (1)..(3245): unsure at all n locations
gtcctgacatgcagggcaaactcctccattgttacagtattttgggacccttttgactagagggaatctcaattcatatgagtctttggaactatctcggcttgttgtgaatcaaaacaaaaagaacctcttggaaaactnnnnnnnnnnnnnnnnnnnngaatgcagtgaagaactcggagaccttgtcaaagtaatcttaaaatgaccattttcatttaaagtgtctcctatgggcttctttagtatgctgtaacggtaatattttctgattcagactgtggataatgaccttgctctaaaaatatacatcaaagctagagctactccaaaagtcgttgcagcttttgcagagcgaagggagtttgacaaaatattgatttattcaaagcaggtaaacaattaagttttaaagtttgccccctccgttgttatgtttaccctaaaggtcattgtgctcaagaggtaccattgttttatgttgtgactctaggttgggtacacacctgattacatgtttcttctgcaaacgatactccgtacggatcctcaggttagtttgctgcacttttgatactttgcaacatattaaactgtggaaggactggtttactagattcttgttccgtaatcacaagaagagtcataaattttggcctgctgttgtttatcaagcaactaagcttttgccctgtaaaagatcaatagtcttttttttctgctaattatcttcttttttttcctgctaattgcagggagcagtaaattttgcattaatgatgtcccaaatggaaggaggttctccagttgactacaacactatcactgatctttttcttcaggtaggtcaatatattctgtatgcaccaatatttgtagctcattacttgttctactcctatatacagaattgtatacagtagatgtaaattatcatgtgcttatttgtctatttgtgcatattcagagaaatctgatccgtgaagcgacttctttccttctggatgtgctaaagccaaatttacctgagcatgcttttctgcaaactaaggttgaaaatagttgccaccttgtatctctccgttttttctctactcaccttctttccccagactgtttaaatcatttttcaacacaggttctggagataaatttggtaacttttcctaatgtggctgatgcggtattagcaaatgggatgttcacccactatgaccggcctcgcattgctcaactttgtgaaaaggctggactttatatccaatccttgaaggttggtacatgttttttaccatttttaccggccaaatagatttatcatcttctcaccttccaacttcttttccttttgatttgtgcagcattactcagagttacctgatataaaacgtgtaattgtaaacacacatgctatcgagccacaggtagtgcctctgaaatatattttggttgttaaacctactaagtggtcaagttgttgcataacactctgctccatatgcaggctcttgttgagttttttggcactctttctagcgagtgggctatggagtgcatgaaggatctgttgctggtcaacctgagaggcaatctgcagataattgttcaggcaagtggtgtatgatatgatgaatcttattggttattttgacactaacggtgtccatacaatttcaggcttgcaaggagtactgtgagcaacttggtgttgatgcatgtattaagctctttgagcagttcaagtcatacgaagggctatactttttcctaggttcatatttgagtatgaggtgatatagataaaatctgatctcgtttctgtaaacaagcacgattcttgtatttatatgcttatgtttacaatgtttctctctgtgcgatagtgaggatcctgagatccatttcaagtacattgaagcagctgccaagactggtcaaataaaggaggttgagcgtgtaactagagagtctaacttctatgatgctgaaaagacgaagaactttttgatggaagctaagctgcctgatgcacgacctttgataaatgtctgtgatcgtttcagctttgtgcctgatcttactcattacctctacacaaacaacatgcttcgttacattgaaggctacgtgcagaaggtataaggtttcctgggactacttttaatgcgttggagttcagttttttttgatgaaatatttatacgtttgattctgtcaaaggtgaaccctgggaatgctcccttagttgtcgggcagttgcttgatgatgaatgccctgaagattttataaaaggcctcattctctctgttcagtcattgcttcctgttgaaccacttgtcgaggaatgtgaaaagaggtgcgaacccttctatcatctggcatgtccatcatacccacgctatgggggcctttaggctctagtatgtatatgtcttctcagaaaccgactgcgactcctgactcagctcttggagcctctaactagtgagggaagccaggatgtgcatgtccataatgccttgggtaaaattatcatagacagtaacaacaaccccgagcatttcctgaccaccaatccttactacgactctaaggttgtgggtaagtactgcgagaaacgtgatcccactctggctgttgtggcatacagaagaggacaatgtgacgaggaactcatcaatgtcaccaacaagaactctttgttcaagttacaagccaggtatttgattattgcttactagacttcttacttatattccacactagttactttgtagactacttacacacgattttccaactgcaggtacgtagtggagaggatggatggtgacctctgggagaaggttcttacggaagaaaatgaatataggaggcaacttatagaccaagttgtgtctannnnnnnnnnnnnnnnnaagagcccagagcaagtttctgcagctgttaaagcattcatgactgctgatttgccacatgagctaattgagcttctggaaaaaattgtgcttcaaaattctgccttcagtggaaatttcaatctgcaaaatctacttatactgacagctattaaggcagatccgtccagagttatggattacattaacaggctggataatttcgatggtccagctgttggagaagtggcagtggatgctcaattgtatgaggaagcatttgcgattttcaagaagtttaacttaaatgttcaggctgtcaacgtattgttggataacgtcagaag

SEQ ID NO: 38177 - DNA, 2358 bp, Arabidopsis thaliana landsberg
  unsure (1)..(2358): unsure at all n locations
aattaatttccttatgtttagtaaacgtattgatatcttatcatttactttttaaaattggtgatatcagggggttatttttccataactattagttaacattttgaaataaattttgcagattctaatggttgtaatttccaattatttgtctttaatagataaaaagcatatcaaaatatgggcatttgcaaaaataactttttctaatacctttttaaaaaatatcacctcctattgtctcttcatgtacgaaatgactaaattacctttcttttaatgagaacttataatgagaaattaaaaatttcgaccatcattcaggtgttagttgtcatcctaatgccaaactagattttaacccgtggtacaccgcggagataattcatttttttaaattaatatatataaaaatttataaattattttatagtttaccattgttactaagtaacgtcctgccaaactcgtcccgccaaacccgtccacaaattttttttatttattttattaatgttgattttatttataatatgtttatgaatcattgtcaaaatattttattcgttgcgggacattgaacccacacatttttcgccaattagttaatatatgttcattcttaaaatttcgaatcacaaaatatgacgattttttttttgagattttttaaactctatatattatataatgatgttatctttttttgatatatcaaactttttataaatttaattattaataatgttttatgaattttaaatatgtaaataataataaataaaaaattaatattttttgtcttttaggtaatgatataataactctaaaagtaaagaattaaaagatttaaatcgttaattaaatatttttatttctaaataattaataccaatagcatgacattgtaaataagttcaaatacaggatttatttatttaaacaaaaaacgtttagtaagaataatatttatttaaacaaaaaactttgttttaaaatattgttaacaaatacgtttatgctaattttaagggattaatgtgaagtttgtttggattaaatttgattgataatgtgattgacaatttaaattaagaatttaaagtaaaattaattattttggaaaaaatattaatgctaatggcattggattgtaaataagtccaactataggatttatttgttaaaatgggtgcaaaaatgtatatatagaagtcataaatttttatataagtatatatatttttttttaaacttttgtatgtaataattgattgtaaaaagataagatgaaataaaaatctccaagaaaatatagcaagtgtcagcatctcaataacaaattgcattaatcaaaaaaaaatgaaaaaaaagttttgtacagtacacccttcgtttttgagtttgaagcacacctcccactcacttactaacaagtggcacatgtgggcccaaaatatataaacatgttgaattcacgtaaggttttttaattattcaacaggtgcaatgtggagattcaacagttggataaataattcaacacgtgcactgtcgatagtcttatagaagaattaacaggcacacaaccgataataacatgccaaataaaatgtctcaattttagcgggcattggacttttcaagagtgggcttggagaggccttaaaatttgggccaaaataacaaacttggttttcacctatcgtcatttgctccgtataatatcctgattcgatcgtatatttttcagacttcgtgaagtgccaatccaaaaaatcaggtttgttattttttcttatgggtagtgcaaatacaaaagggatatccttgggatcaagaatattctgaattaaatctatatttcaagtgtttgtctgatcatcaatcaaattcttgacaagaagatatgctaatgaatataagcattgtttatagctggcctcggggattaagctggtatccagggatcattccatactgaatttgatcatccagagcttactcgtttaataagccctttgttaaccagaggttgagcagatccattggatctggtttttgataatagctccctttaaaaacttttgcaaataaggaatcatgaaccttaataaaccgccatatttatttcgctaataacccagtattatatcatccacatcctgaaaaccaatcccactattagattttctctcgcataacttcttccatgccatccattgcatttcttttgtttctccagttgagctcaaccaaagttttgctactacattcgtaatttttgacgttaccaactntggtaatctaaaataatacattacataaagtaggcacgcagcagctaccgattaatca

SEQ ID NO: 38178 - DNA, 4072 bp, Arabidopsis thaliana landsberg
tttaatgcccaaatttctctcattttcttgcttggaaaccatttattttattagagcgagagagagagatagatcaagaaagaaagagtgatgcataagcaagagttcttggaattgttcaaggccgcacaacgagcggctaagtatgcgagtgatgagaattctccagaggtctcgaggagtatccaattcgtgaagcgtttgaaagaagctcctgcatctcttgattgtgacgtggtcgttaacacaaactccattggaaacggaatccgttttctccgagatcacaaaaaccccctaattcgatctgaggcagaacttctttcagatctttggctcaagtatctttacgccaccggtagaaaacagaagtcgacagattctgtttagttaaacagattcagagaaattcagattcaggttttgaatgtaactgtattaatgtgttagagacttgggtttgaatgtatatgacattatattactgcttcttaatatggcagattttgaataaagaaaaggtttcacgagagaagattagaacactaatatgtatgacaaaagctttcttcttgattcaatgaagtcacactcatttcaaatccataaataataaagcttacttaagtactatagttggttaaactcacaataatatgacaatgttttgctactaatcacatcacttggatcagttattttttgttaaaaccttgacttggatcttacactttgatgacgctcttggaagcatcataagattcctcatttccatggtggtttgcaagttattactgttgtttaccacgcaaattttcactagctcaagacacggtaacttctccaagaaatgcttcatttgattcagctctcttgtcgttccttgatagctcaatatctccagcaccttcacttgagatgatgataggcaagaggttatgctctcgtcggtatcatagcaaacacatacatccccacatctgtttgttatgtagtgatcgagaccctgaagcataacaaagaaaaagagtaatgttaacgacctaccaatatatatatggtgtttaggatgtgtttgtgacatgagataccatgaagatgagggtttctaggtttggagagttcttgatcagaagtggcagcatttgccatcctcttgccttgtcattcccaatagatagactaacaaggctgtcgaacaatggcatttctttacatgagaaataaagcagcttcaacaaaacacaatgtgttagtctgttgtcactcaataacacaaaagttgaaataaatcatcaaaagccccaagtgaatctcattctcgataagcaaaaaaaaagaagaatgttatttataaggaaagaacaatatatagaggaggctgacctctagagtgtggctagataagtgaaggattctaacatttctgattccattgatgagatttctcatatcagcgggaatggaaccgagagatccatttcttactcccaccattcttgtttcatccatccgaagattgagtctagcttcgatgagggaatccaacttaacattaggatacttacccaaaacataaccagagtgtttgtagtagataagattaggagcatctaatgaaatactagtaaacttgcgatcaaatcggatgtgtagtctctttagagatggagaagacacggaacaagtccaatctacacatcgccgctcctcaacaaccagttcttcgagaacaggacagcgagatataagagttccaacaacattatgacctccaacaaaattaactgagtcaagacataatgtcctaagcaaaggaagagaaacatcttgagaaagcttgattgtaaaaccacgtcctactctcagcttaaccaatgtcttgctcttaaagatcattgcaggcactggtggagattttccttttaaagtaatgaacacatcaagatccataacaccatggtcaagaacgttgcaaatccaactttgaatgcgagatgaatcagtgccacctcgaacaccaacatgactctttagagtgagcttctttatagaagaaccacgttgcgtatctagcaatttgtcaacgaaagccatgtaatttctgtgaatctcaatccggttttgcttagtcttaggcacagattgacgatcatcaatatcaagattggaaaccaaaacaaacatgttcttccacctcttagagagtactgaggttgaaacagcttcttttgtggagataagagacagaatacgcccaagaacctcatctggtagacggctgattacatctttagcattcattgataccaaaaccttaaaaccacagcaattggattcagaaacagtaactagacagagttgatgagttcaaaggtctgttctttttcatacaatgcaaagtctaatacaaaagttatcatgtatctcttcaatcacattgattaccatagaaatgaaaaagacgaaacagagcagacaacataccttgctaaagtgctacttgctacagagtcgggagcgctctacacttgcaataccaatttaatcgtgcgatcaaatgtgaaaacattgactactacggttatggcaagtttaagagaagagtcgaagaaactgaaacaacttattataagcaatttcctccatttccacatgaggaaagagtaaagcagaaagactgatgaagaaaaggtaagtagtctgtttgggaaagaaagtcacgtgagagaagcgtgggcctttaagggtaaaactgtcatttaaatagtcgccgttctttacacttaggattagggcttctaacatttaaatagtcgtttcgttctccgtctctcctttcccgtcggccggtgataatttcgcaacccaaattccaaatggtaagtttcagttcttggatttgtatgattttgtaatgtgaatagggatttgaagatttacttacttttgaaattcaggcgtcggagaagaagctatcgaacccaatgagggacattaaagtgcagaagctggttctcaacatctccgttggtgagagtggagatcgtctcaccagagcctccaaggttcctcctgttttttacccattctctgtggttttcactcttgttgtcacttggttataatcgattgattcgtggttacttggtaggttttggaacaattgagtggtcagactcctgttttctccaaaggttagattttttctcatatttgaaagcttacaaatagtctggttgatagatttagtaatctagaagaatttgggaaacatagtttagttaagtctatgaatgggtgcatggtttgatgatgaatttgagattttggaatccagtaagtcccttatctggtggtttgtgataacttgataagcctaccagtccaaattaggagctgttcgtttccccgcttctgatatagttgcgttgtgcactctgttttatatgcatcgcttttggtttgctctgagagacatgatttggtttagcttcttccattgcaattttcaagaacccttgttatgtgtggcttttgcagctagatacactgttcgttcttttggtatcagacgtaacgagaagatcgcatgctatgtaaccgtcagaggtgagaaggcaatgcaactacttgaaagtggattgaaagtctcggggtatacgaacttctcagaagaaacttcagtgacactggttgcttcggttttggtattcaagaacacattgatttgggtatcaagtaagtcaatccccttaaatcatcctgtcataacacttggggttcaccacattcttggtgatactcattgatctttgtttcacttcttataaaggtacgatccatcaactggaatctatggtatggacttctatgtggtcctagaacgtcctggctaccgtgtagcacgtcgcagaaggtgcaaggctcgtgttggtatcaacacagagtaactaaagacgatgcaatgaaatggttccaggtgaaatacgaaggagtcattctcaacaagtcccagaacatcactggctaaaacaattcctcataactctttcttctgttttagaaaacc

SEQ ID NO: 38179 - DNA, 6246 bp, Arabidopsis thaliana landsberg
gtgtgattcagccattatcagttcctaaaaccactcatatgactggaaatttacccggcatgacgcctgccccttctggtagtttaggtgctttatttattctactctcagtaaaataggttgagaaggttatttattggaataggtttcattggttttttcagttttagttttttctccataagtctagatcagtatggctgatattgcacagatgccattttcgtaactgtttactgcttttcctcatagttcccggtgtcatgaggagtggttcagacaactcttacttggaatttgaagccaaatctgccagggatggtgcatggtgattcccttgcattcaatcttcagtattttttttgctgacttatgatactttgtaacaatatcattacattccactgcttttctctgatatgtaactctcttgcttacttacaggtatgatgtgcaagctttcctagctcatagaaacttggagattggtgatccggtaattcctaaccaacctcttgttgacttatttgttccccttctttgttttgctaacaacaatctttctgttgggtatttcaggaagtgcaggttcgatttgcgggtttcgaagttgaagaagatgaatggataaatgtcaaaaagcatgtaagacaacggtctctcccatgtgaagcatcagaatgtgttgcagttcttgctggagatctcgtcctttgtttccaggtttagaacttcgctctctaagcatttagtgataggtgtcatgttagtttatccctgactagaactatgttataacatcttcaggaaggaaaagatcaagctctttactttgacgccattgttcttgacgcacagagaagaagacatgatgtcagaggttgtcgttgtaggttcttggtgcgttacagccacgaccagtccgaggttggacgatcatctctctctctctctctctatcccttgcggttttatttacccgtcagctccatttcatggtttagaccataaagcaaaaccctcctcactcacctattttggatttcttttccgttatcccagcaggaaatcgttcccttgaggaagatttgtcggcggcccgagacagattacaggctacaacaacttcacaacgccgtaaacgatttggctaactcaaatcagcatcagatacccgctctagatgcggctgcaaaaacccctctgtcactacccggagctacagttcccattgttgcacccgagtcaaaagatccgagcctgagtgccactccagccactttggttcagcctagctccaatgcagctactgttcccgctggttcagcctaggccatgtaatttctatccccgtttgtaacagccatttttcacagttactagtagaggttaacttgggatcatatgcattgtactctcacacaatgaattagtcatctaaagctgtatcatgccatgttacttgatccttcatgtatgatggaatatttatggtttagtccgatttattcatcatctgttgatggtcaccggttttttactcttttgaacaaacatgctcgaatcatgtggatttattcttttcaaggcttaagtttacaagttaggaatcttacctcgagtcatttagctttacaacatttgtggggatgagaaattaaccaattattaatctgaaaaatatctcactgtgctgaggagactagataacacttgaggtcaaaagaactattttgcttctgtaaatgactgatcagcctagacacagaacaacagttttacaaacaattacaactgtttttattgttacagaataacaaagggaataataagaaacttacagatttgatatgttacatatcatatgtatctaactttgtaacaagggctcaactctctctgaacattttatccaatgcccctacatatctatctatatacatcatagatgattgtttgatcgggaaaaacaagtgactacattggtgcgggtaatctccggttataggaggatcctgtccccgaacccgagcctgatcgagatggggaatgagacggggcttgaactggggacgagttaagaatctcgagacggggcttgagctggggatgagttaagaatctccttaccaaggtctttgatcttgttgataagcagcgattgctctgtctgaagctggagcaaatactgttcttgttcgtcctccaaactttccagctcttctaaagcttcagcaagaccttcaagatctccatcgtcaatcaaattctgaaactttatcatcacctgcttcatctggttggacagtaacagagctttgttaaacggtgtgccaggacctgcgctggcgcgtctctgaatctccgtgactttcctcgtgactctgacatggacctccccgtgtttcactccttggagaattatccacttatcggcagtctcatttggctttaacccttggtactccacaacgcagttaccgatgcttgaagtcggaagcagagtgttatagtctttcacatgtagctccaaggagctcccatcatctggaaactccattgtctggttccattttggttgcaacgtcttataaatcacctgaaaacaacaatcacacgagaaaaaagccatctgtaagttttgttttctttatgaagtctttttggtccaaaacagtttctataatacctttgtcctctgtttcttctctccatattgaaccctaacataaggatcactggttcctctaatatctgcggccacaagatcccgcgcttcaacgagaaccaattcaatcaagcctttactagaatccgcctgcgatcaagccagaaaaaaacatcaatgaggaaaaacaaagaaacagagtgatgtttgttttcctcaaaacacttacttcgctgtactcgggatccaaagcttcgatcaaaagctctatttctccagaattaacatcttcaagcggaacccatatatgcatttcgctgttattgattccttaaagactcaatgtagctgtaccgatgttgtccgtgccaagcatgtattttttatagcatactacctataaataagctgctgccgctaactctactaactcaaattactggctccacacacactctgttgagaccactatattacttttttgtataatctacaaaccattcaagcacatgccaacctcttaagattttaagatcgtgcaatagccattttgaagcaaaatcatgaagagagtacttacttttccgtactgtaacttgacagaggcatcacattttccggacttatctttagaaacaaggttctttccagccaaaaccgtcacgataattttccggccggttttcgagaggagggcagacgagctgtcgagggagtgtaatgaactcgaattaacgctattcaagctatgtgagccatcagagaagtgccattcttttagaagtagccggacagtcaactaaaagaccaaaaacacacacataaaagtggtcaaaaactcaaaatcataaaagagtaagaaatttggagagtaatacattacaagaaactgtattatctacctctccggagctaactccttcaaacggaacaaccatctcgatttcttgaccacagaactcagcgtgttttgcaatcacaccgttatcagatccaacggcccaaaacatcgttgaatcatcacctacatatttcatctgtacagagaaaaagatgaagaacatgtaacagccagttaagcaactagttaactgctttattattcattaatttaccttaacttcacagctagcgagactgtcatatctgacactcccaggattattttcatagaggttaaacttgagtgtccctgtattgtcgtgtaagatcatgttaaatgtcgactgataagctggattcggtcctgacttcatctcggttcgtcgagaaagttgctcgagttcgacctccacaaatgtttgaacaggtttgctgctgctatttccgctgctaccttctccgatctcagaacttttcgaggggcttccccgaagaattctgcggttaagattgttaccagatacaacggttacgtagataattcccccgatggctgttttgtgaagatctgttgcgggtaacgagaaacatccccggcgtggctctaccatcttcttgttcaaagtttccgttagaatctttacctgaaacgggagagaattacggttttgcccttcgtaactgtaagtatttttggcggtaaagtttgggagaaatgaaatggaaacgaaccagccaagaggagacaccaggaagctctgtagcggggagagattggccaccgccaccaccgaaagcaactccgattctaacttcaggattcgatacaaaggaataaagcaatgctcttccttcaagaatcggtctgatcagaatctgcaagatgattcagtaaataaacgaaatcctatgtagagaactcatttatcttttaggaaaacaaaatttttgcttacatctcccttgatgcagagactgttgacaacgattcgtgctgttcgattaaacggcatggataacttggcttgcaacaaaatacttagatccgttgtgtcccagttgaaatccaatcgcatgattttctaaagaaaaggaaaacaaaatgtcaaacatcaaaatccaaccttctgaaaatatttgaagtttaaaagtcatagtaactaaacctgttcccctgattttgaccaacaagttccatgtagtcctagcaaaggagggcatgagccaagagaaaactccaacaattgtatattttcctatcgaaaaccaatacaatacaaattagcatcactatgtccaatgtctttaaaaagaggtctcatgtaaaagggagagattgcttagtgcttacgattaatcttgatcttcgttgcctcaatcgtttctgcgagttagataaaacgatcaaaagttaatggttcattgccttttaagacccaaggatcacgaaatgtgttaggtagaaagagcatgactaagaatgaatctgactcacctccaccatagaagaaaacctaagagagagtttcttgttcatatagtttagccaaatttcagacagtaacttgttcagccattgacaatgttccaatggagttatcgtctggagaaaagaaacaacgcggtattcttataacgtcgagcgatacaacaaaagttaaacgaaaccaaaacaaaaggtaacataaattctcaccgacgcattgaaaacggtttgcctccacttcttggttagatcttctgcaagtagtgccctttggtaacttccatactacaaataaaaacaaatgaacatagtcaaaaaaacacagcaagacttcaacttatatatctctcaactttatgttcagatttgtgcataggaacacatttatcaaggctcttgaaaacttatcaagttaacataacaaaacaccccaacatatgactcttaaatatcaattacctaagattgtaactctttcatgaaaagcaatttaccataactatcctcatgagtggaaagatcaaactgtttctgtatataaatgttaggtccacacacaaaaaggataaagcttccaaactttatcggaggattctaaagtatcagattaaacggatccagacaaaattaacaagtagtttagcaagaaccaatcaattatcaaaggcacaataggactttgaatatcagaaatcaatggaataaaaaactaaagaagttattttgacaaaagaactaacctgaagagaagcccagacggcgacaacgagaggaacccaattggagaaagcaaagacccatctttcaattgcccagaaagctaagaccaaaggaaccagcaacaacagcgaatgcctctcagcaactagatgattgataaattctcttgcagcttccgtgtttatcagacctttcctctttattctccgacccatctcttcgattcgccttcaagcttcttcacaaatccataagtcagtcaatgaaatttctccagcagatttcttttccgggaaaatctgaaagctttctgggtcaaagtgacgaagtaagaaactctccttgcagtatttatttctctggttttttatttattccacaatttgatttcttcaacaaactagagagatccacggtgagtggacgaagaagaacaaaatttctggaaaaactgagaaaaatctgtgagagaagtttcgaataaaaaaag

SEQ ID NO: 38180 - DNA, 2348 bp, Arabidopsis thaliana landsberg
cctccttcagtttcagtggttacaacattagctgatttcttgtcttgagtgaacttgcgatcagggcactctctagcccagtgttgatcactgccacagacaaagcatcctccctttcccttgttattgttgttcttctttttaaactgtgttgtttgaacaggtttattcgcgttctctggcttgttctggtttttcttcttgttaaacttgcggaagtttctcttctgcaccacattagcagtagaggtctcaacaccttttccactgtcctttgttctagccctttcctcaacatcaagagtaccaatgagctcttccacattgaactcttgtctcttatgtttgagagaggtagcaaagtccttccaagaaggtggtaacttggcgattataccgccagccacaaacttgtcaggcaaaggacaaggaaaaagttcgagttccttagctagtgcctgaaactcatgagcctgttccactacagatcggttctcaacatcttgtagtcacacagctgctccatgagatactcctcgctaccagcgtcagttactcaaactttccaacaagtgcatcccacatctctttccctgtgggaaggatgatatagcttttctggaatttttgcatcaagtgcgctaatcactgctcctcgaaagaggttgtcatcagccttaaacttagcctcatcctcaggaggtaagatgaaagggttgccctcagcggcatgataacaagacattgtcagtagccacaattctttcttagctttccaaatcaagaagtttttaccatcgtaaggatcaggctttagcacaacaacaaaacctctgacagaaaaatgcctaacattaggtttttggattgttagaaatataggcattttccgtaccattttaattccataaattaatattatgatgatgacatataatagataatcaaacatagataacatgctctcaaaaatatccataaaaatatggatcatgagaacacaaagcatatgaagcatgtaaatcatataaataaaataagtatataaacatggttcatggattattgcggaacaactgaaaataaacagataacaatataaacaggatgactgtaagattaagacagacagatataacatattataatatgatagagcaaagctacatacgacatatataatatgcagaatataaaactgtaatgaactgaattgatcataccctcccatgcgctccgaggatcctgatccttgtccaacttctcttgtcatccgatcgagatgaagacgccaagaaccagcgatgaagacagatgttgggcagtcgcgaagacgctccccaaaaacctaattgccgatcccccgtgcaaggtctcgaacggcaccggcttcggaggcacctgccctctcgcttctctgtgcgcgcagagtcacgagatggaaataccctcactcgggcggctggactgtgagactgaaagtgtttctcgcgtgtaccgagtgacatgggtgctcctctatttaacctctcgcagagggaagttgaaggagaaaggtcgccgagtcacgccaaaagtcggtcagctctaggagaaaggtcgccgagtcatgccatgagtcgggcagcactcgccgagtcatgccatgagtcggccagctctcgccgagtcacgccatgagtcggcagctgaaggagaagggtcactcggcttgcctgacgaagagacagggtcactcggcagacgaagagacagggtcactcggcttacgtacgcggttagtgagtgctaaaaattaacacaaccacaccacgcccgctcgcttgccagcctcgcctcgccacgccacgccacgcccggcccggccggcggcggcggcgcgcgcgtgtggcacgcccttgtccatttcttgacttctcaagttaagtggaataaatcccaccatataagtcaaggcaaagacccttggacttccaatgtggtactattggtattctccaccattacacaccatagagtttattcaataaatgggccaagcccataaaagatccaacaatccccaccaaactctagggtttgtaatgatgaagtatcagaatcacaatcctttgatataccagtgtttcgatggagactgttaagttgaacatccatctagaataagagtttcactcattcacaactgaacaatggactatgccttgaattgacagttttgtgcgaaataagattcactcaaatcctttgctgatactaggctgcaaaagggtattcccgctgtttagaagcatataagtcacatttgagtccctttcatgagtatttagggattacccaagtccaat

SEQ ID NO: 38181 - DNA, 1578 bp, Arabidopsis thaliana landsberg
ttaccttacaaagaatacttgagatttatgtacgtgtgctattttcacttttcaaacatgaatttcctaggtttcaattcatttaatgtaaaagggatgatataatgtatttacgtacatgtgaacaaccaagcatgttattttttccttttttgttgcaacttacaatcaagtaatgattatggttatgattatgatattggtgtgtgtcttttgccttatatatatatttatccctttcgtttaactttgcaatataattattactgatcactatattttggtttgaaatggcgcaggttgtaatgaagaacgtgactagattatgctcaagcaagccaaccgtgaccgtcaacggtagatatccaggtcccacaatctacgcacgagaagatgacacgttgctcatcaaagtcgttaatcacgtcaagtacaacgtctccatccactggtaagcttctacttaatcttcatttgaatcatcatttataaattcacaagttaattgattggtaactttggacgatcaggcacggtgtgagacaagtgagaacgggatgggctgatgggcctgcttacataactcagtgcccgatccagcctggtcaagtctacacatacaactacactttgaccggccaacgcggaacgctctggtggcacgctcatatcctctggctccgagccactgtttacggtgcattggtcatccttcccaaacgcggtgttccctatcctttccccaaacccgacaatgagaaagtcatcgttctaggtatctcaatcagtatatattttcaaccacaattataaagtttggattcattaaaattttaattctcttgtccaatagaattgaaatttggatcgaccagtcaaaattataagttagaaatttcatatcagaatggatgtaatattcattcagtcattcattgcaatgtgatttatagttgaaagctcgtaaaactaaacaccactactatctttagttgctacaggttttttacatttcatgcaaatttagcatgactagatacataacggtcataataattgtaggtgaatggtggaaatcggatactgaaaatattattaatgaggcgcttaagtctggattagcccctaatgtctctgactctcacatgatcaacggacacccaggcccagttagaaactgtccatctcaaggtaatctcttaatttccaattttaatttataagatttttaaaagattataagctaatcatgaaagcctctttctatatccgaaggttacaaactgtcagtagagaatggcaaaacctatctgctacgactagtcaacgctgcacttaatgaagaactctttttcaaagtcgccggccatattttcacggtggtagaagtagacgcagtctatgttaaaccgttcaagaccgacaccgtccttatagcccccggtcaaaccaccaacgtcctcctaaccgcctcaaaatccgccgggaaataccttgtaaccgcttctcctttcatggacgccccaatcgcggtggacaacgtaaccgccaccgcaactgttcattactcgggaacac

SEQ ID NO: 38182 - DNA, 12226 bp, Arabidopsis thaliana landsberg
catattattatttatataaataatattctccaattttgatttatacaagctaatctaacaaagttgtcgggaaaataaattagttagaattgtaattagcaacaaaatacacaaataatgtgaaataaaattctaaataaaacaaacatctaggtgggagctactcagatttgtatgtagtatataagatcaacttttagtggtgaataaatggatgataaaaagagaggacgagaagacaaatgataaaattgaacggtaatttatggcaaatgggaaaaaggataaagtacatccgaggctccggaccatccgttttctaaagtttcatattttaaaatattagttattcagaaaatttgacgaccaatcaacagaaaagaacatgaatcattgaaccaatggataccatgtaactagctagaagcctagaaccataggttatgatatcaaatcccgaatcatggttacgtattatgtggtttgaacaacaaaaaaaaaaaaaggttacatagttttgtggtgataacataaccgataagtacccaagacaactttcttatgatcagtatgtgataatttgataagctcgtccacaaaaaaaaaaactcgtttataataaaactcgacaattctgattaatttccgttggtgattattgattaacattctaacgttcattttatcaaaacaaatcatgctatcgtacaagatttttttttcctctcttttcttaacatttaaaatgtctcaagaccgctcaaattccaatgtttaattttgataccaaacgttcactttaattaaaaagacatactgatcatgttattgttaaaagttccacactatctgtccacaacagagcgataaccaagagaaaaaaaaagaagaagaagaagaccaataatacacaaagatgcgtccaacatgtttggtgcccgaactcttgtcttcaccacattaaaactgactcgtttgggaccactcaattctccaatcaaagtatcaaacagtcaaggtcggtgtaggagtcgagctccggcttgtaggctccactcttccagcgaaatgaccccatggtttagtcgacacgtcgtcttcgtcattgtatgcgtaagcaaatcctccatgacgtgtcatgtccattcctgccatctcatcttctgctgatatcctcaaaagattcatcttatgtaacccataaaacaacggtcccatagttaccgtcacccacccgatgatcacaatgatctgaacgatctgcgcggcgagcagtttttcctcccccgcccatgaacagtccgtaaggcctatcaccggagtaaatctcgttaacgtattctttccttgcgaacagcccggtaaagattaatccccatgctccacatccaccgtggagctgagcagcctcgagtgggtcatcatatttaagtttcttggcaagcaagttaaatccgattaaaacccatgatgccacaaagccacatactatagcagcccacggctccaccacggcacatccggaggttatagctgcaaagccgcctagaagtccgttgcatacgtcaataacgttccaatgacctgctaaaagccgtttactgaatagagtagtcaacgcagcggtgcagccagaaagcgttgtggtgaccgcggtgcgacctacagcgctccattgaccataatatggccgagacttgtcgtagcctttaagaatggttaaaaaggaaccagggttaaacccataccatccaaaccacaacaagaaggtaccaagcacgacaagggatgcactgtgaccacgtaaagccacggaccggcctgaccggtcaaatctacctattcttggtccttcaactaacgctccacataaaccggcaattccacctaccatgtgaacaactcctgaacctgcgaaatcaatagcacctgagccaaacaagagattgttgtcagaccgggacgcgctagcccatccatcacttgaccagaaccagtgcgagactgtcgggtaaacaaatccggttaagaaagaagagtagataaggtaagcaacgaactgagtcctctctgcgatcgaaccacttgtgattccagcggcggcgatagcgaaagtccattggtagaggaagaaagagtaatcagctgtgggagtcggaaaatcatacattccaaagttgtgttttccgatgaatccattagaaggagatccaaaagcaaaagcgaaaccgaagagataatagaagagacctccggctgcagcgtcgatgacgttcgtgagcataatgttcatcgtgttttttgcacgtacggatccggcacagagcatagcaaagccaagctgcatcgcgaaaacgaggtaagcagagaagagaaggtaagtgttgtcgattgcgtaagccgcatcagtgaatttcccggcgactgtgtcgaatctcccgcagatgtattcagcggcggctgctgctgcggtggcgttggctccacctgatagtaatggaatcagatcagaggcagagcaagagagagccgacgccattgttgcaaagattaagagagattttgtgagagatgaagaagagtcagagagtagagtttatagaggaggaaggtagagagattcacgacattctgttgaatcattattagagaatttgaatctttcagattctattctctcattttcactatagtaataattgtatttactataaccctaaattttaagattctgtaacagttttattccactattgttggtgttaactttgacttctcctccttaaacgtacttactgctcatttccaaagtaattaaatttttatattttccgaaaaatacgttttgtaatgtgtggactataattgtcctaacattaaaaaatgtgtggactaatttttattagtttttgtttttgggaacaaatatctttgactacaaaaaggttaatttacattctttcaattgataaattctgattggtaagtagtaaataccactggattagattatgacaaattttataatttgggttggtaaaataaattaaaatccaaaagaattattgacaaatataaatcattaactttaaacgagggggaattaaactaaattgtgtgactcactagattatctcattctataattaccataaagcaggaaccataaacaaaaaaaatcatccattgaagaatatttttaaaagaatgaattttagatgggtatcacaaatgttatcgtagacttaaatctcctaaaccaaaaactctacactattaatactgtacagctaaaagtctacaattatgttaggatatctacactatcctaacgtaatgtttcaatcattcaagaaggtttcgaaatcgattttcaatgtattgtcttgaacagacgagggacaaggcaaggttgagtcgtccaagagccagtcttcaaactcggacaatactctatcgttacttcttcctgattgttgttgttgttgctgctggaccgccggaggattaggagtcatagttgggactgcattcgtctgaacattagcagaatacatattccggctaaactgttttgcctctttgctctgagataccggcacagttgagatagaaccagtaacaatccgctgtgcattgccttgtgaagccacgggaggagcatatcgggtaggctgcgagccttgtgaagcaacgggaggagcacagcaggtaggctgtgagccttgtgaagccacgggaggagcaaagcgggtaggttgtgagccttgtgaagccatgagaggagcataataggtaggttgtaagccttgagaaatattctgtacactgttttccggaggataaacgccattacttggccgtcgagtcaatacatatggattggaagggacaacttgaggacttggattaccattattagagccacttttgtgatttggtaatgactgcatagcgtgaggttgtgacccaggattttgttggacggttcttgattgctcggttctatgaccgggtctagtgtatgtttttgggtgaattgcaaccttagtagatttggagcaagcccggattcctaagttggttccagacgagttttggagcaacggtacaggtacatatacagatggacgccgtggagcacgtttaaattgtaatttggccgaagcaggtttcgaaacaggtcgaggtaacatatttccagttctgatgcattcccgttgatcattccatgtcttctctttatcattggcatgacagtgatcagtgttagagatcccgccactgaaccagtaagtacacggagcacgggtgtcacaaacataacagtgacactgtaaagaacaaaaagcaaaacaaaaaacgtcattagcaagaaaagaaacatcacttaaactgtctcaaaagattcttagaaaacaaaagaacaaacaaataacttcacattcttaccatctcacaaaacgtctggtgtaatgtggatttgaacgggtacttagcacaagcatgtcgcggatgcggaaaatccctacaagctacctacaaaaccaaaaagaacttacttagacatgttactacaaactgtataaagatggaaacagagcaaaatcaattccaagatttcattctatacacgatgaagaatcaaatcctatactaagtggctgcatatactaaaacttgacatataaactcaatttactctctgaagtagaagaacattgattcctacaagagtccccaagttaaaattctcgtagacaatactcaaacttaacgaaggcagtttcaaaatttgagtaaattagtaacaaattggggcgaaaattcaaacaagtggaaaagatcaaaaatttacctcacccttttgtcctactacaagaactccatcagtttcacaagtttcaatcacagtctccttcgccgtaggatcaaaatccaaaatcacacaatcgtcatcgtcgtcttcattctccaccgttggattcaacaaaacagtacctttgatggggttcttctcatcggaaactcccagaattcggtctaacaaataagagtaatcactgggttgatcatcatcttcgtcggaactaacatctacaacgatatgattcatggaactcatcggaactcagacaaaatttcgctcataaaatccagtcgaaattcagaatgcatgtctcataaagatagaacacatcaatcaaaggagggtttatcgggatttcgtttcccttcgcttcagatttttcggaaagtttttgatttactagataatagaaagattgaattagggttttgtatcgaggatgataggaattaaaaaaaaaaatgtacatttgatgatgagggtaaatatgtcaattattttaatagtaaggccaggcccaaatctaataaactaatctcacatacccaatcccaataacttcggtcctctcaatatatatgtttacaaaaaaaaaagatacagtaaaatcgaatgattgtggacacatgaatagtaaaaacaaattttactactttcaactttgaggaagttacaataaaagaggatttgataagtttattcctaatagcataacaatgtccccctccagtggaaatcgttgaaaataaaggactttattgatcgaaataaaaaagatagtgggtttcttttgaaatattattaataatggtcgttgcgtgtaaatttggaggcatgtttctgtataatctgccatgcttcagtgacatgcttctcttccgttaacggtgcaccaacagcaaatcgtaaaacgaattttccagatagagcctgttgatgataatatgtttagttaaatttcaatttccatgtaatatcttataaaataaatcagtactcttaacaaaaaataatgatataattcattattgtcattatatctttatacaactcaccgtgtgagagatgaatatcttgccagtggagttaacagccgcaagcagttcacggttacgttcgttacattggtcttcatcgccgtcaactggcgcaaggcgaaagcaaacgagtgaaaagtaccgagtagtgacaacctttacattaagaaacaggaaaataaagtgattaaactttcgttacatatgttagtaaattaaagaaattgacatagtactaattagccttggttataaaatagatatgatgttcaatgatgttctgaaacatttttcacatgtatatattacctcaaaacttggatcttgagctacataatcttcaaaatgcttagcgagattgacatggtctcttataaagtttcttaagttctcggaaccatagagccgtaaaaccatccataacttcagtgatctgtacaaaataaatgcgtgtacatataagtttgttagactaataggaccagcaaatacaacatcaaatggacttataaagaacctgaatctccgagagagagaaatttgccaatctttataatttacgaccgtatcttttttggaaacctgacatttccattgaatcaaatataagatcatctcattcaacatatttcaccgtcttaaaatatacattgctaacgatttcaatattttcatgaatgatatatccattgagatcttagtaaaacttgttagtttcttattgtcattttagttatatattctacatgtatatgataacgcttctttagatcttcaatatagatagatggttcttttatgtttgtaacaaaatgatgaacatgagagaccttgaccttgaattctagatactcgggatttgttttgagagcatcaatgagagagtatcgatcctgattgattccaatatatacaacacaatacaaaaaaatactattaatgaatttaaattgactaattgaacaataaattaagaatgagataaaaccaacataccttaacccaaagaggtgaacaagtttgattagcaaataaccatttatgagcattcatgttaaaggagtctgcgttttcaatcccgtcaataaattttcgatattctggacatatacatgcattccctgcataagctgcatccacatgcaaccatatcccatatttctacacaacatagtacaacttttttttacaatgacatgtaatgtactatatagtcttaattagtcacataaccgaattaaatttatttattcaaatgtctatgttttgtgcaccaaattcaaatgtctaataattgcagtggttgaagcagtgtgatcaatacggtggatgaagttggttaaaaatttggttgatgcagtccaatatttattgtatatgtgtttaattacctttgcgatgttccccaatgggaccaaaggatcaaccgctgctgaagacgttgtgccaacctgaaaacccggaacacttatatatttagcaatggacgaaataaatttatgaagaggtatacaatatatgtgtgtaaatgttttatcttcaacacataaatgtggtttttgagtaattattacagtggcacaaatgaagaaagggataaaacccttagcgagatcatgagaaatagcttcctcaagtgattctggaggcattccatagtttgtggaagaatcagttttgagcagcctaatgttttcttcatgtatcccaccaatctatgaacatcatcacagttattaatcagtgaattgttattgtacaaaagtaaattaaatactataccaaccagacaagcttttcggaaactagaatgggtttggtcagagccatagacaacaagttgaggaagtaatgttttgccaactttcttcagaattctgtctctagcagctaatactaccacaagcactgcttcacatcctgtcccttggattactcctcctccatttccttttcctatcattcattgttattaagtcattgaattaaatgctcgcttgtacaaatattgttactatttatttttattttttatgcagcctttttttttttgactatatacggtcccaattgcattctctattaatttgatataattttatgtggtcacaaaaacgtatggtcgctaagatacagtgacgaaaacgtagattgtcatctatatgtaaatttaaaatagtggtaaagtctttcaatctttaagaagaattagatcaaattaatgaataatgacgaacctgtggagagaaaatggtcggggagttgtagcaatttagcaagccaatcaagaacgatgatttcgagctcagtagcggcaggagaagtgagccaggtaaaaccgacgacgctcaggccggcgttaagcatctctcctaagaatccagccacactcgtgcttgatgcatagtatgcaaagtaactcgggctttgccaatgagttatccccggcattatcttcttcgaaacatctataacaaaaagtttatgcaacaaaattaaaatcccatttaattaaaattatataaatgtgggtttgtacgttcatgttactagttttgctataaaatagaaatatgttacgtaccgtcgagaagttcttttaacgattcaggtcgttcaggtgctgaatcaggcaacatgtcacggagataaccaggctgcgacccaaaatgtttgttatatattaaaaacacactctaaatatgtatacacacacaaataatgactggttacattacataaattgtagtgaaaagttcagaagttaagaaacctgaacttgggacagaacagggaaatcttgaggcgagtcttgaaggtttttgtaataatcagcaataaaatcaaccattatgtgaccttgctctctcagcaactcactgtccattggtttcatctttaccaccttggctccgttagcttttccgttaccattaacgtggccattgccgttgtaattgccgtttccgttggtgtggccgtttccattggtgtagccgttcccgttgctgtagccgttgccggtaccaaattccctgtcatacatatgttggggtttaaacatttttattatatttcatttgtaacacattctgaaaaatgatggagattagaggagatgcttacatttcgaaaggtagtggcagctgttgaaagaatctgtatgtgtgttattaaagaagctttgtgatttgcatcactcaatggtctagcgtttatatagtataataagtcactctctatcatagaagctgtaaaattttagcataaatataaaatatataattccttcgaaagaattgagatactcgaagaacacatgcgtacatctatttttgactttggtaatactatttttgacttaagaattgagtattttcttgtttttctatttatggttatttgttcaaaaatgatatactccacacaaattaaactttataaaacatttaacacatgtatgcatctaatttttttacttttgtaacgttctcgtaatttttattttgatagtttcttcttcttctttttattagccaacatatgctctatattaaccaacaaattaaggcaaagtgatgacatgatgtatgattaataatttttgtcattatgagtcacagacatacatattttcgtcagcatgggtcacattaatacaacaatgtctttactttaccctggtgatagtatttaccacacacttgttcgttatataatgttcacttttacactatcatgtgtcaacagtatattattctctattcactgttacaaaacacttttcatcgccaccgttaaaacaatgtacccccgaaatgagatagtattccacataagtagttagttaaaataataacgtttttgtaatttcttctctaaaatgacagctaaatgaaagtgcatgacatcaatgtagtaagaagtaagaactacctaattgacaaatcaaatcaaagaagttattgaagtggcaaatttacaaacttgaaaattgccctctcaacaaattttctcaaataaagtaatggacggttggaacagtacaagccttccacaaataacaacacaaggcactaactaacttatcagacaatgatacacattcgtcagaccagtctttatctcattcatttattttatcacattgtattatattttaagattaatcatatataaacatatatataggtgttaatattgggatgcatgaatctcaaaaatatatatttttaatctatctacataacttagaagaaaaataaacataatttttaatagttattcgtacgaaatacacaatgattatttgtatgttttctagtaatgtgttattaacaataaggaagtgaggaatctatataaattctacatgaatttttacatggaatcatgaaggaaaggtggtttagtaggagtgggcaatacaatatctgtggaactaaccatttgtataaccttagacattgttggacgaagttgtggggactcttgtgtgcacaacaaaccgatctgcatcactctcttcacttcttgcttatctgtatcttctcccatatctttgtctatcatctcttccatcttgtttgaagcaaaacatttccaaacctgttcaagaaattaaaaggttagaaaatgggttatatatgaagggtcactcggagagttaaagattgatgtgatgaagatggagactcacttgagtaactaaggtttcaagggagttatcagaccggaacttattgtttcgaaaaccgctggttatttcgagaacaaggactccgaagctataagcatcgattttattgcttagtcttcccttgctaatgtattcaggagccatatatcctctgtaaacaatgcaacattcacattctaaatcagaccaatagtaaggacctctacgaagttctttgtgttgaaaggacttacagagtgcccgcaattgaagaaggagaaagagaagaagcagggatgtctttgccaccttctggataaaacttggctaatccaaaatctgatattttaggtttgtactttaagtctaacagaatgttgcttgctttgatatctctgtgaatgatcttgcacgtttcgtgaagatactctaacccttcagctgttcctaagattatggttcgcctcttcttccagtcaagctctttcttcttctccgggtcttcatttccatgtcaaggaaaaaatgtttagaaacttttcaaacaagtaagaagatatgtgcgtgattagagaagagtgtcttactaaacaagatatgatcaaggcttgtattggcgaggaactcataaacaatgaaactattcatgttagtgaagcagcaacctaagagcctaaccaagttcttgtgttggcatctactaatcacatctatttcattatggatctcatcccgtggcttctttcctgatacatgtagtcgtttaatcgcaatttctctaccgtcagacagagttccctgtcaaaaagacaataaggatttttaatcaatcaacatagtggtaaagtgtaaagaaagatagttatacagagaagagagaaaccttgaagacttcaccatatccaccaacaccaagcttgcaactctcattgaagttgttggttgcttttttaagagttgaatactcaaagctcatcaagtgtgactcagtacatattgactctgactctttctctatccttagatgtccaaacaaatgaaactttttagtcttagttcctttatgagcacaatatagtcttgtggaacttacctttaatcttcttctttggactagttcgcatatagaagcattttccacaccaaaatccagctgcaatagccaacacacccaccatggaaataacaaatatatacgtaaggttttctttagtgaagcctacaagaaaaacatacaagaaatgttatgatcataatacaaacggatcacaatttttacaaataacacaagtgttatgagacagagacagagaaatactcatagcaagcaatccacgttcattatagaaggtatagttagagtaacgcaagtagcatcctgcattcaaggcaaaaccttctttggatggtaagcagctcgtaaccgataaagctccatctgctaagcataatttgcacaactcatcatttagcgttcgccagcatactcccaacccgtaaaccgttaaatcccggattcccattttagccaccgagaaacctcgactatatggagccgcctcaacaatggatttggtcacttcctttactaaacctttgaattctgcagacttctccttatcactagcacatatctgcatt

SEQ ID NO: 38183 - DNA, 4070 bp, Arabidopsis thaliana landsberg
acaaaaatcgatagtaacaaaattgcttggaatataaaaattacttggatttgaagactcatgatgtactcgggccaatgctgtgtttgatagtccagagagcaagagaaaactcaaagttagtaagccaaccacgtcgttatacatttttctgaagtatggtcgttttttttggcgggacgtagttttaaaagcatgagcttttgaaatgtgaattcatgaatatatgtagagaaatgaactcacggtgagatgttaatatcattgatttctattttgtaataaagataaggttacgcgaacactcctttattctgtgtggacatcgtgtaattgactcttgaaatgtatcaagtcttcttttggagaacaacgtatttgactactttccaataccggtatctttagtttaagaatcagaattaaggttgtgcatggtttacttgttattttctttatactgtatataacgtttccttgtgtggtcaaatgtaataaccctaccccttttcttcattcatgcgtatgtgtttgttagattgagtgacctttatgacgcctagctttatcatgaatctgcggctctccttctgttcaactcatgattctattggttataatgtcacagctagacacagatgtcctcgcagtttatttcatttcagaagcaagtttatggttgccgtttcctcgcaagagagctttccacggaatgttttcaaaatggatgggttttgataaagggttttgtgcaaaacaaattcttcaactcaccaatttttgcaaagaaaccatatataattaatttgcgcttgtagctcgagcaactcttccaatttcgattgtgaatgaagcatcaagcaaactctacatgagtggtaacatagtccaaacctgacgcggataaataacattgaaaaatcaaagttcacccacctccactttattacaatatgtaggacataaagtgtctttcgttagactttgtcaagctaagtttgatctgccactcataagctattggaaaggcatccaccataaaaatttaaggagtttttttggactccttgatgctttccaatttgcttagaaaagatttggaaattaaggtttttctacatactcactaagtcacaattgttttaaaaaatttaatttatcattgttgactttgaaaaagtgaatgtgacgagaataaatagaacaagatgagctaggaaaacaattaagagatttaaaaagatgttaaaagtgttatattggtaaaaatcaaatcctctatcgtctccaccaatcaaccccacaaatcttcatccatcttgaaatgaacattaacaatgttgatttttatcaacggtttgcaactgcatgcagttgtggaattgccaaatagtgccatggaaaatatgtgcataaattaatttcaagccatacttggtttgaataagcatgattatattacatatgcgtttacaaatttttgaataaaatctgcaaaattcgaacccccatatcaaatcttgaatatcccaaagtataattcagtagaaaacggagatttactttgtaaatcataaagatattctgacagtacataattattatatatttaagtcggattaacgatgtttagcttcatttttcaagaattctaacatgaaaaattggatatatatataggtctcagattcttacatgtgaattgtgaaatattgtgagttggagaagcgtgcttttgttcaaccgtgcgctttacgtaaaggtatgtcattggtgcatgggagcctttaattttttactgtaaaaatatctcaagtgacccgtgaatctaaagattataaagattacatatatagagaaggctcgtttgtctttaatatacataaactagcaatatttgaatattcatggcatgaccccattattgctatataaaaagagccaagtgtccaattcctgatttcagatgaagtaaaagacaaccaaatatgagtttatgctctgatctcactgagaaattagacgaggagattttagaggacttgacgtccaatgtgaagcaaatacaagacaacgtattggaggagatactcacacttaatgctaacacagagtatcttcgacgttttctccatgggagctctagtaaagagcttttcaagaagaacgtccctgtggtgacctacgaggatgtgaagccttttatcgatcgtgtcacgaatggagagcccctctgatattatctttggcaaccccattaccggattccttctaaggtatatacttttcatttcctggcttttttcttcttttcaaaaattgtattagagcaactttatcattggttattatacaatcaatgtgagtgatgttagaaactctagagattatgtgctctaatggttttcactgtagtctggaacatcggagaaaacagaagatgtttcctcgtaacaacaagtacttggaaaacataaaattcatcttttattaccgatcgctcgttataagcaagtaatgatgataacacaacatattcttttaataaaacatttttatatttgtagattattgatgaaagtctcttttggtgtcatgataggcatatagatggtcttgaacatggaaagggaatggtatttaacttttgtacatcagagaacacaactccttctggtttgccatcatcagctgcatcgacgagcttcttcaagagtgattatttcaagaaccgaccatcatattggcattggtcttacacaagccctgacgaagtcatattgtgttcagacaccaagcagactttgtactgtcatcttctatgcggtcttgttcaaagagacgatgttgtcaaggttggtgccgcctttgttactattttggtccgagcaataaatcttcttgagaattcttggaaggaaatttgcactaatatccgttttggtcatcttagtgagtggatcactgatattagttgtagagactccgtttcaaagattcttggagagcctaatcctgaattggctgatctcatagaaaatgaatgcaacaataaatcatgggaaggtatagttccaagactttggcctaaagccaaattcatagaatgcattgcaaccggtcaaatggctcaacacatcccaacattggagttttactctaacaagttgccattgatttcctcgagttacgtatcttctgaaactatgtttggtattaatatgagtcctctttgcaaaccagaaaatgtatcatacacatttctgcccaacttgtcatattttgagttcctacttgttgatgccggtgacaaaaccgaaattgttgatctcgtggatgtcaagttagggtgctattacgagcccttggtcacaaatcattccggtgagtacttaggaaaaattattgatatatatacatacactcgactaatcgattaattatattgtttttgtttttgctaggcctacacagatataagatgggtgatattttactggtgactggattttataataatgcacctcaatttagatttgtgcgtagaggaaatctgactctaagtattcatttggagataactacagatgaagaccttttaaacgcggtcacagacgcaaagatggttcttgaatcatcaaatttgatgttgatggacttcacaagctatgcggatatttctactactccgggtcattatgttctttattgggagctcaaagcaaaataccgcaacgacattgttgaaatcgataagaatgttttggtagaatgttgctatgtggtggaagaatcattgaacaattcttatagagtatataggagtaaaggtggattaattggagctttggagataagattggtgcagcaaggaacttttgatgctctcatggagtttttcatcactcaaggtgcttcttcaactcaatacaagacacctatttgcatcaaatctactgaggccttggtgattttagaataaaatgtccacgcttgtttctttactgataagtccctttcaaagacatattcgtcataataactatattatgtaggcattgaaataaaag

SEQ ID NO: 38184 - DNA, 2363 bp, Arabidopsis thaliana landsberg
  unsure (1)..(2363): unsure at all n locations
taacacattccaggatttacctatcacgtattatatttagtcttatttatttaggcgtttatgtatctatgttagtgcaaaacatctttggctataggggttgggagcaatcctctacgcgtatagaggactaactgaagatggacttggcttgggcttgacctgctggtggacagaagaacatgaacagattgtatagtcgcatgttgatggaacaatttaaagccggtttgcaattttgcagatggacttggagtgaagccaagctggtgtagactgtctggtggaggaagaacaggagcagattgtatagtatcaggttgatggaacaatttaacgccggtttgtaattttgcagatggacttggcttgaagccaagttggtcttgaccgtctggtggaggaagaacaggagcagattatatagccgcatgttgatggaacaatttaacgccggtttgcaattttgcaaaaggacttggcttgaagccaagttggtcttgaccgtctggtggaggaagaacatgagcagattgtatagtcgcatgttgatggaacaatttaaagccggtttgcaattttgcagatggacttggattgaagccaagctggtgttgaccgtctggtggaggaagaacaggagcagattgtatagtcgcatgttgatggaacaatttaaagtcagtttgtaattttgcagatggacttggcttgaagccaagctggtcttgaccgtctggtggaggaagaacaggagcatattgtatagtcgcatgttgatggaacaatttaaagccggtttgcaattttgcattcagtttaagagaaaaaggctgcctcccggcattagtaaagtcagatgcaataagaagaagagtgaccaccattgttagtgtagagagcttcaccatgatcatcttcatattttaatttgggattganaatgtttattctacctttcttatttatattattgtgaaaaaattaacataagcaatatattaattttttgttgactataaatttatgtatttaccaaaagaaaaacaaaagcaatattatatatttttgactggaattatatgttttaaatatatcaatatagttatatttgttgaatttatttactttttgtttaccagaattatatgttcttaccaaaaaaaacataagcaatattatatattttgactggtattatatgtttatgttttaaatatatcaagaaaaatacttggacccttaaattcatcccctttattttagccaattaaaatttgacacctaataataataaaaagaatttaatttaattataaaatctaatttgccacaaaaacaaaattatttatcggcttgggtttatttgaaaaggtcagggtttagattttacaattaaacgaggttaaatatcggtttgggttttagaaagtacgattaggatttagattttataattaaatttaaatgtaggtttggacaaaaaaaattaagattaagattttataattatttatttattgatggcagattatgattgactgaaacaaaaaaaaatgaacaagaggattaatcaacatatcaaaaaatcatattgactataagaaaacatgcttatttaagctaaaatagattcattgaatttgtttagaaaagatcatcagaatttattaactcctaactacaccaatcgcattaggaaaatttccaatcaaaattaaggaagaattcgagcagactgactaaatcaagtcctaagaaaatgtgatttatagtatctacacaaatgacaaaagttcatcaatatactgcgacaaggaaaaccctaaaaagttccttcgtacgcaagaaaacataaagaaaaaggaaattcgaaaccctaactcattaatcttgatcttcatgaaagcggctaagtcgtggccggaactcaggacggcgatggctatgaagagacgacggtttatccaaattcgctgctaaagatctcctaaacctctccgcctcaacactaccgatcttcgctaacgaattcatcaacgccaatttcctcagattcaatccaacattaaccctaatcgtattatcaccacgattgttacgcttcgccgtcgaagaagctagggttttagatttctcatgttctaatcggcggtgaaaagagcaccggaaagaaccagggtgcgtcgtaggagagcacaaacactttctcttggtctgatgattagaagaaacggttacgacggatggtttcgggatgtttccgggagaataaaacttcaatcggagattgagattcttgttgcaaggagacggagatcgttgacgatgataatgattgttgtgtaatctctggaagaaga

SEQ ID NO: 38185 - DNA, 2359 bp, Arabidopsis thaliana landsberg
  unsure (1)..(2359): unsure at all n locations
cccaaagagaatatctatcgacgggtcttgattacatagaaagtgcgttatattggcattaagcaagtttccatcctagtttgttctttacgaaagtgtggtttatgaagttttgttttaatagtgtgccaaataccttcttaaaccgttgaaaaaatcataaattttcgtaaagtcttcagtgtaattagattttatgttttgttttggggttttttgttattcgatcataattaaatgttctcaatttggccaatgatttatcggctactaataatttatagcaattgtttatcatttgctttgtccggattcagatccatcaggcttgattatgaacgagaagattcataagagttcacgaacttagacaaagtacatacagccaatgctatgcatctgtttttgtctcggacacagatataaaattataaagctaagccattgaaaattgttagatttgttgattgattggtttagatagaaaatcatgatagtatttgaagaagatatgattggttagtgggcataagatttgattcgttaaattcagtttcttgggtcccaattataaaagaaaaaacatttgcctttgtcatttttgtaattgagcatcaattattgtggtgataacattcatgattgtaagaatatcacatataataaaaattcaaacttctacatatatagtattaaataattatatatataaatgtatactatagttgagacttaaatacattcgggagggttaataccaaaacctaagattttaggccacatgccatacttaattatcctacttacttcttttaaggttttatgaagacgctttggaacttgatctatttgctttccgtctttttatttgtgattacataattttcctagcaatcgagacgagagccttgtgttacctaattcaaaagctaaactcaaaaccctacaaacaaaactttaaaccataattttttaaagtaaattataagtggttttcacaaagctagaaagaaaccacttatcgctatatattgtggtagttgatataattttgttttgtttcggtttaaattgctattgaacaaataacccatacataaatattgcgaaaaaatcaattataagaatacattggaatgaaatcaaatctgcttatatgtgactttgtatttaactagtcggagacaagtcagagaagtgctttctaccatgtctcttaatgtttgtcaattaggtcataccacaatgtcttgttttcattatccatgtccatgtggcatttataatagctgaataaatcataaataaatccaattttatgggcatggatatggctataagtaacttagaagtatcgaaagtccaaaccagatctcattatgatatattgtttaagatttttgtgaaacaattgtattctagtactcaactacttagacctcattgatgcatctcgctaccatgcagattatggtactaacacaaatgactacactaaatttacttgtcaactaaagctatttctaaagatagttaagagagaactatatacaaaatgttgccagacaaagacatgcagcgtactgatttgagttactctttaagacttcctttaattgttgacaaggacatatttttagctaaaagatatttctttcaatactaaaaatattttgcccatatatatagcatttaacgaaaacatgaaatcttacactactgtgtatcgggtcgatccactgaagagtatactcatttttcttcacatttaatttttgttttgtagattagtattatttctcaccgacctttgtagatttactaacagttgttctttaaaactaaagaaaacataaatgttttggccacccaaatttccaaattttatctatctcaagtttcaacaatatttcaatgtagacgtaactgtcaaccactttgaaatgtaagtaacaggtgtcagtgagaatattgtgtcgcaaatgtcaaataaatgaatacgtaatagttaaagattcatttgatcggggcttactagtttagtaggacccttacaataaattagataaaatcatttatgtgaccgctaaaaattatacgtgggagaggattttttttgtataaagatgggcaaaagtagggtatgcattgttcatatagtgttccctttagactaagaaacatacacacaagtcacaaggccatgttctttgttaggtgttatattatccgaggatgtgaaaatacgagatgtcgggatttataattcccctaatgaatccaaaactntatgtatagtttactgttcggagtttattgaatgtcgtatttatctaattttctgaaccaattcttaacg

SEQ ID NO: 38186 - DNA, 2619 bp, Arabidopsis thaliana landsberg
acatgagcttgatagtttagtacttataagaattaaatattcacgttctaatattaccataatctgctgaattttctaagatgtgactgaaagcagagtatatgtcaatgtaaatgagattggaattgggtaggttttttgccaatgggtccaaaaggtgggagagtttgacgttgaaaagctgaaaaccatagttaatatctggagcccactttttacaaaaacctcttttaaaagtcctataattgggaccccacccaatggtggtggtcctaaaaccgcgatttggcttggtccatatatccataattgctgttcaagggtatccatatagataggggattgggattaaattatttacgctagtccagtaaagaaaatctttgtaaggaaattgtaatttatgtatgtgtgggtaccctatattaaacataatcatgaacaaatttagtttagtttaaaacctttgtgaaacaataattccttttgggagtaatttcacattttatcccaaaaagaaaaaaacgtgggtcatgaccaaattcaatattggtggttgtcaagtttatgtacatctagttatctacattattattctattgagtaccttagatctcttttgttaaaaattaaattcgttacatcaatagctattatgtgttttactaagattatttttgttttgaacaaaagtaagattatttttaagaagcagaactaaagtcctaacttttaacaagttaattttactacctttgacaaatgtcactttttaatgttaaatacattacatgcaaatttttggtattatgatagttttggagtgtcttcttaccttacaataaatcataatatatagttttgaaatcattgaacgtattgcatgaacttttaactttatttggagtgaagctatatgaactctctaaaagaaaaagatggatgagttacgtaccataacaaaacttgccgcggaatttgccatctttgaagtaaagtagtggatatcatctttgagcaattgagcaccatgaccataatatgtaatagccaaatcgttgctgcctgcgaccacaacggataagcccttggctaacagttgatccgtcttctcttcccctactaacctctttactctcgctatgtgtcgttggaaatatgtcaattgctccaacattgactttactctctgtttatattttacccaaatgattaggataaatggttagatataaatctatatgtgattaattttcatcttacggatattttgggagtcaaatggtaatagccactaccacctgaagcaaatgatacacccgtgagaagatcttctagttgtacattggggtcaaaatatgctggtacaattggttttactcccaaatattcagctgtaaaacaaacataaaatttaacatataatcataatatatactataacctagtatattatcaatctatcaccaattatgttcaaagtcacataatacatgttatgatataaacaaatcttccaagtccggcacaaaagaagaggaaagaaagaaagagagggagagaaagagtacgaacatatataatcggaaacgacctttccgttgctgaatctaccagttgcaactccgagtggaaaatccttaccataaggactaaaattacatttcatttctgttgttagattattattatttcctgtatctatgatcgaatccccaaagaaaaacactgccggtgtggttttgttatgtggtgatggagatgggccaggtgatgggccggacccagattctggcggtggccatggccgtagacgtcggtgatggatcacttgggaataggtagtggtcacgaagaagctacgaaatgatgataaaagaaagaaaacaaatccaattaatatcgatttcatggttcttctacacctatcatcaatctctggaaaaaaagcttctctaacaaaaatataaagatgaaataaatgttaagatactattttgcatatgtttgtataccactaatgatgtcattatgtatgtgtgtacatttttaatctctgtttggaattggacatgcaatttttgtgccgtattaaattaaagttgcgtacgtatgtctcaaggcttcttttatcacacgtttcaagaatttccttccattaaatttacctacgtttctaaattagtatcctcagaaagcgaggtatttaaattatttcgcaatgataagacttaagagtaacaaatatgatcagatcagtacatttttgcttatattatcttactagtgatgggtatttagtatgatttatcatattttatgatgacaaaatattggatatttgaattcatgtaaaaaagtagatgaagtttctcttaaaatcgacttatagatatagtaaatacaaggtttcggacatgcgaggtatgtgaaggtgtgtgaagtgtctctttctgatcacacattttcgaacctcctaatatttaggttcttctgcaggtaccaccaatcagactcaactctttcgggcacttctggttttacggactactcacgagcatgggacggccatcaataaaagactgcgaattcttgctatatccccataggactcctata

SEQ ID NO: 38187 - DNA, 2520 bp, Arabidopsis thaliana landsberg
gctacgttattgccattattggaacatgtttggtctcatcttcttgacaagccttttttgtaatctgattggtttcaattgccatagcttatgggccagttttagcccaaagcaaacctagtcttaattaatctcgtaggtctatttgaatgagtaaaacattttatcttattggtacatatgcaattttggaagtgatttttttcttctaatgtggtcacggaaatttatgtgcattgtgtggactgattaagcaattgaaaatagttttaggttaagtagggttggtagatgaagttaataagagagagagaagatgaaacttgaaagtgttagtggaaacattgatactgtaatttagtgggttaaacaaccagaaagaaatagtagacttaaaactgatttaggatgatgataaatcatgtaaatatttgttttatgttgtttgttctggtttttatttttgcgttaattgatgaaagttggttgttgggacaatgtgtaggtaaatgcgggaaaaagataccaaagagggtggatattatgtagggtatttgttcattaatttttctaaaattttgtgtttatcaagaaaataagttgatttttgtttgactaaaggaattttttgttggttatatgttttgtggttgtaaggtggtggacaaaggagtctttgttttagtagacgagtgggactgctcatatgatgggtgttgggatttcattgtggaaaagaaatgtaggacacgatgcatttaaatttaggaggaaatgatctacaatgtgtcaaaatggtatattgagcaagagtttaaggttgagggaaaaattgttgaagtaaaagtatcgtattggctaccgagtgaaaatgttaagtgtttttttctaggaagacaccctctgtctccatcaaaaacgacatagaacagcaaacaaaaaattatatatgtagtgacgaaaagactaaacttctttgtaactttaaaaaaattgttgtgtaatattgatatttggccaatatacgtaaatgaaaacatgccatgataagaaaactatttctaggcttgaagaggggtcacatcatatataacatggatcggataggacttgaaaaatggtggcgaagctgttgtcggataggacttgaaaaatggaggcgaagctgttgttgttgggggaatattcaacaaattaaaatctgtatgaaataatttaagataattcacctaaattccatttggagcattaagagatggtgacttgaaagcggtggaagcaattgcgaaaaaggtcacaacaaaaagataaatgtggaaaaggaatgataaagttacatgtggtggtaatcttgaaagtgaaatagattagagtaatcaatgtgaaccttatgggacgtgaaaggaagatgactatgattataagttttggggtgtgcattactcggtaaaaatatgggttggtgcaacaaaatgaaggagttaggtttggtcaactcgtcctactacattagagtaacttatgtttcttaaaccataggtgaaagtgtgggtggaaactatataacagttgtttgatcgtaatttgtgtggacaacaagtgcgcatggaaggtgtatgggcacataatataaggtaggtatgagaattgagaacatataagtatgcaaatggaaaaatgagagcaatgactatagttatctctaatattgtattagactagattttaacccgcggtacaccgcggaaacaatttattttttaaattaatatatataaaagtttgtaaattttatctatctataaaatatttttattgtatagtttacaattgttattaagtaacgtcctgccaaactcgtccggccaacccgtcctctaaaaaaaactcatttattttattaatgttgatcttatttatgatatgtttatgaattattgtctaaatattttgtaattttgtagtaattaaatgctatcaaatatctctacggtttgatgattataatcacgcagaaaagcaatatcaaaaatgataattttgtagtaactaaatgatattaaatattttaaaagttttattttagtaattaatcgtgtagttaaggttgagagattttgggaagattgttaaatgtcaaatatttaattagaagattttctttctaattatcaaaaataattattaaatgccagtgacagccgctgtaaataaatcccaactccaggatttatttcacaaaatagctgcaaaaatgtgtatatagatgagctcataactctgtgtttcagtttcatatatgagcgcatgtcatgcaaaagataataacatattttcttttgtcatcaccatcatcgaaattatggactttgacgtatttgtatgatatataaagcaaaatttatgtcagtaaagaaaaaaatcaacttggaagactttctaagattcgttatttaatttattttttctttccaattacaaacaaactttgcctctacatgaatcaaaaaaccgtaaagc

SEQ ID NO: 38188 - DNA, 2253 bp, Arabidopsis thaliana landsberg
taatcttttacgggtatcgtgaatattattaagtgatcttcctctttttgtataaatttgtataatcagccacatgaggaagaaagagatatttctcttactcaacagaatatatgatcagacaatacttctttatgaactcactaaaggtaagactataatatgatctagcattgggacacacaaactttgggatgctcaacattacatgtttttaaaaccaagacagtaaacgacctataattgtgatggatacaataagtttgttttttactacatctctagccaaactgagagacatagttgtggcgatcaaaaaagtatgacagttttgcgaaaactggatcttgtttaatatcaaatctttaagtgaaggtcatgatgcttaactacccattaggtgacccttccaacaacaaagtagtgatttttgtcctaactcctagatgattattaattacaaaaacagtaaataaaaagtactactatttctaaattttcttataatgctaaaactttttctttggttaacttaattaaaaagtagtttaaaatccatggtaaacacaaagctaaaccttttttaccgttttatatcactagtaatcccattctaccaactcgttgaatacttagtattggtacgcatggtaagatcagtaacttatatgaactaaaccattcaaagcatgtaaatggttgtcggcaaaacaacaatactatttcttttcacaagggaatatatacatcacctccctcttaagtaaagctagtcgaattgaaaacacaataaggcccagtggagaacaaaacaaaagaagaataaaaaagagaatcagattcgaaattattgttattgggcctaatgggccttttctttttccttctttataattccacacaacaatcctctcattacacacaccaacgttgattcttcttcttcttcttcttctctctttctcatctaaaccaaaaaatggcagatcagctcaccgatgatcagatctctgagtttaaggaagctttcagcttattcgacaaggatggtgatggtacgttgttgtttttttctctctccctctcgcaatttcaaatgtttttgaatacataggattttgctactgttggatcttggtgtctagccataactgatttgatttctgttcttcttgttgattcaattgatctgtgtcgatgtagataattaacggatctgtaattcgtgatctctagactcgttccttgtttttcaatttttgttcgtttggttcctggattggatttgaatcgaaatttggatgattgatgacttggagatttgccaatttgttatcgatttggatttaattttccatctgaattattttatctcactttagatttgagaagttaatgactagaaactgttaattgagaagtttgggatctagctaaaatgcttctctacagagaaacctgctttgagtttcgtaattgaagatatttgattgaattagatttacagagaagtgaatgatgaacaaattcttgatttgcttgtaggttgcattaccaccaaggagctgggtactgtgatgcgttcccttggacaaaacccaaccgaagcagagcttcaagacatgatcaacgaagtggatgctgatggtaacggtaccattgatttcccagagttcttgaaccttatggctcgtaagatgaaggacaccgactctgaggaagagctcaaggaagcattccgggttttcgacaaggaccagaacggtttcatctcagcagctgagctccgccatgtgatgacaaaccttggtagaagcttactgatgaagaagttgatgagatgatcaaggaagctgatgttgatggtgatggtcagattaactacgaagagtttgttaaggtcatgatggctaagtgatgctgttttagaaccaaacaatggctctataaacttggtttgcatctcttacatataaattcttatgttatgttctataatttttattcatgggactcgaggtatgttttctgcttgtttaagacgcgaatgttttatcccttttatgctctattttgcgtctgaacattttcaaaagtcttgtttttttgttgtcttgctcctgtaatttgtaaccttggtctagttcgcggttttttattaatggtgtctctctagtaaagcattgtatcatggttttgtgaaacgcaaattaggtcctatcaatgactaaaaaggtaaaaaacgtggtgtgc

SEQ ID NO: 38189 - DNA, 3618 bp, Arabidopsis thaliana landsberg
tctttatctagaacttgtagtaagcgcaaagtcccacccccccccgtcaagatcaaaaaaggctaaagagagcgaaaaaagaagaaaagtagagtgtgagtgtgaccatgcttttaatctttttaagattatgatttcattggagcttttagagaattctgttctcattgctttaaacgccacaagtggccggagcattggctctcgctttcctcaagtaccaatatacgccaccggcaacgccaatcgctcctgccgctgaaactgccgtcactgttcctgttatcgacattttttccggttcaaatcaggtcacaacttacaagtatatataaagtcatatagtaataagatgaccacaaacttcatgttgtagttatagtaaacttgcttatttacctgcgatagctcctacgcgtttatggtttacgaggcttggatctgcagaatgtatcaaaatgattgaaaatacgtattagtactatctaatagtccctaccaaaaaaaaaactatctaatagtagttaaatagttctcaatagaaattgtagttaggacgaaaagatatgaacatagacattttgacctttgcaataagtagtgacattgccttgtttacaaaggcacaaaaaatctcgtgtcctcgtattaaacccacaaactccaccacctttagtcgtttcttggcaaagaaggcacttcattgtcactggaaattcgtaatcaacccttatcccgtactctggaaactgatcatacggtgcattctccacacctgtactcctccaatacacacttgtatacgtcgcacagtcctgcagcatgagcctaagagattgagtcgctttagggtaatacgaacaacaagaaaccctagatcccaaagcagagccacattcaggcaaatgtctgcatagatagctagaactatcgcaggacgagtcacatctatctggaaacctttcgcagaagagcggttttggttcgacgataactttatcggtgttgcagttgaagaacaagtagtcgttttgaggagagacagtgaagtgtgtacttgaatcgatgctaaaagatctagtgggtcgaaaattgtctcgatcttgacagttccacatgaatggatcggagacaagaaggtgaggatcagagtagcttatagatttaacagggtatttaccagatggtgttctaagttcgagcttggtatcgttgtcggagcaaatgagcatgtgtctgtaataagggctaccacaaccgtcgtcgatggaaaaagggtaatttatcggaatgttgccgcaagacgatctgcagagatttgattgggatgatgttgttgatgattgaagaaggatggtcatgagaagggagaagaagataatgtaagagtgaagtggagacattgttcaaaatttaggagtttagatttgattattgggtagtttttagttataaaattataatttggtggtgtgaagtgttgagtaagcttggaatgtcttgttaaagagtttaagaatcaatcttgtcatgtgcttgttaatattgcttattttaggtttcggtttgtttttaaaatttcacctttctttttagtataaagtattccaagaggactcgtggttgtgttgcagcttatttgaaatatttacaggcaatatgtcacaatatgatccattcctgtgtatgatatttcacatcaaaatttgttctttaacatgttatctaaaaaccatttaacaaaaaaaataaaatgtatgagaaccttataaaatacaaaatagtaatttcagtatataatagttgtgaattttcttttatttagaatttcgtttaaagggttgtgatttgtgaagtaatctttggaagataatctcaatgtaaacaacacattgggcttctcataggcccaatataaacaacacattgatcattatccatgtaaggtgaactctttaatcgaaaccgttcaatttcagtcatctcaatccaacggttagtattccaaggagcacgtaatccactctaaattcgtaaacacgtgatttctcactaaatataaaacttgatacgttacgccttcctatccatccgtcaacgattaaatccaatcgttcaatatagagatccaacggctaataacgaaacattagcccacacgaaatctcctttttttttttgacgggattatacagtgggcctccacctgtaattgtccatttaggagacagcgcggttaatttagcattatccctcctcacagtcatctctttcttcgcaaataaatgtaaccatctctcttctcgttttcttcaacaaaaatcctcatttctctgagaatctggtgctttagctttggtgagctctctttcttatgaaacttatcgattctcttctcgttgattgtcttatacttttagttctctgcttaatttattgtccttaatactcgtggatttgttcataaatcgttttctgagcagttaggtaagagttttgttaccgaatttcatgttcttcgattttgaatctggatgattgtatgatgtgattagtagactcgcttagattctgtgatctgtgtatggtttgtggctaattttggtttcatcggtggtatgaatttatttggggttttaggtttgtttgattacgtaatcggactgtttacttgaagatttatcgattatagttgtgatcgtttttagttgattgagaagaagaaaataaatttcatgctcttgttattgtcgcgattgtggcgattttcagtgtcttatgaatcaattatgttgcatgtgagtcttggtgcaattgagattgtttcctttttttactagattgcttgtcttattgaacaaaactttccatttatgttgaaaaggtttataggaacggatgtttagggttttgttgtaatctgggtatttgctttctgatttcggcaagcaaatgtcgatttcaaggtttatatcactttctctagcaaaagaagtctttagtcatttgcaaagtcaagagagtttttactttatttattgcttccacgctattgcttcgtggctgattgagagagaccaattaaactaataatttgtagtttgtacaatatattgcgtgtaacattgtccttcgttatctgtttgaggaggaggaccgagttagcctatttttagtcactttacaaattttcttttatgttgcatcattcaatatgaactctctgatataaatatatgtatacatactggttgacttttatgggtatggttctctgctttttttctctgtgatggtctcttgattctaactttctttgttttatgtttttggtttttgttgtcaatgaataggtaaaatgaagatatactctagaacggttgctgtttcactcattgtgtcattcctcctgtgtttctctgcctttgctgagcgcaatgacgggaccttcagagttggactgaaaaaactcaagttggattcgaaaaatcggcttgcagcacgcgtggaatccaagcaagaaaagcccctgagcccccccagacttggagattctggagatgcaaatgaaaatgtgcttaagaattatctagatgctcagtctatggtgcgttgcct

SEQ ID NO: 38190 - DNA, 1676 bp, Arabidopsis thaliana landsberg
taaaaatgtatatgtagataggtatcaattgtttttctaatctatatatataaagaggcacgtcctaccctcaacttacaaaacaagatagcagtctctgttccttctattcaggcccggctcaatattttattgggttctatgctacaaacaaaaatggcccttaaatctaaacaaaataaccttatgtgacatgtgtttactgtatttttattttaaacttattatcttttattttggtggctgttttctctgtagttttccctaaacaaattttgtttttgaaactagaagacttaaaaaagaaaaaaaaatgaggaccctgtgcttttgctcctatagcactcccctagagccggcactgtaaaaaatatacgtaagattttgtgcaatattcgcagtttttaatcactgaattaccataaatttgttagacatttttacatgtttcttacagtatattagatagactttgattctcattctacatctcaataatatataatatatgatatgaaagttggacagtaatgaaatagtaatcatgaaagtgagactagctatttaaatgcgggtcacatgcaaacctcgtccctgatcccatcaacagaaacatggccagtgtactgtgcaaatccacaaactcccaaacaacgacactgtttctaaatctataatgcgttattcttttttatcatggccaaaaagtttgtgcaattagttagctgtcttgtacgtatataataatagaaattaatgaggaagtatatatgttgtgtgttttgtcaagtctctacgggccacgtccttatccataaaaaagctttgtgcatgacaagctgtgtaccattttcctttattcttttgtctttctacttattttctttcaatagaatataaaggtcaaaacatttgaagtcttttatagtcaaagatcaaacattgaaagtctttcagagtcaaagatcaaacattttaagccttaattaaggttaaacattacatcgacttgttaaggatttgatgatttacgagcattattaaaccgagtcgagaaacctcactagttaaagagtttattttgtgttagacgtgacgtacatgctgcatgcatatatgtaatttaagttgtttgcggcgagaagctgattttttaaaatttttgagacataatgttttaacttttaagctttctcaaacacattatgttcttgatgtatgaacgatagttttttaaatctaatttaacattaggttatcagacacactaatatacatgtaaaactttgcattatatgagagccgtgactaccctatggcaaaaaggcaaatgcctaaagccaaaaaaaaaagtttaaattaaaggccacatttttataaaataataagcttatcaattttgttattttgataacaaataattgttaaaatgaaacttttttcgtgaaaattatattcttaactatacctttatctatagaccattttcttatcttgaaaacacatcatttagtaatatattttttttggtaagaatcatttagtaatacatcataattagtaaatataaatatttaaaacaaataacattattagaaaaacatataaaaacaaaaagaataacgtattattgatttttttacattgtaagtttttgatactaatattttttccga

SEQ ID NO: 38191 - DNA, 15339 bp, Arabidopsis thaliana landsberg
  unsure (1)..(15339): unsure at all n locations
tgactaaacaccgtaatatcagcatgggcggtcacaaacaccaagaagagcgtctttttgtacgttgtgtatgggtgggctgataacacccatatgactggccttgtggattgcctctagagttggaggaaatccctcctaagtggatcgacatcaaacactttaggtagacattctcattggattgggagatgattgatgaaaggtacgcctggaagtttgatcacctaaaagccaaaggggcaaagtttcttctaccctattcaacatcgtttttgtacattttgcatctttagtcgagtctaggactagtcttgcatacattctagattctggatttgtttcaggtgttttaaagctattggtgctctgaaagaggaaaaacagaacagaaagtcacatttccacctacatactcgatcaccagtagcagagagggaagcagtcagctcagtagtccatccagacacttctactcgatcgcagaggagaccaggcagaccattctggcagatatactcgatcgcacaggagaggaggcggtccattctgcaattctactctatcgcagaggcaaccaggcagtccactttgctagtccaccagttatactcgatcgcaaaggagaagaaccagtccatcctgacagctgccagacttactcgatcacagaggccaagaagcagcacagaccattctgtctaccaacctactcgaccaccacctcgaccctctgatcaatccgcattcaaccagacaacctgaggaaaaaaaagaagacaagagaaggcccattcgaagcccactttgaagcccattaggaagcctgctttgagccgacactcttgatcatatcgtccatgggccgtttagtgggctcgaagcccgctttcttatccttatcgttttttagtataaataagcctctaagggttttgccctagacacccggagacttacagacccttttacagagattttctgcaacttatttagcagccgcttttgattccttcaactttgtattttgatttttcttctaagttattcagattttgctttcatttgcttattcatctttgtttcattccctttaatcttttaggtatgcaatcttcaatcgtttctatgttattgtctttaagcatgttgtctgaggagtgattaggatttctgaggatgggatagagtagttgtggaactcttggtcgaatctgttggttaagtgtagatttattgaatcccttatggattagttgtgtttacagcttattcctttctgatcaactggaatccgatcccagacattccagcgctcaaaaggcgtttaatggaacgttggatctactaattccattgataatcgtctttatcccaagggattggccgtttagaacggttattggttttaacagtcggttcttattgcatgcttagttagagatcgctaatgggaattaggtcagtgtatagctatgcttgagaatttctatcacgggagtgaattaatctgttgttgaacctgttgttgaacctgttgtctagggatagcttaattgagatttgttaaccaactgaattgattagggagaccacactattcgattaccccatccttaggagtttctcatccaattgatttctctgtttatttacctgcttcattcacttgctattgaattttaggatttttctgctttcaaccattctactcgatcacacccttctactaacagtgagactatgtgataaagtaaactggtccatttctacattttcactctctctcatcctgttgtactcgatcatagggtcccttctagcagtcgaccttgcgatcgagtatatcagtcatttttgtgacttttactgttttctgcatcaacactaggactattagaaaatcaaccaaattctgcttggcttgacttagcaacttctgatcatatctcatctatttgcatcacacccatttggattgacacatttcaatactacaacgacatgatagtgctttaggattaattgatcttaaaaacctattatcacaaatagatctttaagtcttgaaaatgatccatttagaccttgtgaggataacgaagattttcttggtcccaaagtaccttatatgaatgctattgtacacccgtctccctcaacattgagacggcgtgctttcaccttacttatattttttctctattccactttcttaactcaaatacaaaattgtcttaaaaataatcttaaatcaatgaaaactctttaataaatcatatgagaaaataacaataggagaaaataaacccaaggttcccaaaatacaccataagcgagacggacttgcgcgactactcacgattataactgtgacctggagaaaaaaggggaaaaaggggtgagtaaagaattactcagtgagaggatcctttccgcccactggaaaaacgattcacgattctacctttaaaccacaatcagcaatcacatagaaaatagacacaatactcatatagtctgcatcactatgcaaaactataacacacaactcattcttgcttaagcaagatctccacatcataaccaagttcgatcatctccctgacctttgaatttatctagttccactggactcgtcagtcttttattgagctacaaaaaacccgtcaattcaatgtagaccattttccactgttccactgttctatttttccacagttccacttttcgttgtgattccactttctcatataactcgtataattaacttgctatcacaagtacaataattcaatcatcatatattactagaacaatcatcatatcatcagtcctaattaacaattcattattactaagcaaacagatatattcctatgcaatgaatcatgaagcataaaaatagaaacatgtaatcgaatctccgcagatcacaccctcaccttggccacttgctgattcgaacacttgtttcagctgccttaaagacgccttaataactcatcaatgaaccgttaacgttttaatccctccgttgattatctagccagtagtaccatgaagctctccaccaaatttcgtcccgatcggcatagtttcagacctccaaacgtcgcctcgaagaaatcaatacgaaatagattctgggattccagattctgcagattctgcagttacttgtctagaaagaacacgcatatcttcttgaatataacgtccattcaaactccgtctgttgctgtgtattcctcactgtgagatctatccgaaaacaccaatttcgtgatgtggtttcttcagatctgacgggaaacgctcaccaaaaccacaacttgaaactgcacttttcctttcatcttcttcgattctgttttgctttgccccagcctaggatgctttgatcttcttcagtgtgaatcccccttactgttttgaactaaatctccctctcccaatgtttttccttcacggtggtgatgatcccttctcttctgtcgcttctccttctccactatcctttcctctcttcacagatctcctccaccttaagtttgagacttctcttctcttctctggataactatggcgtggctgctcttagattagggtttatggtcgtgatggtggctcaagtggtaacgaagaaagagatagatatatatacacataattctcgtttaggttttatttgaggaggttgggcttttaatgggcctaagtggggtttgggtctcacacttaggctacaccatcaaagctttgaagagcaagaagaatctgggttagcatttcggagtgaaatatcagtagatgtcatgtgtatgattgaatataaaactagaacctcaacgagatcccgaaaagtaaagtattgtttccctattgtatgattcaaaaccaaaaactcataagaacttcggcttcaccgtcaaagctttgagaatcaagaagattggttagcggatttgtagtcaaatatgactagatactttgtgtatcattgagtataagaactagaaccgcaaccggattccggaagctaaagtaggatttaggttttcaagtttggggtctatggttttgaggtttagtgtttaggtttaagggtttagggttaagagattagggtttaggggtctacaagaaaacagctaactacccactacaactggcgactacataaatagtcgttatatttggtgactatttggctacatttatacgactaatttacaactaataacactatagtcgttagttagtcgccaaattaccactatagaggtgtgacgccttagtagtcgctaaaaggcgactattatatgacacgctgtaattagtcgccaaaattagtcgtaaattagtcacaattttgcgactaatatacgacacgccgtaatagtcgttaactagcgactattgtatgattactccggcgtgtcattaaatatagtcgcaaaatagacgtaattatcgattaaaaaagcacatgtatttcgttttgtaagttgttgtacctgttttaaacgactacactatttagtcgtgttttagtcactctaaaatttcctatataatgaaaatttcacgtacacaaaattcattcacaacacaaacacaatacaaataatacctttaagaaaaaaaaacatttttaaagaaaaaaaacgttaaaaaatatatttagttttattattggtcttataatggcgggaaactataattatccgagtagcagttgttttaatcgagattggatgtacaagaggttcgatgaaatgacggtgaatttgtcagaagaatacgtcgtaggagtggaggagttcttgacatttgctaatagccagcctataatacaaagttgtcgaggtaaattccactgtccttgtgctgtgtgcaagaataaaaaacatatcgtctcgggtagaaaagttagtagtcatttgtttagtcaaaatttatgcctgattattatgtttggtataagcattgggaagatttcaacatgaatgtaggaatgagtatttatgttgatagtacgtatctaagagaattatgaaagtgtgggtaatgttgtagaagatccatatgtggatgtgggtcatgttgtagaagattcatatgtggatatggtgaacgatggatttcgttataacgtggggtttgatgataactatcatcaagacggtactaatcagaatgtggaggaaccggtacgtaaccattctaaaaaaatttacaacttgatagaaggtgctcaaaatccattgtacgatggttgtcgtgaaggccagtctcaattatcattagcagctcgagtcatgcagaacaaggcggatcataatatgagtgaaagatgtgtggattcggtatgtcaaatgttgacagattttttaccagaaggaaaccaagctactgattcccattacaagacagaaacatttatgcgcaatttaggccttccttattatataatcgatgtttgtattaacaattgtatgcttttctggaaagaagacgaaaaggaagataaatgtcggttttgtagtgctcaaagatagaagcctatggatgactaccgtcgaagaaccaaagtgccatatagttgtatgtggtatctacccattggtgaccgattgaagagaatgtatcagagccacaagactacagcttcaatgcgttggcatgccgaacaccaatcaaaagaagatgaaatgaatcatccttcagatgcggcgaagtggagatatttccaagagctacatcccatgtttgccgaagaaccgcgtaacgtttatctcgaattatgtaccgatggattcaatccatttggcatgtcgcgaaatcattctttgtggcatgtgatcctgactccatataatttaccaccgagtatgtgcatgaatacatagtacttgtttcttacaattctgaattctgggccaaatcacccgcgaggtagtctcgatgtcttcctcctacttcttattgaggagctaaaagagttatggtctactggaatcgatgcatatgatgtgtctttaaatcaaaattttaatctaaaattagtgttgcttggacgataagcgactttccgtcgtacaacatgtcatcaggatggacaacccacggtaaactatcttgtccaatttgcatggaaagtactaactctttttatctacctaatggaaggaagacgtgctggtttgattgtcaccaaagatttctttctcatggtcatccattatggaagaacaaaaaagacttccgaaaaggaaaagacgcttctaccaagtatccacctgagtctttaactggtgagcaaatttattatgagcggttgtctagtgtaaatccaccaagaaccaaggatgttggtggcaacggtcacgaaaagaagatgccacgctatggaaaggaacataactggcacaagaaaagcatattatgggagttgtcttactgcaagggccccaatcnnnnnnnnnnnnnnnnnntgatgcatacagagaagaattttcttgacaacatcatgaacactctcatgagtgttaagggtaaatcaaaagataatatcatgtcaagaatggatatagaaattttttgttctcggcctgacttacatattgatagtaagggaaaagctccatttcaagattatacattgacaaatgaagccaaaatgagtttattgcaatgtgttaaacatgcaaccaaattccctaatggttattcgtctgatatgagtagttgtgttgatatggagaatgggaagttataaggtatgcagagtcacgattgtcatgtttttatggagcggttacttccatttatctttgcaggactcctcgaccggaacattaaccttgcattattaggtaaaataagaatataatttactctttatatcatatatgcacttgagatgatgcatttttttttttcaggggttggcgcattttttagggacttatgttcgagaactttgcagaaaagtcgcgttcaaattcttaagcagaacattgttttgatcatatgcaacttagagaagatcttcccacaatcattttttgatgttatggagcacctgcctatacatctcccctacgaagcagaattgggcggtcctgtccaatataggtggatgtatccttttgagaggtttttcaaaaagttgaaaggaaaagcaaaaaataaaagatatgcggccggatcaattgttgagtcatatatcaatgacgagatttcttatttctcagagcactactttgccgataatatacaaacaaaatcaaggtaaccatgaattatcgatgtgatgcaagttttcaaggcgcaaaaataaccatgaattacctcttttggatcaggttaacaagattcaatgagggtgaagttcctgtatatcatgttcctggagtacctactatatttagttttgttggtcgtccaagtggagaaatacgtgaagtatggctatcagaggaagactatcagggcgcacatggatatgttatacggaattgtgattattttcaagtaattgagaggtatataacaaagtcatactcccattttaagttaattatataaatgtttgtttactaacccttatatgttgtttttgtctttatatagtatgttcgaagattttctttctattaaatatccaggattgaacgaaaaagaactcttcgtgaaaagaaacgaggaatatcatgtgtgggtgaaagattatgtatgtctaaatagtttataatatatatgatttgcatttatttattgttattcttatctctataatgatgtttatttctaaatttgcatacaggttacatattggaactctagtaatccttttccaacttgggttcaagagatagtcaatggacctttgcacaaagtcaaaacatggccaatgtattttataagaggctatttgtttcatacacagagtcatggagatggacgtaagacttgtaactatggtgtatgtgtgaaaggtgaaaattatgcggatgcatctgacgccgcaaatatttacggaaacttaactgatatcatagaacttgagtatgagggggtggtcggtttgaaaatcacactttttaaatgttcgtggtatgaccctagcttggaagaggtactcggaggagcaatagtggtgttgtcgacgttctttcatcgaggaaatacaacaaatacgaaccctttattttaggtacgtatggtatatatatatggtcatttagtttttctagttcatatacaaatatctaattctccaaatatggtgcatttacaaacagcatctcaagcggaacaagtgtgctttattccttatccatacacgaaaaaaacaaagcgggagtggctcaatgttttaaaagtaaatccaaggggaaacatattaggagaatatgaaaataaagacccgagtttattgcaaacagaaaatgatgatgctgttttaataacaataatagaagatcttgtactcgacaatttgacaatcaatcgcaaccccataaacctcgatttagatgccggagatgccgatccaaaagatgaatttcgatgtaatttatcgtcttctaatgatgaagaacaacaagacgaagaacaatattagttttgtgtttatgatatgtacttaagttatttctagtaattatgatatgtacttaagttattttgaaatactatgcaaacatttttaaattattttgaaaaactatatttgattaagtatgttatgtttatttatatttttattaaagataattactatttttgaatatctatggcccaaaaaaacacaaggcccaaacccaattattaaaaattaaataaagcgactaatttgtgacaatttagcgactaaccattgtattgggccaaaataactcgaggcccaaatagggcgactaatttgtgacaatttagcgactataaccattctattgggccaaaataactcgaggcccaaatatggcgactaatttgtgacaatttagcgactacagaaaaattattgggccaaaaatttcgaggcccaaaattggtgactaatatgtgacaatatagcgactaatgtttaaacaaaatgaacattttaggcccaaaccctttaggcccaaaccattcactgcgaaaaccctaacaaaaatctcttctcacttcgaaacatccgcagtcttcttcttcattttctctcttcgaattcctcttcgatttcctcttcgaaaccctagaaaatctaagatccctcttcgttttcctcttaatctctcttcttcttcttcgatttcttcgatttgaacctctatctcatctagatctctccttacacgatgtttgggctaggaaaaaagaagcgaacgagtcctaaccttgctcagagagcctccacatccacggctggtcgacgacctcgttgtcttccgtctcaggacgatttcacgctggcagcagaacggtctcctcagctacagacgcctgcaacagaagccgctgttcctccattacaatcaacgacagctcatgtttggaactatccgctgccactacagttgttccagcactttgtcagtcgacaacctgaagtgcaaaggactgcctccgtagaagtgcagaacaatccagcgactcaagccgcgactactcagcaggttcctccgactcctcagcaagaccctccgccttctcagcaagaccctacgccttttccagttcaagagtctcgggctcacagccacccatcctttcaaggcaacaacttcgaagaatatccacctctgtcgccggatctctaggaggacacactttaatcactaaatgatctacttatgttgccgaagagggataagttcatcaccgtcctctctcccattcctcgactgaatacgacatggtatgatcttcttcttctcttgtttgtgatcccatgttgtgttcaatgtcggtttagttgagtaatgagctttgtgagattgattagattgagaaaatgtctgaattgtttctttgctgtgtttcgtgttgtgttggtctaaaagtctgaaagtctttgatattatagttgttactttgcatctgacaatctattttgttgtttaaagagtcttgttgtgttggtcttattttgttgtttgcgagaacaagtagtttaagttgtgttttgatcttagggtttagttgggtaatgagctttgtgagattgattagattgagaaaatgtctgaattgtttctcgttttagtctcgtgttgtgttggtctttggtctttgatatttagatgttactttgcagccacaatctattgcaatgtgtttgaagagtcgtgttgtctaggtctctacttgttgtttgcgagaacaactgcttgtggctgcaacgtatcgtgtctgtcattgtgtaagtttagttctagatgatactttgcagccacaatctatgttctgctctatatgatctgtttgtatgatactttgcagccacaatttatgttttgctagtctttggtctgatatttagatattttctcccatataataacaacttgtttttcttgtgtatggaggtttactcgggacacaaactcatgacttgttaggaatatcactagagtgtttacaaacaagtttgatggtctcttctacagctggacatgtgtgcctcaagagaggcaagagaaatacttcctcgagtttgctgttaagtgttctttcagcccttcttttatatagttgattacacttcttttttttactgacattaccttttctatttgtagaaaacacaccattgggatcctttgatcacagggactgttcagttttacttcaacgagatctgtttaaggcgaatgaaaggcatggttagcattgtaagaactagtcgaaagaaacctaaatggatcgggaaaactctatggaaggaaatgactgcgtactaggacactgaagaagctcaggaaagaagtcaaatctattcaaatgcccgtatgtctgaccgtaacggtctaggtcctcacatacacttctcagggtctaagtcatatcatcaaatccgtgacgaattggtaagtcttctctctgtttactcctttgcaactttaactcgatgtttcaatgtacttttctatgacttgtttttttttcattaggggaagagcaattgggcaaaactgtcagtattggtgacgttttcatcaaaacacatacaaaacctgatgggacgtatgttgatcgaaaggcagagaagattgcagagttatatcagaaaattttgcagctgaggcagtctgagctcgaggctgaagcttctgctgtttcagatggcacttcgcgggcacgggagctcacagctgaggaatgtacaaccatatttcttcaggtaacgttttatgtttcccaatttagtgtttttgagttgtctttttcattctctaatctcagcttttatcatactatgcagtccactgagaaggattcgataggcgttccttatggagtaggaagcctcaaagagtctcttgtcaatggcaagcggaagcaagcaggtgactcaacttcttttgtagctttgcaagaacaattacaggaagctcaacgcaagatagaagagcaggtctcttacaatcataggcgtgaatctaagatttctttgcgtgaagctgagaattcccgagctgcagatgagcagaagaagaagcttgagcacttgtccttagtggagaagtttttgcgcgaaaatgatccttggttcctcaatttcctcgaatctcattcagcaaaggagacaaccatagatcctatctcaccctctccagctgcctctccctcttcatctgcttcataggtctgaatcttaactccttcctcaagactcaatatcacggctcaaagtttttatatatgtgtacttgtgttgcttgtacttatgctgaacaaagttctaagttggagtgaatcgaacatgtttttgtaatttgggttttgttacttttctgaaatgacaataaatttgtgttcatgattattgtattgtgtttatgattcttgtaatttatgttttgttttctcagcaaggtttccatctttagaacattcatatttgtattctgataacaacaatagtcgcaatttagtcatcaaaaatgtcatcaagcagtcggttcttgatgacaatttagtcactaaattttccgactaaatgacatttcagtcgcaactcagtcttaaatatagtgacaacatagtcgtaaattttaacgactaattacctacaacgagtacagaacccttaagttaatcgttagtttgtcgtctaatagtcgctatattgtatggctatatggtcactataaagcgattacttaaacttagttgctttttagcgactaaaactacgactatagtatttaccgactctcgattagcgactacctttaatagttgtttatttgtcgtaaagaggtatttaacgactaaacagtgactaatactgaagtcggtaaatggcaatttttttgtagtagtctaattgccaccgcaacaaagaccctcaagttaaactagtcccggactcaatcaccactgacgagagcttacctaacatgcattacgaaacaacaagttaaagctaaaacgctccctataaccaataccttggtacagagccaagaatctctataattagtggttcagacatttaatcgaacaccttttgggcgcgaaaatgtctgggctcaaattctagttgatcagaaagcaataggcattaagaacaactaatctagaagggatctatcaatcaatactcaaccacctatcatactgagagttctacactactctaacccatccttagaaacctattcactactcagacatcatagcagaaagcatagacgttgaacaagttgaaaacatgataacaacagtgtaacaacaagatgataacaggatgaacaaccgtaaaagaaatcaagaacgaatgctgaatactgaatagataaagagaaatacggattacaaaaggtctagaacacaaggtctgcggaataaaactaaataaaaacttgtttgcgaaaatgtgaagtacatgctacttatagccaaatattccgaaaccctaatacttaaaacaacgcagtattgggacggattaagaactgtgctcgacccaggtggtcgagtgggaggtcgagtgtgtagctgcagtcttctttttttccttgtgctcgagtgtctggttgagtgcggaatgaagaaggctataaagcttgtcatcgagtatgcagtcgagtggtgtgatggtgatactcgacttccaggtagagtgatgaggtcgagtagtggtcttgcaatgaaggtgaagacactcgacctcggggtcgagtgatgcgatcgagtgatggtcaggtgatactcgacttccaggttgagtgatgaggtcgagtagtggtctgtcaatgaaagtgaagacactcgacctcggggtcgagtgatgtgatcgagtgatggtcaggtgatggagatgaagacgctcgacctcgtggtcgagtggtgaggtgaagttgtgatgtcttctactcgacctgggggtcgagtggtctgttgagatcttaaagctcctactcgacctctgggtcgagtggttttgtcatgatcaggtctgcttcttccagatagctagtcaacagctccaaatcacctaaaatcaacgcaaatatgcgacatgcatgcaaatctatcctacacatgtaaagtgatgataaatgatgagaaatggtgtaaaacagtgatgatatgatgctaaagtgatgacaaatggatgctcaaaacatgcaaaatacacacttatcaaatactttggtacagggccacgaatctctggaattagtggttcagacatttcatcgaacaccttttgggcgcggaaaggtcttggctcaaattccagttgatcagaaagcaataggcatttagtacaaggttatttagtaggaataggtaatgtttataagcttctctgaattaataccctttatactcatctttctgcagaaatatcagactaagttgtactctgctgcaatgacaggtatagttcttgcgcctctgtcatcataactaatagtatgtctttaattaagcatagcatgagttggtttgcttgaattttgatcaggttctgctagagccattgataagtatttagagcttagggaaattgtggaggaacaagtgaaagtacgtcctttcaccgagacacaacttttctttttcttgcatcttcttttttcatctataattcttattttttgtctggttccttatagggcttcacggaacctctctcggaaaagcttcttccggatctgcaccccgcagaacagcatgtcttcactctagttcttgatttaaatgagacactgctttacactgactggaaggtaacagtttcatttatttgctgatcatcaaaatacttgcatcatagatgtgaatatgtgactcagagtatctatgttatgaacaaagcagttctggtgaactactttgttttcttaagtagtgctgtatttaacttttcctgccttttcatttacaaaaatgtctagcgggaaagagggtggaggacattcaaaagaccaggtgtcgatgcattcttggagcatcttgggaaattctatgagattgtcgtgtattctgaccagatggagatggtaaagtcccaattggtttttcttttttctccttttttgcttgtaatatcatagtaatgcgactactaacgcttgtttcattacttgtagtatgtactcccggtctgtgagaaattagacccaaatggctacatacgttataagctagcaagaggcgctactaaatatgaaaatggaaagcactatagggtacgtaagcagctagcttatcttgtcaaagcatactttctgacttgcccgagtaactgtttctcaactaactattaaaattcctgctgcaggatctgtcaaagctgaacagagatccgaagaagattctgtttgttagcgcaaatgcctttgaatcaacccttcagccagaaaatagcgtgccaatcaagccttacaaactagaagctgatgacacagccctagttgacctgatacccttccttgaatgtaagtattggtgaactgagggataagttctgttccagtccgtgaactgcctgtatcaattttgtttggttgatcttcctgtttgggttatgcagatgttgcacgtaacagtccagcagacatcagaccggttctggcctcttttgagagaaaagatattcca

SEQ ID NO: 38192 - DNA, 2567 bp, Arabidopsis thaliana landsberg
atctgggggggtctattcttcattcgccagtcacatgctaggaatgacagaagggtgagtatatattctttgcacatggcgttgtgaatacttatatacatgggcctactgtttgttgttcgagccagtctgctgctatctttgtttgcatgtatttgaagcattaaatggctccttttccttgcgtccgcttatattcattgtctccatgtctctgccagtttcctttgtatatatatagagagagcaaatcggctgatgcattagatgaatatacactgacttctcgcgaatattcctgccatgaatattaagcgttctcttagtctatttggttaatgcatctagttctttgtccatatttatccttctagaaactagcgcagaacagtattaagattattactgagtcctttttccatgttgtcctccctcctcacccagacgattgctacagtctgcatgttccttgcgggaaaagtggaagaaactcctaggccgttaaaagatgttattgttgtctcctatgagataatacacaagaaggatcctactactgcacagaaaatcaagcaaaaggtctgaatattctaaactttctctaatccggtttcctgtttagtaataagcgaatttgcactgtttctcgcatattctattttactatgacataaattttctactaaacccaggattgtacttgtttgtgaacaatcctcctatgatcattgtccttgtcgttggatctctcatctgtgctggtcaccgtctctattatttctcttctttgtactgaacgtatttcactttttgcaggaagtatatgagcaacaaaaagagcttatactaaatggagaaaaaattgttctttctacgctgggatttgacctcaatgtttatcatccttataaacccctggtcgaagcgataaagaaatttaaggtcgcacagaatgctctggcccaagttgcatggaattttgttaacgatgggtacgttaaaagtctgtttccttgaaagcttcagatagatctatctgtcttgtattttcttcttcatacaatgaaaagatgcttgcagtctgcggacgtcactctgcctgcaatttaagcctcaccacattgcggcgggagcaatttttcttgctgcgaagttccttaaagtgaaattaccatcagatggagagaaggtctggtggcaagaatttgatgtcacacctcgacaactagagggtgagagaactatctttatctttgaattaattttatgaaactgtttccactttttctgtttgacttgtatgccttattttgcatctgatgctaagagctactcccttatgtatactgcagatgttagcaaccaaatgcttgagctctatgagcaaaaccgtgttcctgcatctcaagtaagcgaagtcgaaagtagtgtaggtggaggatcagctcatcatgttgggtctaggccatcagcacgtctaactcatgaacattcaaattctgataatctcgggggctcgacaaaagctacacaaaaccggagcaatgataatgggagtggtgaggcaggtagtgtcatcaccgagcagaagggggaaagagatacagaaacgaaagatagcatgcatactgaaagtcatccagcccataagtctagatcgggagttgaggcacctggggaggataaaatagagaaagcaggtgcacattttccagaagatgataaatctagaattgttggtacagctgatgtcacggtcagccaatccccaaaagacataaaaatgtttagagataaggtgaaggccaaactagaggcgaagaaggtccaaggtgaaaagacgagaaagaaggatttggtggatgaggatgatttgatagaaagagaactggaagacgtggaattagctgttgaggatgacaaagatatacaaaacaaaagctccatgggtacggaacatggcgagattcttgatggaaacaacttggtggtcaataccgaggaaggtgaaatgatagatgatgtttcttcaacaatgcctagccggaagagaaaaatggaaagtccttgtgaaaaacagttaggagaaggaaagagacgacacgacaacagtgagaatgtggaagaaggtcagaagacaaacccaggaggaagtagtcatagttatggtgacagagagccaagaagacactcccaagagaggtagatgatcaaaaccttctcatggtctattagagacatttcccaaccatgatgcgaaatgagtccactgtatttacaatgttggttatcttttcattttccttggcacttgtattcaacagttgagaaactaaatcaggtttccatccatcccataggatttagggtctctataattttgatctttgttcgcattcccttttgtatatcgggggaataaaaaagaattttgacgaatttatttagagccaagacaatattagtgttttgtcattcattgccgaagggtgttttgataatatcaatatgaaacagagtggtcaattgatttgtcaatgtgtagccgcttttgtaaggtttgtttt

SEQ ID NO: 38193 - DNA, 985 bp, Arabidopsis thaliana landsberg
gagcaagtccggagataagtgaagtccaagagacgacgtttcgtgcaggagtgagtcggagaacgagtcgggctgattccggatggtcgagttttgagtacatgttgatgagatagttcgcgagaaacggaggtggtggtgaatcgagggttttgacgattcttgcgtgaacgacgcgacccaaacgcatggaactcgcggagattgcattcttgagaagtaacccaagtgcgtccgcggagaggaggctcataactaacgccggtgatcggaaaggtcatagctttcaagtcggtgaagaagaaacattgaacggtataatcgtaatttcaatcttcatctgtgtaaacaaaaacaaactaaaagggtataactgttattccacctctgtttgtaggactaatctgatcgaaaagaggatatataagaaacgagtgagtttgataaatttgtaatctgttgtagttgaagcataagatcggctactctgttcttgactctccaaagttcgtatctttatctgcattctggagaaatttctaatcaacttaacttttcatttgtgtgggtttgttcccttaacattgttatagattagaattcatcctttgctttgtttatttgggtgtttatctatcgcaggaattagggtttttggtctgcttcgatggatatggatcaagagataggtcaaaattctcctgggtaaattcaattcattaagaactatcaatatgtttacacttctgtataggtttctctgcattgattctaggaaactttgagtcatgatcgattttgttttgttattgggaatagagtaatgaatatatgtgattataactgcaaagcaattagttaagttatgttatttgattcaatcacatttatgaatctgcacagatttgatggtgaatcagtagtgtcaatgagtaatagaagcaaggagactgaaccagtcccggttgagaatgactattggggg

SEQ ID NO: 38194 - DNA, 3796 bp, Arabidopsis thaliana landsberg
tcctttttaattccaattcaccatatttcttctttgtagtgattgatcaagggaacattttcatttagagaccacaccactcagttatttctatctgatagtgcttgtggatgttcaagctataagaatgtgctcggtggttctatgaatatataggtattatgcgttatgtttggtttgtagaatatattctgagaaggtgataggatggtcgatttgctaactttatgtcacttctgaaagtgagtttgcatgtttctcttttctcttaaatctgctttaagtgttaagatattttgctttgaatatatttggaaaaaccagtgactttggtattctgttagcattttccaacgatctaaattctgtgggtatatactctggtaattgcttacactgttttggctttatgaaaacgattttaatattctactaggaagattggtgttttgatgggatgggacaccaaattgctaaggtttatggtgttatcaattactagtacgtgttatcttccgaacaaccaccaccatggaatctcatctgggaaatggagtaggcagttcgagatctgccaaaaatacaaagaacacttctagttcagttgattggttgagcagagatatgcttgagatgaagataagggacaagacagaggctgatgaggagagagtaagttttgcatctcctttcttaggtctttatttctttgtgaacttctttagcttatcttccttctcatgcgcccctctatttgatgaagtagtttacttgaatttgatgtttttgccatgttgcaggacagtgaaccagatatcattgatggggttggtgcaaaacctggccatgtgatcagaactacactccctggacgaaatggtcaatcagacaggttagatggccatagaaactgggtgtctagatcgttagggagacgttttgatttttatacaactgattttaattttgactgacagacagtcagttacatagcacaacacgctgtcgggactggttcattcggaatggttttccaagtgagtaagcattgctatcttgttgttttaccattggataagactcccaatcattttatgtctccttgcggtaggctaaatgcacagaaactggggaggttgttgccatcaaaaaagttctacaggacaagcgttacaagaacagagaattacaaattatgcagatgctagaccatccgaatgttgtttgtttaaagcatagctttttctcaagaacagacaacgaagaggtttatttgaatcttgtccttgaatttgtgcctgagaccgtcaatcgtgttgcaagaagttatagtaggacgaaccaactgatgccattgatatacgttaaactctacacctatcaggttactatttcctacatttgaacctttttattccttttgtagtttttgtttcatgaaatttgtaactgcatgccagactgataatccgctgggtattcttcaaacatttttgataagtttctgttaatggttacagatttgcagggcgcttgcttacatccacaattcctttggtctttgtcaccgtgatattaagcctcaaaacctgctggtaagttccattgtatctccctgttttgaaaggaatatgcctggaggtataatacttttaatttcatctactctcttcacagaggaactaggcttctcttttcgactttatattaataagaaagctagttgttaaaataggattctgaaattaactttgagaaattgagctgggttcttagagtaacatgtctgagcttaacttatatgtacctagttaaaattgttatccaaaaagttgttcggtgttaatttaaatgtatatatatatatatatatagctgactttacagatcttggtgtgcaggtgaacccacacacgcatcagctaaaaatctgtgatttcgggagtgcaaaagtgttggtaagttttattgacacagtttttaacgaattcattcttggagtatgacatgttctcgttctctgtaggtaaaaggagaacccaatgtttcttacatctgttcaagatactatcgtgctccagaactcatttttggtgccagtgaatacacaactgcaatcgatatatggtccactggttgtgtgatggccgaactgcttcttggacaggttaaagcatgatttttgcattagctatatgcctatatgttttgttctattcattcagtttattccttgtcttacttttttgtgcccttgctaatttgtcgtacagcctctgtttcctggtgagagcggagttgatcagcttgttgaaatcattaaggtaattctttaagtttttctaaaatcatgaagcaattcaagtcctgataaagtcataagttcttttaaaagttttgtttacggggtagtcctctatctttacgtagcagactggtgcagattgtcaactttaaatctgaatgattattaggcttaggcatcacaacttgttacgtcttttgttgagttcgtattcagtatagaagaaagcaatacctttggattgctcaggtattctgattttgaggaaaccttggttttcttatttcatgtgctttgatatgtcatgcaggttttaggtacaccaacaagggaagaaatcaagtgcatgaatccaaactatacagaatttaagtttccgcagataaaacctcatccatggcacaaggtatgctttctagtgttattgattatcacctaccagagtaatctttaatcagtggttttgttggtgaatgcattttttcaaagaggtgttctggtatttgtgatggtttggagtatgaatcattcaagagtatatatcaaaaataaaattaatgttgtcatttcctctgctttataaaactatctgtggtagagttgaaaataattggctaaatgattgtggctttagttctagtttgagtatttccctctggtggaaatggttttcaggattttgttctctgacattctacaacttggtggtttgcactttgcattaagctgtatctaggattttttattttcccatagtaaaaaaagtttaattgacttcagtgattattatctccttgagcttcgcttctctctgaatccttattactgcatgaatattctatttatgctcaggtgttccaaaaacgtttgccaccagaagcagttgatcttctttgtaggttcttccaatattcccccaatttgagatgtacagctgtaagttaattcgttcttttccctccatattagcatctaatgatctaaattcattaaaaacactcttctggtgttattgtagttggaagcttgtatccatccgttatttgatgagctaagggacccaaacactcgtcttcccaatggccgaccacttcctccacttttcaactttaaaccgcaaggaacagttcccttatttatattgttgggcctattaagagatctaacatatgtagtatgctccgttaagttgttgacatgttgcgttgtgttcatgaactgaggttttatgtgttgttgcagagctatctggcatacctcctgaaatcgtgaacaggcttgtcccagagcatgcccgtaagcagaacctcttcatggctttgcattggtaagacggttaacggttagtgcatatgaataagcagagctctgtatcatatcaagagttggagcagccagattctctagtagaattggattttgtttttggtccgttctttttcatcattttcattctgtctggtcggaaatatgtccacgagaatgcactga

SEQ ID NO: 38195 - DNA, 926 bp, Arabidopsis thaliana landsberg
agaccaatcacaaatactctcttttggctacctattgtcccatgatgaacaatctgaggcatgttgttgctctagtcctaaattcgtagctgtaaagaacaaaccagatgatggatagaatgatgaactccaagtgaattgatctgtctcagattctgaacacttaggctggctcattccaggcaattcccatttcaaaggttgcttaatctgatcttcttcttccttagaagttaccttcgaaagtgggaagcaagtaagcttctcaaaagctttaactagatgcatcactttaccaaattcaggtatactcattctcgcttcttccaatactttttctcttctcctcttcatcaaagaaaccctagtttcatcagaatctccaaattcgacttgttcatttccatcctccaaattctggctggattctccaatttctgatacggattctcttcgattgttgaagaactcttcctgtgacgcccgtagagtttcgtatgctatacagacacatttctttatattggaaatggtcttagctccacatttgcaatccacagacgcggaatcattcttctccttccttgaattcttcttcaccaccacgaacctcctctctctgatccgattccgtggtgagaaaaccgccggaacaggattaggcttccatttcggattcttctgcgcagaagatttactcgatttctcgagtggagtcgagtgtgagacgaagttagggttagaattctcggagaatcgtgaaacctcttgagccttggattgaaaactgatcggatccatcaccagagtctcgtgtttagcattcttcaaattcgtcgactccatcgaaagatgagagcagaaaaatgtgagaaattagggttttgtcttttcgagtgagtaaagggaagaagaagaagagagag

SEQ ID NO: 38196 - DNA, 3610 bp, Arabidopsis thaliana landsberg
  unsure (1)..(3610): unsure at all n locations
accttatttaaaaattaactccgaaccacgacgttcgggttttggaacctcaggctcgtggttataaaagtcttgtgtgaaacctattatatttgccattgcttaatcctctcctctccttcacgttgagatatttttgagttttctgtgttgaattttggggaatcgaagaaattgaatttcaaaaatcaatggcggaagaaattgaaaaatctgtgccgacagaggaatctctgatggagaagatctccgagaagattcaccatcacgattcgtcgtcatcgtctgaatccgagtacgagaaacctgattctccttcggctgtgaaggcgaagatctatcgtatgtttggcagagagaagcctgttcacaaggttctcggtggtggaaagcgtaagggttttatatattcagtgtctcgtcttttctttttctatcatttttttctctggtttgatcgatttggaacatgcgttgatgcttgatctgcaatgttagggtctagttacactcgtataagatcgcttggtgatgattacataattgcattttcttgaatcgatccattaagatttgggcatccaaaagaagacttgaactttagggataatgtttttgaatagggagagttctgaagttggttgattagattgaagacatttacgtttctctaattttgcaacttgtggaaattttgttacaccaatttttgtatgaatgcaataaattggctttattggtttattatgttattgacttctgagttctgagggattctgatttttctgnnnnnnnnnnnnnnnnnnnnnctgctgatgtgttcttgtggagggataaaaaactatcaggtgctgttcttggtgtcgcgactgctatttgggttctgttcgagctggttgagtatcatttgttgagtcttttgtgtcacatttcgatactcgctcttggaggcctctttttgtggtccaatgctcacacacttatcaacaagtaagattcaaacccttgatcatgttaaccccgccctagatgtttgttctttgtctggtttaaatggtcttaaaaccttcttttttcatttttgcaggacttcaccacaaattccagaaatccatgttcccgaggaggctttccttgtggttgcttcttctgtgagaaacgaactacaccaagctcctgttctcctacgaagcattgctttatgattggacctaaaaaaattcctgatggtatgctcattctttgttgctgacgtttgctgtgtttagttaaacagtttaggaaatgattaagtttgtatcggaaattagttacatttcaacctttctctgttgaaccgtgaatgtatcacttatacaaaacataatatcgtaagtatcttctagcaacagtgtgtcaagttacagtatgtcatagcccattaagacccttcaagtaaactcattgtcctgaatctgatgatgagatttgttatgtcaggttgttgtcggtctatggatcatctcggtggtgggcacttggttcaatttcctgactttggtgtacatttgccttgtggtgttacatacagtaccaatgttgtatgagaaacatgaggacaaggtagatccagtggcagagaagacgttgaaggagctgaagaaacattacatggtgtttgatgagaaggttctttctaagcttcctgttgcttcccttaaggcaaagttgggttaaaaactttagagtgaagcaacctccctctctttattatctttccccttgacgttttgctttgtgtcttggggcatttttatttgttacttcagaaaaaaaatgttactctgtgttttcccttctctaattttgactaatacctttttcgtgggaaatgatttaaaatggtttctgtgaatgctgtgttaatcaaattttggtaaaagatgcaattagtcgttagctcatgtaatggtaaaacctttcacaaagaaaatcacagtaccagctgatgtaactttgtattttaatctttcaatcaaaatttccatcaaaaagtcagcagcatacatcaacaaaagaaaaattgacgaacaaacaaaggtgtgagatcataattacaacaaaagactcaatagaggttcaaattcctattttaaatgtaagtatgtataatgtttatctatgtaccatcttttaaggaagttatctcgagagtcgttgattactctcagatgatctgagaggcacagtagagaactctgaatcatgcaaaggcgcctcttgactcgtactctccaaatcttgcttggctctactcgctgctggttcttgtgcttctcttatttctcgctcttccgcgtctttgagtaagaaatcgacccatagatccgcaaaagactgtaatacaaatttcaaaaaaacacacaataatatctctcttagtgtgaaacttgcctgtgtatttcgacaaaaaaaacaaaacttgcctgtgtatcagtgtactttattatgttatggaggacttttacctggttatcagaagctgcattagcatgtaactctgcagatttcccacccaaaattcctccgacaaagcggcccggaaagcccaatacgcctctaacaactcctttacctcctccttgttttgccgctccaatccgctctttatcttcctctgaaaatcctagcatccgaaccatgaggtccaaaacctaggcgaaagcatgaaacaaccgaagtatatcagagacatttctcatatgtgtatgtcacaaactggatttcagaataatatcaatgtctattacctctttgttatgattcttctggaagtatgtaaccagcaatttaataacgattcgcctgcaaagacacatgttggttcatcattgcatcagaacacctaattcagacaggagaatcgaaactatatatgtccaagtgttaattggtgtacctatcaacaagataatcagactccattgacattctattgagccttgtcatgctctgctcaagaacacgtcgtacttttgcattgtcttcttcaaccttggttactctgtttttccgttccgctgcaactttttccgcatgcaataatttggatgtgacatcttccttttctttatttgatgactctaactgctcatcagaatccttcagcaaccgcaaaatagcatcagacagatatcgttatggcaggttgtagtttataaagggaaaagatagttatattcctactttcaaacgagcagaaagcttcatcaactcgtctttagccatcgcaagctctcgttcaaaatgctcctacaaaatgaatacgaacgcattgataaattgagagtaagaatagaaaaggaaagattttgaatttcctaattccaaccttagcttcgatttcagcgtaatactggcctagagcagtttgaagatttaaaagttcaacattcttggactcgattgttctcaaacaatttgtaagtttttgatttaggtcatcaactgtgtcctttaattttcggatttggctgtcattgctcaatctgttatcctcctgattcgagatggcctgcttaagacttttctccaagtgtgatatctgagacctttgatattcagtagtctg

SEQ ID NO: 38197 - DNA, 2904 bp, Arabidopsis thaliana landsberg
cgatcgatcacactaacataaaccatttttgtaaattttcaagtcatgatttaattacctcattggggagcttatcaaatagatggttttgcctatatttgacaatctccttccctgttccagcatttgagactccaaataaccaaatctcaagctcttcactttgttgctctctctgtacaaaaaccgaatcatcattcgatgaattgtcggcatagcttaaccggtcaaccgtatagtatccatgagaaaccggagttaaccataatggtttcttcttcttccttctcttcccatcttcaactacaagtcttctaaaccggaacgcctgttggattcaacgatctttaaaatccataattcaatacaaaatcttgaattaagaaagattgaaaaaaagatgaccttgagcatgaaagggagatctaagaagcccatcgtcgttcatagcttcttcttatttgcttactatctttataaattgcaaatatcttttgataaaaacaagaaaacttttttcgattctcacaattttaaaagaaacagactttttcaattgcaagttacagtttcttaagtcatttttccatattgtaaaattacaattctgatgtatatttattaagtaacggtaggaaactataaacaattaataaacatttagaatgttgtctagaaaacgcttattgtgaatagttgaacaaagcctcatatagtaacgtacgcctttcgtctttagttaactttgactatgtttacgtttcatcagaagaagaaaaaaactacgtttacgttccaaaaccttaaaagacaagcattggagatttggagatgttatatattttattaagttttttgcattttatatgataatgagaaaattaagaaaaatagtctatttcctcacatcgtatagaatccaaattttatccacgatccttatgcttatgaagtgataattctattctattttacaatcatcatgggtttgagaactttcatttcatggacataaggatcgagattaaagtttgggctctatatgttatgatgcgatattcatcgtaggaaaataaaccgtttttctgaaaaaaatcatgatagaaaatttaaagttataatacacttaaaaaaagagagaggctatattacactttaggaaacatctaatgccttggcatgtgcatgagtagtatgtatcttcagaaaacgatgaaactaagcttaagaccctagacagcttttacatgtgcatttgtcaactatcgtgtcaattgtctctctatattcggttattgcgaacagaatgaaacagatactgttttttaatttgatgaactgtaacttacacatacccaaacatattgttttgattaatcactaagacgctaactagctttcaatcgtttaatttagatttgattattctccttcatcttttatgaaaagaagatgtaaaaatgttgtggatgagagaacgcatatttctgaaatcaagcaacgaattaaaccagtgaaccattcggttaactactaaaccgaaattttctttgaccaaaaaaaacacaactttttaagtttcggttccaggcatctggcttcttctacctccgtctcctcttaaacctcaaataagggtttttgaggaaagcttctcgaaaatggccattgctcgtttactttcacccaaattaactcctcaattcaacaatagaggtgataacacataatacccttttttctaaatcttcttaatttttcattcataacccaaaagattctcattttgcaatttttaaatgtgggtttaattgatattgacaattctggaaacaaaattgaattttgtttataggttttgtaattttgacgaggaggtggttatcttcttctcttgaggatggtcagaaatgtgagagattgccagattctgaagcttccacgaacaggtgagtatgcttaaagaggcaaaaatttagaatcttttttgtcatcagaagaaactgagtaatgggttttattaatgtttagtctcattgaagagtaatgaagctacgcttagaaacaaaatctggaactgggtttttgcttggagtttgtggtagtttgatttaattcatgcctttgtgtctttgaactgtgagtggctttacctgtgtacaaagctaccaactttaagtttcatagattaacttactgatttagttctcatgttaatttgggtgatgcattgttcttttttttactttttgatttgtgataattttctcatgtgtagagatattggacaaaaggtagtgcattggtattctttgcgagctttaattactaatctaaagcaaaagattgaggaaaacgtaattttgatggacaaaagttctggtgaattctcggttttgccaaaatcgccaatggtgtcctgaccagatgtggctgttacgaaagtggtgaccttgaagaacgttgcagaaagcgaaaactgtatcccttcgagtgtaaaagaagaaattggatctgaagatgcatctcaaagtgttgctgcggataacaagaactgtatcacttcgagtataaaagaagaattttttctctcggaaatgggatctcaagatgcatcacaaagtgttgctgtagaaaacaagaactgtatctcttctagtataaaagaagaatcttcagtctctgaaatgggatctcaagatgcatctcaaagtgttgcaggaattgaggcttgtgggaagagagaaagcataactgtaagtaatgacagattaggtaatattaataggttagatggcttggagtctgggcaggggaaggtgttgagatcaatacgcactgaaagggtggatccttctgagggacaaagttctaaagatgtcactttaggtttcttgactgaag

SEQ ID NO: 38198 - DNA, 2165 bp, Arabidopsis thaliana landsberg
tcagtgacaatgatctcctttctttgtgtgatgtataacaatcttttgtgttagtgatgaagttttgattgtctgatcatgttgatactgacaatgattacattcacacgagatcttgaatgagttgtgttttgattctcactgtcacagatctgtcttcttagtctagatctataatgtagttacgtgtaatacaacactaagatcttaagatttatattttgtgaatctgtttgaccggttctgttattatggatctgaagtgtgtgtgacttggatctgaagtatgtgactttgatggttatgtaaagtgaatctgattcgtgtttttcgcaggatggggtacgaacgaggacttgatcatatcaatcttggctcacagaagtgctgaacagaggaaagtcatcaggcaagcataccacgaaacctacggcgaagaccttctcaagactcttgacaaggagctctctaacgacttcgaggttcggttttcggacttttaagtatcgacttttaaacatcttgtgtgaagtcattgtattctaattggcttttggtcatggacagagagctatcttgttgtggactcttgaacccggtgagcgtgatgctttattggctaatgaagctacaaaaagatggacttcaagcaaccaagtgcttatggaagtagcttgcacaaggacatcaacgcagctgcttcacgcgaggcaagcttaccatgctcgctacaagaagtctcttgaagaggacgtggctcaccacactaccggtgacttcagaaagcttttggtctctcttgttacctcatacaggtacgaaggagatgaagtgaacatgacattggctaagcaagaagctaagctggtccatgagaaaatcaaggacaagcactacaatgatgaggatgttattagaatcttgtccacaagaagcaaagctcagatcaatgctacttttaaccgttaccaagatgatcatggcgaggaaattctcaagagtcttgaggaaggagatgatgatgacaagttccttgcacttttgaggtcaaccattcagtgcttgacaagaccagagctttactttgtcgatgttcttcgttcagcaatttattttgctggaactgatgaaggagcacggaggggaattgtgaccacaagagctgaaattgacttgaaggccattggagaggagtaccaccgcaggaacagcattcctttggagaaagctattaccaaagacactcgtggagatgacgagaagatgctggacgcacttctcggtgaagatgatgcttaatcaatcaatcctccacagagaaacataagctgctttacaggttctgttatctattatctccctctctctctctttgatgagtttcaaatcgtttgattttgtttctacaaaaaccttgtttgtttctgttgtgtgttttgagttcctaaataatgcaaaagagagagacagagagaaccagtgtggtctcttaagttatatatatatgaagagcattggcctaaaacacagactaacaagtagttctggttttgacaaaagttgttgtcactacagaaagggagaccaacaacaaaaaagttaagggcattgttttctctaaagccctatccgatcttgaaacacaaaataacaacaacaacattttttagttactaatcaaagtcacttcttcaagatggtcttggagaaaatcttcttgcagtaagggctcgagtgtagtttcccgtacctgtaaaccttcgccaccaatttagcacgaacaggtccctgcatcaaccccaaaagccatgtcaagttctgtttctaaaagcttataacatatgtattgatttggacttactttggttacagagagagcagtttggatcacatagttcgcataaggatcctgcagaagctgttcaaagtttggataagagaggagctcgcggacgatctcagctcgactctctggatactttcttagacacttctcaatcacatggctactgaacttctgagtcgctagctcgatgcaatgtgttctaaatggaagcagcaagttcactgaagaaacttgttggtctattaagcactgcaccacatagttcctgcccatttccacaaaccataaagagagtttttcaaactataagaaactcgtt

SEQ ID NO: 38199 - DNA, 2244 bp, Arabidopsis thaliana landsberg
gaaaatgtgtcaaatcttcacagttgttgtttgagattctgtcgagtcacagctgctgagagagtcttttcttgttttacttcattggtaatctaggagcagtttcattcaacatagggtagatgcaggaaaaagtgttgtttaagcattcaccgaacaatgtggttaagcaattagagaattcaaaagtatggatctcttgatgtatttgtgagtgtttctgtgtatctcttgtagttgtatctgttgaaatgagggcgttattggataataattgaaccattggctagtgcaagtgaacattaagcaaattagaagatttatagcgtttgtgtttgcactgcacaaggattcatccctttcatcggttatttctatgtgacatatgtctttgtgatttgcagaaagtcaaggatgaggtacagagaaggaagaagcagtgtaacatatctagcagccataacaacgatcacaacgagttccatgagcgtctaagtccagctcggttttcatgcgtagactctcaacttcaaccaaagttattggtcaatggtcactcttgtgatgatcggtccctgtgaatacgaatcttgaatcaccttttttttactaacaaagctcttctgagttgtgtaagcttgcttcaacacgttgatgaattttggaaattttaatgtataaaacgcgttgaccagcgtcttcaaacgctctttctggtcgttcccgcaaagtttgtttatcaactccgcgtttcaaaattcgaaatgaagatgtcaaattttgttttaaaagttttggataagatgatttgctattcgcatgttgccacattatctagttaatatatgtggaaaacagaaaacaacaattcattttatttacctcaatggggaagtaagtgggacgcttcggcttaccaacattgatgcaagggaagtcacctgaataacgcacttcaatgttacgctctttatagtaattgagcactgtgatctcaacctcctcaaattctcccttgtcgttaggtttcctccatgtaaatctatcaatcaaagaccaatatcttagaataaactcaaaagcatataaacttgtgatcaaagaaatttgacatacagttgatctttgcagctgtgttcacttagtccacttatcttgtattctctattggaaagagtaatttgaactctcagattcttgaggacacgtcgagcctgatgagataaaatcagataaaatacttcttagagatgttaatacatcagtgaaatagtacaacataaaagaaaatgatgtaccttgttccagtccattccgtatggatctttcttgttctggttagcaagcaggaaatcaactataggtccaggttgtactatcatcgtagttgaagtgtctgaagaaatgccaaagcaaaaaaatcaaagtttagcagccgaatgtcaaggaagaatctaatacacattagatctggaaaagaattaccaatattcagggataagcctccctgagtagttctgaaacttgaatggaaccctctgcaaccactgacacctccaccaataggtacaaagttctttacgtcattgtggaaaaaggactggcgaacaaggaggcaacctctgcgaacagatatgagaacatgacattaaagatcaagcagagaatttatttgaaatacaaatacccagaatatttaacttactgcctagctgcactctggcgcaaaataatatccagcactctcagagcgtcttgaagattctctgtctccttcccttgaagagcgcttgcaatagcctgcatggggatctttgcagcataacttatctcaaccatgaatttcttagtttggttgggacgccttgatctttttctatcagcatcatttgtatcatttccagcgtgatttctgcagataaagaggatatcaaagcatattagactttgaagaaaaggaaacagtcgagaaatttcacagggaaaaaaaaaatcaaaagaagtcataatcacacctgctagaaggtatttcttcaagaacaacagagaagtcaagtttgttgctgggaagagcgccaacagtgaagagagtcttctcgccatcataagcaaagtatttggcacccaaatcactttgataggtctcctgaactttgtcaagaatctttcggccgatacctttagcctccactggacggccatcttcataattgatagcaacctgtagcaaatgttaaagataca

SEQ ID NO: 38200 - DNA, 6223 bp, Arabidopsis thaliana landsberg
  unsure (1)..(6223): unsure at all n locations
gcaaatgtgattcctttcttgtccattttagccagtttcattttttgttaaagacttgcgtttaagatcaacctgtagttgccttttgatctcattactaacctggcttttctgttttcagtcgttgatatattcaccttgagttctcctttcccacgctctttccatcctccctcaagatattcgaacattactgagtcagctgtgaaggctgctttttcgttctcttctcctgtttccactgaaacatcttgctttgatgggaaggcagtagtagtttccgtgctcttcgtggtaatggaagtagcaacggatgcaccaaacagggaagagtttccattgtttgcttggccaaaactgaaggatgactgttcagaaccagacccagtcgaaccttcttgtggaaccaaaccgaacgagaacgaagaagcagagaaccctgtgctagcaagtcctgtgaatgcgtttttgctacttgagtgctggtggaaggagctcaaggctccactatctccatttttctctgtgtcttcatttccatcgcactcttttccttctttctcagtctgattaccacctgtatccttgacaacacagtcacttccctcaacagtgttgctattgttgttgtcatcttttacagtctcttccccagcagcaacttcagtaaccatcgttgtcttaatctcgtcttcattcttgtttacagctccaccaccctctacggaattaactgcctcactcatctctttctctccaccatcaataatatccttggtcttagcagatatttcatcaccctgtgtctcttgttttcctacagcatcaattgcgtcactcttttctttactgtcaccatcagtttccttggtagcatcagaccttccatcagccagtgtctcttgttttcccgcagacagaggtttagtcgtttctgcagcagcagtagaaggagcaggagcagtaaaaggaaccaaacgaattccagtaaatggattagaagctggtggtgcagtagcagatcgatctgtgcgcctaactctgataattcttctgcttgccaacacctccttactagcagtgttgaaggtaccactctcgagtgcagaagtgtcttcatcatcatcatcaagaccaggattgtcacgagacagctctttcagagcagttctctttctggaaaatggtatagcattatcggagtcccccattgtaatctcttaacagttacaggcaagctagagtccctacaacaccatgcaacaaaaaaaagatacatcaagattgtgttaacaaccaaataaccagaatcaatctcgcggataaggaagtcccgagcttatatgttgaaagcatagttctaacctgtaaccatccaaacaggaataggatgcccaatttgtacgcacataagttaccaaccatagacaatgtgtgattctttaaatcaaggaaacctaagttaacatgctactgcaattgaaattgataatgaacacgagacaaaaatctagaggcaacaagagcgtatatatgagcacatgttaacaattcaccacgcgatcgcaaatcatatgatagtacagaagaaatttgaaatcaaaaaccccaaactaattcagcaaacacaaaacaggaatctgaagaaacagctaattccagaaacgcacacaaggataatctagcaaggaggttcaaaaggagccgtagaaaaaaaatccaacaacagaaatatgacaaaaccctaagaaccagagcagcgagcagtgagatgagtatatagaagaaaagggaattagaaaaatccagattcggccaacgagaccagcgagaaaatgaagattcggagaacttacggacaagcaaggagcagcagaaaaaccctgccggagcaagaagagagatcgccgaggggagtgataaaagagaaaacgaatcttgtcagcacattggaaaaatggtaataaatcgagtttatatttttgtattatttgttatatttatatccaaatcgatattgttgctgatagtcatcgcatgtaataagatgtttacgttttgtatataacatgttgtattgtcgtagctcatttgttgtaaaatacttcttgcagatttgtatagctaatgttataactttataggacaatccttaactaagttattcaaaaagagtggaaattaaagtgataaaggcttccaaagaattatatatgcaccagaaatttgtaattttgagctgaaatctaaagcagaaaatttgtataactctctactgtgttataatatactctttcagatgaaaaccacaatcattagttgaaaaaaccacaacaccaaattccttaatccaccaatcccatcttcgtctttatactctccatccaccaagaatcgattcctgctacaaaatggatccaaaaatatatgattgaagttaattcatggtccagtttcatagaggtttgaactcatgaataaggatgatagatctttaccttggagtatcggtgccggctactggatctagctagggatgtggcgtaagcactgcaaaacaaaacaaaaacgataagttcacttttggcaaagatggaggggttttacaagtctccaagtattagccacattgatgcagagattataataaagttaactcgtataactaaacccatatttatgccaactcaaagattgtgttactaagggtaatgagacatataatcatatagaaatgttagaagcggcaaaatgtttttcttttttgggggagaggtttcaatttaatcaccagagacaaaatttcgactattcaacattgatcctggaccgacttgcttattaggctgatgggtttccttcattattcgtaccccactcttcctcaccctcacttccattaacaagtacagctccatccgtagagtctccatcaacaattccctcttcttcattcacttcttcttcctgttgttcctcttcatctccttcattctctacatgaccgttttcttctgctacctgcacaaagttcaaaaaacaattcagtaactactactgtggaaaataaagctctttgcttcttagcaaacgaatcacttccaaaagaagttacctcgtgatcgatgtttccattttcaagtgattcctctgcttcaacttgcaggtttctaaaggcttccacaagggtaatggaaggtttatcggcatgggatggataattttctgcagcggtataaactcccctgtagataaataagagtcaattttttgggttggcctaaataataacacgcttgagtatgaacatctcaatgcataatcatgggaaaaatgagtggctcaagtatgaagttcttttcctaaggcatccatcacatccgtacaatcatatctaggtacatatataattattgaactacagttcgaaagccataacgaccatggaagaaaaatgcgaatagcagaaaataagtgctcggataccttgtctctgcagtgttcgcttcaacagaaagagcaacttgccaatcctcaaaaagatttgagtactcttcaggatcagctaaagattcagctgcttttggattaacctgatgacaagtcaaaggcaatttaaagccacatgatgaattttctcattgacacagtaaacaaaaaaaagatgcgaaaataaccttgctgagatcttccctccatagagctactatctccgaaactttgcttggaagataagaacgtgccatcagagcagcttctggtatccggttactgtcaagataatttcttgtcataaagataacaaaagacacatatttgatttttccaaacggccaagtgaacagtaatgaaatacctctccaccaataactgcagacaatcttccaatctacccagcgtaaataagcaaagaaaggcaacattgttcttcccctgttccttagcaaggcatgcaagttttgacaccccttcagcatctcccaaagaagaatatagtagtaacaaaccactcaaatccatagcgtacttcatgcaatcctcggccaattgcagctatcatgatagaacacacacaaatgcaagagaatcacttagtaagtagtagatatcagcaatgaatccgcaaaagctagaagaaagctcattggcattgtaagatctaaatataccaatttgctcctatagatacaatgtaaagtagtaaactgactgatatatagcatttgcaaagaaagttatttttctattttccactacaaatcattgggcaacatttttatagagaagatgtaccttccccgaggacatggctaactctcctaactgcttccatttagactcgctctgtacttcttcagcaatttcctacaagcatggaaaacaaagataagaaaaaaaattctacttccaaaaagagtagagtaaagtaatgtctaagcaattaagcatcacatatgatattacctttgcaatttcaagtctacccagttgtatggccagatcaaatttgtagtctggatctgtcgcaatttctaaagcatcttcaatcattccccgagattccaagaaatgagcaacactgaatattaaaaacattttcagatcaaactaaaagagatacacacaaaacagtgaaaaacctattggtaggggggcaatatctctaacagaacatatccacaatattcttcaaaagtacattcataggacatagcaggcaacaagagataaaatgcagtagtaaagaatgaattataagtgaatgcaaaaaatttagaccaaaataacctataacatacttgttatgctgctctttaggaattgtaggtaaaatttgattggctctatccaaatcgcctcgcatcacaagagtcttgtactcaatcaggcttagcaacaaggtgtaccctataacactgcatccacaaaacaggggaacagcatcagaaacttctagaacaatctcaattatataaacacacaaatctaagcacttacttgaattctttgtctaccaagaaaacccgactttgacttgcaagatatcccaacaaatacattgggcggtccaaatgatacattgtggttacctagtattacgatgttagcaaccatcattagaatccagttcataacaacttccaaatcagagtaaccaacatatatgcacaatacctcgcctccaacacagtagttaagcttccaggaagagttgttgtaaatgaaacagtcaccaacccatatacctgtcctaacacgttcatcattttcatggagaacctcaaaagcatcctcaacaccttcttcctcagtaggtcttccgctatcaaaatgtgaggtaactaagtcgcgctgtataacaagaacaccatgttagcacttggacaatccatgaatcgcatatagaaattcacagcataagagtgtttgttggacaggatcctcacgttgaatttcaagatgtagaatgatgtgtcactagcaatggctactaaatcaccactgtcagcccaatatagattctgcaaacgttatgtagcaacactacaaattagagaagaaacaaacgaggaaaacctcaaactgaaggcaatgatattagtttccactattccaaatatgtcttgaagtaaacttcttacaataaactgagccaagttaactgggatacctttacagtgacgtcaatacgttgaatcagcctacattcagcccaatcataaaagcagatgaaatcacttgaacacatagctaacaaggttcctccaaagatcttctcagctgaaaaagtagggcggatactcctcttttcctgaaaatgtattttctgaatgagccagatccgaatatagctatctccatgaccagtatcaataatacttccaacaaccatagatacagggttgaacagaacggcttagatcagagagaaaaagatgtagaaacctggaaatttttgctaaatattttaatctttgatgagctttctctaaccgcacactccccctcggatgaccaaacaaattccagtccagaaccaaatgacctatttctccaagccaaagccgtgtagattatatattctccgtcaccacagactacgacaaacctccattagnggttgtgcttcaagctctgagattcaagagtacccacatatgagacacagatcaagtgagaacagatatatattctgaagacgcngcttagcgatacccataac

SEQ ID NO: 38201 - DNA, 2799 bp, Arabidopsis thaliana landsberg
  unsure (1)..(2799): unsure at all n locations
atacataaatagttcaaatttattataaccatagtatttttacctaaatagatcttttgaaatcatggacttctaatattccaaaaagagcactttcaagtacttattataataagtttcagtaaaatcaatcatgccgaacactcttacgaaatcagctttgtctgttgttctcccttccccgttggtggtggttaaggatcctttacatttatacaacgatactagattttaatccgtgatataccgtggagacaatttatcttttaaagttagtatatataaaagtttacaaattttctctatctataaaatatttttattttatagtttacaactgttattaagtaacgtcctgccaaacccgtcccgccaacccgtcccgtaaaaaaaaacatttattttattaatgttgatcttatttatgatatgtttatgaatcattgtctaaatattttgtaattttgtagtaaatgctatcaaatatttctgcggtttgatgattataatcgaattgttatagttatacagaaaagtaatatcaaaaatgattattttgtaataattaaatgataataaaaattttggaagttttattttagtaactaatcgtgtagataatgtggagagatttttggaagattgataaatgtcaaataattaattcaaaaattttctttctaattatcaaaaacaaacattaaaaagcagtggcagccattgtaaataagtccaaactacaagatttatttaacaaaatagctgtaaaaatatatacatagatatgctaaaaaaaaattgtaaatatttagcccatatttttgtcaaaattaattccacttgtttctccactttaaataaattgaatccactacagtacatgaggcaaacgcttgaatttgatgtcgttttggagacgaaaatagtgtgtcatttactcatttatactctaaatactcgcaaggcatgaagtactttaaatcgtaaagctatataataccaaaacaaaacagattcatacccacacataaatacaataacatggtaatattctcataatagctaataaaaatggcttttgtacttatcatgtcaattgaatagagttagttcaccaactttcatacagtatataattagtgatctatttgtatatttaaattccgttacaaatttatgatttatttacgtgtacaaacttttgtaaattaaataaataaatttatgcacactcttgtatagtgtatacatagttgagctggtatttttagtataatttttttttagggcaaaatcataaattatattattttgaaataataacatgtacaccgccccaaaattgtcataatggaaagaaacatagatatattgagaataagtaaagaggataaaataagctacatatataggcacaccataatctagaaaagaaacgtaggtttcgctaactaacacaagagcaaaatctacttaaatataaatacatacagagtgcatatcaaaagcaatccctaataataatattactcttatatctatttagtttccacacacaaacataaaaataatttagaggaagtgagggaatgtgctgttcatgagagcattggccatgatgtgattagtcttctgtgttgggtgaaatgagtcccaaaacacatacttgtctgcgtttgtacatgtgaatgggttcattttatcacacaagtagctcatctcatagtatcccgttccgaacacgcacttcttacgttttcgaaacctgcaatgcacattggaattttatcataagaattcttgatttaagagcatttggtacatattgaaacttagccctatgtctttgcagggttgcaatggttgggaaaatatttttgttagaactttgtactaaccgaatgcttcaggatggtatatgatttctgaaacaaggtcatatggatttgaaaacaccagctggattccgttcagatctctgttcaactggaagactttctcttccatcttgatgttgaaatctctagccacaatgttgtattcttcaatacatttgcttccataaaagagctgagttgttctttccaggggtaagcatccaaaaggagagagtcccgacaaagacatcttccgagctccgagtctgtatatatctgtcacgaaatctgctgctattcctatcaggaaatattggtactcgttcactgagtacttccgtaacttgcggggaagaagatagtaattctccaggaaatcgttggttccgatactaatcaggtaaagtgattcactaataatctcattagctttctcttcacccaagtagcttcttagcctggtttggtattctttgtagtattccacttccttccatagcggcattacagactttagaagtcgatgacaattcagagaaagcatgtcagaaatctaagtccagtacagtagaatatatatatgttgtaagatatataactatgcttgacttactaacacggcagaggttgcattgtctaagccggttccagctgaagcgaaacagacaccagtggcaaagtctgcaatgttgtatgctggatctaggtaggcagggactgcgttcttgagtcccaaaccttcagaaatgaagtctggtgcaatccggccatttgaaaatctcccagtcgctttgccgtcaaagtaatcccggccatatggctggaaattgctcttcagaacagtagaaatctggttgttggtgcctgaatcaacagttgagtcaccaaatacgataagtgcgggaaattntgcacacgtttc

SEQ ID NO: 38202 - DNA, 3346 bp, Arabidopsis thaliana landsberg
gagttttattgctgactgctctctctccttacagccccattagtgctctcttacctctcaccttcgtcatcgccgcaagtatggttaaagaagctatcgaagattggggtcgcagaaaacaggtaccagctcaaatcgaatttctctcaaattataaagttccaatttttaaatcaaagtttcgtttttttcttcttctatatttaggacatcgaaatgaataataggaaagtgaaggttcacgacggaaatggaatattccggcgagaaggatggaggaatcttaaagtcggagatatagtaagagttgaaaaagacgagttttttccggcggatcttttgctgttatcatctagctacgaagattcgatttgttatgtagagactatgaatctcgacggagaaacgaatctgaaagtgaaacaaggcttagaagcgacttcatcggctttacatgaagattcagatttcaaagagttaaaagctgttgtgaaatgtgaagatccaaatgcagatctttatacttttgttggaactttacattttgaagaacagagattaccattgtcgatcacacagcttcttcttcgagattcaaagcttagaaacactgagtatatttatggagttgttgtcttcactggacatgacacaaaggtataaactttaaagatctgttttttttttcatttgtgccctgtgtcaaaagtgttgaaggtgacattttgaaacaggtgattcaaaattcaactgatccaccatcgaagagaagcagaatcgagaggaaaatggataaaatcatttacttgatgtttggtgttgtgtttttgatgtcgtttattggctccattgtctttggtattgagacaagagaagatagagtgagaaatggaggaagaacagagagatggtacttgagaccagataatgcagatatcttctttgatccagacagagctccaatggctgcggtttatcatttcttcactgcggttatgctatacagttacttcataccgatttcgctttatgtctctatcgaaatcgttaaagttcttcagagtgttttcatcaacaatgacattcttatgtactacgaggagaatgataaacctgcgcatgcaaggacgtctaatctcaatgaagagcttgggatggttgatacgattctatctgataaaaccggtaccttgacatgcaattcaatggagtttatcaaatgttctatcgcgggaacagcttatggacgtggtataactgaagttgaaagatctatggctatgagaagcaatggttcgagtttggttggtgatgatttggatgttgtagtggaccagtctggtcctaagatcaaagggtttaattttcaggatgagagggttatgaaagggaattgggttaagcagcgagatgcagcagttttgcagaagtttttcaggttgttagctgtttgtcacacggcgatacctgaaaccgatgaagctacagggagtgtctcttatgaggctgagtctcctgatgaagctgcgtttgttgttgcggctcgagaattcgggtttgagttctttagccggacgcaaaacgggatatctttccgtgaattggatcttgtatcgggagagaaagttgaaaggttcgtttttagccttcttttcattcagatgtagtctctgtgattcccggaactcaaaacctcctctgttcttgcagggtttataggttactaaacgttcttgaattcaatagtactaggaagagaatgtctgttattgtaagagacgatgacgggaagctcttgctgttgtctaagggagctgataagtaagcgagtttagacattttttagacattttggttcattataaaatctaactttgagtttggtgttctctgtgtagtgtaatgttcgaaagacttgcaaagaacggtcgtcaattcgaggcaaaaacccaagaacatgtaaaccaatatgcagatgcaggtctaaggactctagtacttgcataccgtgaggttgatgagaatgagtacatagagttcaataagagtttcaatgaagctaaggcttccgtgagcgaggatcgtgaagctttaatagacgaaatcacggataaaatggaacgtgatcttattctccttggtgctactgctgttgaagacaaacttcagaatggggtatgactttgatgaaagactatataaagctacaagtgttttcacagtttaaggttttttggaagtaacggtttgtcgattgatcggtgtttcaggtcccggaatgtattgacaaacttgctcaagctgggattaagatttgggttctaactggagacaaaatggaaacagctatcaatattgggtactgaatctggaaacagtaatgttcgtgttcttgtgtgtgttgttttggctactaacatcaaaatcttctcttgcagatttgcatctagtttactaagacaagagatgaagcagatcatcatcaatcttgagacacctcagatcaaatctctagagaaatctggaggcaaagacgaaatcgaattggcatcaagagaaagcgttgtgatgcaactacaagaaggaaaggcctactcgctgcatcaggcgcgagctctgaagcgtttgctttgatcatcgatgggaaatcgctaacctacgccctcgaggacgaaatcaagaaaatgtttcttgatcttgccactagttgtgcctctgtgatatgctgtagatcatcacctaaacagaaagcattggtacattctttaaatcttgatgatattttttttaatgttttttccagtttcttgtgttttgatgatattttcgggtttctaggtaacgcgactggttaagtccggaactgggaaaacaactttagcaattggcgatggagcaaacgatgtaggtatgcttcaagaagcagacattggtgtaggaataagcggtgttgaaggaatgcaagcagtaatgtctagtgatattgccattgcccaattccgatatctagaacgtttattgcttgtccatggtcattggtgttacagcagaatcgcatccatggtaaaaagactgaaacttttcagtcagaaaattctcttatttcatcattcatgtcaatctttttcttaccctggtttcgccttttgtagatatgttacttcttctacaagaacatcaccttcggagtcacggtgttcttatatgaagcatatacttccttctctggacaaccagcatataacgactggtttctttctcttttcaacgtcttcttctcctctcttcccgtcattgccctaggagtctttgatcaagacgtctcagctcgcttctgttacaaggg

SEQ ID NO: 38203 - DNA, 3368 bp, Arabidopsis thaliana landsberg
ccccccttggaatcaaagcaatctatattaatttttctgaacgtcttcttctgcaaaatttaatcatcaaatggttgtgatgggaaggccatcttttttccccctcttcttttctattttttagtcgttgcttgttcaaccatttgatactgttgttacttgttagtggtatttatcatgaaatcatgaatgcatacattttcttatttgttaatttaagaaacatatacttgttgcaaactattaaaaaaggctttgaaaaaaaaaacgtaaatattaagcaaaaagtgaaccctaataaatttaactcaaacccccaaaacgtctatctctcgattagattttcaccaaacacttcgtcttttccattcgatttaacaatgactgacttgaaacaatcatgccaatgtttttgaacaaaaaagatatatagtttacgactttatattattcagtacgtaattagtaaaaagttaaaatttaatttaaaaaaatacaatgttttgcttcaactgcattatattatgagtatttttgcaactttatattatgagtatttttgcaagaactacagcttaaatggaaaatactgtggaaacacatggttggataatatactgtaaacattttcttcctaatatccggtattaaagatatatacataattttttttttgtttaagtttcatattttctcaaaagaaatgtgatatgtatattagacttatatacaaatggtttgttccataacgaaaagttgaaacatttttttcctcgttgcaaaagattaatcatggtcagaagaaatatgttcttcttcctttgcttcgatcctatgcaaagacgactcaccactttcctcgccggcatcatcatctgaataaacactttggtcttcagatttcgagctatgaatgtgctcaagccgagtttcatgattctcctcctcctcttcctcatcatcatcatcatgagaaagactattgattcgcatgctagtgtttcttggagaatcatcgtgatcactatagctccgtgtttcatgattctcctcctcgtcttcctccttatcatcatgagcaagactattgattcgcatgcttgtgtttcttgacgaatcatcgtgatctctaccgctgtcataccgcgaaaaagtgctttcttcgtttgatttacaactgcttttactgcttagcttctcgttatcttcttcctcagagctataattactgtaacttatcttcaagctctgagcagttgcgtttgtttcatcaattgatcttctctcacttccagagtcagaggatgagctactagactccctggctttctctaactgagactgttcctcttcttgatccttttcggagtttgaatcagactcatcatctgaatctgtcgcggtttcttcctgctcttgtcttttcttacttgttgattcttcttctttttctgcttgttgttccttttcttcttcttcatcctccgagtctgatgaagaactggatttgttgcctacatctttccgagaaatacaaaatggagttacagaacaagaaccgtgtctgcttagagcaatcgacatacttttgtccctgaacgattccattggaaccgtggctggaataccatcttctgtagacattgaaaggaagctaagagcaaccattacatcactgattaaaggtcgaactattggttcttcttgtagacacattgccgctattgctacagcttggttcaaacttttttcctggaactcccctcgaagaagtggatccgctagctcggggaatctatttggttctctgaaaatcggttgtgcctaaaccacaattgtagatggttaagattaatgaattttaagcatgtaaggcttttacggttaggattgaataagtattgttggtttaattccaatttacagtttgattactcttatatgttgattaaaatgaaaatgtatttaaaagttaaagatggtacttacccaagtaaccagattttgttcatgacatggtctcgttgtgtcgataactcgcttaccggttatgagttccaacaacacaaccccaaaactatatacatcagatttaaccgtcagctgaccggttttgtgatactcaggagcgcaataaccataagttcccactactcgggaagatacattttgtgtgtccccaaccgaaccaagttttgccaaaccaaaatctgatagttttgcatcaaaatctacattaagcaatatatttgacgatttgaaatctcgatatatcaccggagggtttgccttttcgtggagatattcgagcccttttgcggctcctaaggcaatccttatccgagagttccagtccaatggttgttgtcctactacaacatctggttgatcaatcaaataattaaacgggttccactactatatagtacaaaattctaaattcctaaaaccaaaaaaaaaattagttttaaattttgagtgaaattaaactatccggctcagtccaacaattttgacctaataataaaagcggacgaaagaaagtgctttagggattgagaagaatataccaaggagatgatcttcaagggaaccaagaggcatgaactcgtgaacaagaagtctctggtctccatcaaggcaatatccaatgagattggcaaggttgggatgatgaagaagactcaacctgaagatctctaccagaaactctctgttcccttgtaatccgttacggtctagttgcttcacagctaccacctaaagtcaccatttcaacaaacaaataagaccaaagccattgattaatagaacaactctctctcattttcttactttatttttacctgtcctgtcttctccatctttcctttgtaaaccctcccaaaccctccttctccgatcaagaactcttgcctgaaactgttggtagcggttgctaattcacgaaatttgaaactctttgccttgatatttttcggtgattctttgttcatccccaccgcttcccatgttgttatctgcctacgatcattccctgttaacaaatttggaaaatgttaatgaaaaatgaccgatttctcgaagttttattacgactagagagcgcttacgtggtaggttttgttgttcataaggagcagtcatagatgagccttcattctctctacttttgttgttcgtcgatggacccaagaaacaactcatttctaaagaatccaaaacctaagctaaaacttagttttgtaggatctctcttgttagtttaagatgaaattttgaaaagtttcttgatgggtttcacaagaacaacataaagtatgacagagatcctacaaaacccgtttttatttatttatttatccaga

SEQ ID NO: 38204 - DNA, 5097 bp, Arabidopsis thaliana landsberg
atgaataccgagtggtgctagaatcgcagctgtttatcagaggaagtcagatgatatcagtccatcgattgctttctgtaagaggaatggtcttgagagaagctcgtttagaattggtgaaccacaagatgctccggaatcatgtgtcaatctgaaatggaattctgcatcagatcttcttgcaggggttgttagttgtagagcatatgatgccattagggtgtggttctttagcaacagcctctggtacctgaaacaggagattaggtatccaagggaagctggggtaacagtcatgtgggatccaccatagccactgcagttaatatgttggactctgtcagggcaggtgtctgttcgccactttatgtgggtaacagcgatcatggaggactcaacagcctttgtcatagataactccaagatactcgtgacaccactatctttgtccttgatgccacctcctatgtatttgttcagccttagtttttcttctgctgtcagacatatagcatcttactcaaggacttctaagaattgtctggctgtgtttttgtcagatggaaacctgtcttttgttgagttccctgcacctaatacttgggaagatctcgaaggcaaagacttcagtgtggaaatttcagactgtaaaacagcactgggctcttttgtacatcttctatggttggatgtccactcacttctgtgtgtctccgcttatggttctagccacaacaagtgtctctcttcgggagggtatgacacagagcttcatggttcttatttacaagaagttgaagtagtctgtcatgaggatcatgttcctgatcaagtgacttgctctggctttaaggctagcattactttccagacacttctcgaatcaccggtcctggctcttgcctggaatcctagtaagcgtgattcagcctttgtggagtttgagggtgggaaagtgcttggatatgcgtcaaggtcagaacttatggaaactcgtagtagtgatgatagtgtatgttttccatcgacttgtccttgggtgagggtggcacaggttgatgctagtggggtgcataaacccttgatatgtgggcttgatgatatgggtagactgtccatcaacgggaagaacctatgtaataactgtagcagtttctcattttattcagagttggccaatgaagtagttacccatctgattattttgaccaaacaggattttctctttattgtcgataccaaggatgtactgaagggagatgtggcacttggaaatgtgttctttgttattgatggtagaaggcgagatgaggaaaatatgagctatgttaatatttgggaaagaggtgcaaaagtgataggagtcctcaatggagatgaagctgctgtgatattacaaactatgcgggggaatctcgaatgcatatatcccagaaagctggtcctctcttccattacgaatgcgttagctcagcaacggttcaaagatgcatttaacttggtaaggcgtcatagaatcgactttaatgttatcgtggatctatatgggtggcaggcatttctacagtcagccgtagcatttgttgagcaagtaaacaatttgaaccatgttacagaatttgtttgtgccatgaagaatgaagatgttacagaaacgctgtacaaaaagttttccttttccaaaaagggagacgaggtttttcgtgtgaaagatagttgcagtaacaaagtatcatcagttctacaggcaattaggaaggcccttgaagaacatatcccagaaagtccatcaagggaactctgtattttgaccactcttgcccgaagtgatccaccagctatcgaagaatctcttttgaggataaaatctgttcgtgaaatggagttgctaaactcttctgatgatataaggaaaaagtcttgtccatctgcagaagaagccttgaaacatcttctgtggttattggattctgaggctgtctttgaagctgccttaggtctttatgatctgaaccttgcagctattgtggcactcaattcccagcgtgatccaaaagaatttttaccttatctccaggagctggaaaaaatgcccgaatccctgatgcatttcaagattgacattaaattgcagcgttttgatagtgctcttaggaacattgtatcagcaggggttggctactttcctgattgcatgaacttaataaagaaaaaccctcaacttttcccgctgggcctcctgctaattactgatcctgagaagaaactagttgttctagaggcttgggcagatcacctcattgatgaaaaacgttttgaggatgctgctactacgtacctatgttgctgtaaactggaaaaggcttcaaaggcatatcgtgaatgtggtgactggagtggggtactccgagtgggggcgctaatgaaattaggtaaagatgagatcttgaaattggcatatgaactctgtgaagaggtcaatgctcttgggaaaccagcggaagcagcaaaaatagcgcttgagtattgcagcgatataagcggtggaattagtttgcttatcaatgcgagggaatgggaagaggctttaagggttgcatttttgcatacagcagatgatagaatctcagtggtgaaaagttctgctttggagtgtgctagtggtctagtcagtgcattcagagaatcgatagacaaggtaggatttatctccactcgctatgtaactctccgacatagggtgtcactgcttcaaccacaaattcatcgagttacgacacttggagaaaataataccacaaaactcactctcgggtcgtcaccctaaagcgtgctctcggatcgtcacccgaaaccaccgtacccctcgtactctaaagacaccatgtccctcgagttaccggtacatcaggagcataccccgctcctcatgagtcgttgggaccctcatgtccctcgagcaaacaatactaaacgcttccgaccatatctccagactctctcatggattcgagtaagacacctttttgcctcaccatccatcatatcccctcgagaacatccttatgaccaactcccggccatctcgtaaacacacctctctcttaggttgtttactcaaactttccaaaaatagacaagtcctttctaggaaactttcaatttttggaaaccgcacaacacattcttaaataagacaactcaagttaaattttagaaaaaaaaatactcatcttattaatcatcaaatgtcatgatcgttacaactccaaacgaaaatacaaatgaaagagaaataagaacaacaactcaaaagctcaaaaactcaacatcactgaaactggaaaccaaggataggcaaactcatgcagtaacctgcttctcgaaccacttctcgaaccttgccttcatcctcgcctctggctcccaagtctcctctctcacaccatcgcagtcccacaggactttgatcaaaggaatcttctttcgccgaagttccttaactctttgcaactcaatgtagttaacagtggcaacaaatttgagcagatttagtgtggttacatattgacaatgggcacaaaccattttatgtggattagggatccttcacttgttttttttctctatcatctttacgttgttaaaatattttgttatcaattttttggaggtttggttgtagtcgattaatttggtttagaatcatctttaggtggttttgtttgggtgcatatggtggtacggtgttttacgatacctctcagctctcgcaaaaaaaaaattgtcaacccttacaaataacacggaataaccttatctaaaaaacttgccaaactacctcaatagcaaaagtaaacaatactccaaaataactctgcaataaatacaaataaatgttttaccaaaatagctaagtagaaaaataaacaacatgtcaaaataactactcactagcaaaagtaaacaacactataaaatcactcactagccaaaaataattaacatgccaagaatataaattaaattaagattgagtcaataacaacacgtaaccaccttccatatatataaatatattttcattaaaatacttaaagacacaaagttccatcaaatgtgttgacttcaaaatttgtatgttattttgttgacaaaaataagattcaaacttatggatttaataagaaaaatcatgaaattctaataaatgagggtaaaaacatgggactcatttgttgttcttaaacaatataaaaagagattcatgcaaactatacatatccatccaaacaacataaatcatatttctgtttctgagaggttttttcaactctttattgcttactcaacgtttcaatttgtttttgttctcctttctctataaactgatgacaacctcgttgttgtcacgattcaagacaagatatctttgatcattttaattgttattttttcccatttttctattttttctacatgtaagaaaaatgagttatacatagaaacatgacttgttttatatgatgcagatttatactccattgttggtctccttcaatctctaacaatgaatggatccgacaatatcactccgtcccgaccatggtcgataactctgccttcgcttgccttctcctccttgcccccattgagcccttctccgtcgtcatcccgtcgcaattcattaccattgatgaacccgtcaacttctatggagagtagagactcttccatgaggtttaagaaaaactctttattgcctcctttgggtgtgaagaaaatagcacccaaagatattggacccctaaagagacactacatgagtgtttcaatggatagttgtttgagtgacttactgaagctaactccttctccgggtaacactccatcttcaagatcggttaatggagaccagaatgcttccaggctagagtttgatgccaatgattatattgatgatgaattgaataagatagcaaagagtaacaaacttaaagaggttgcatcggatcctaaggaagtcagaaggtaagtgaacatgtgtgacaaaattattatttgtgctttttgttttttttttgtattcctttttta

SEQ ID NO: 38205 - DNA, 4302 bp, Arabidopsis thaliana landsberg
  unsure (1)..(4302): unsure at all n locations
tgaagatgccttccagagccgtgacatggatgattaccctactttgccggtcgcctggctttatcagaatgctcaacagctgctgcttcgcaagcttcaccatgtagttcttctgctactagctgccacaatttagaggaggtaagcaaatttcagcaatttctgaaactcaatttaattggaagttcaaaaaaggaacaatgcaaagagtcgcatgtagaaccaagaaacagcattcaaacggcaggaatggtgaaaccttctaattcatgcatagtaactctaataacaagttcatacaaataagataaatcaagaatcagaaaacttatatgacagggccccaagatcacattgtccacggggtatcgcaaaaagaaaaagaaataccatggtattaccaactaaattaggaaaagaacaatcagtacagactaaaatttctgaatctcaattaatgcaatcataccttttcgaactcttcaagttttggcacaattttcttgatagcttcctcagaaacctcgagacaagcttcctcactgtcactcccatctgctttcgcttcagaatcctcttcgctctgagcactagaatcttcctcagcatcagactctgtcgtggattcatctgcttccgcttctgcgttctcaccatcagattcagattcttcattgtagtcatcagcaaaatcctgatccagaattaaaaaatattacataaacaccaaaaagaacgaaagaaaaatggtggcatgttataggcaaattactcataagaatctcacatatggggcaagaacgctgctgtcaagaaccaacaggggaacttgtacatctcgagcaagtgctcgtaccaacctctcccggtaaagctcagtacctgaataaaattcaaatttcttattggtcatctaacatttcctcaatatttttacttgataacagaagagcaacatcaaatcctggtctgccatttttattctatagtcaataacaaacctggaacactctggagcaatattcttccacttgaagaatctaaacgggcaccatatatggaagcggcattcttttgtcttatatgtgaggtaacacattccaccaaaatatctttcgtgtggtcgctgtgaaaagataatgagcagaatccataagcagaaatggagaaagaaacacaacaagagagaaaaaaaaacatgttgtagattattactggatgtagtaagggaaggtctcccaagaaagctgtattttttcccaaggttggattctccgtaagaactcgtttttgaatctttctcgtctattagcgaaaggtgactccttctttttgcattcactagcaagcttctgattattgagccactctatttgggcttgttctcccagttgagcatgagaatccaaatgcccaacaccgttattacttttctccttcccggtttttccatcatctacaccattctctttgttcaaagagatatgtttatcctcactagcattccttccatcaccctcagaactaaaactacgcaactggctattcttcaaaatacttaaatgatttcccgaggcaatagtaccaccgcggggagaaaatgaaccaagtagagactttcttgtcaaattttcactattggttaatgtatttgtgaatccacaatatctggaaaccgtatagtcacgaacgactggcctaactaagtacttggcttgctgcaataccaaaccccatctctggttcctctttaatgcccttgtatacatcacaaagtcccttctcttccaatataactacaaaaaaaaaaacagagatcattgatttagaatcactttcagggtccatttcttgtactatccaacctaaatgcattgcaacatgtaattgcaccattaaaaaaaaaaaaaaacgagatcaatatcaacgcaaaacatactatagtaactcggaaagaaacatagattctatacaatttatttcgactagaggaataacaacacacttcagggaattaattgattaagaacaggcatcaattaaaatgaacgattatgacgcataacggaaaatccaatgtaacaacgaatatgaggcatcgatatagaaatgatgatatattcagcttttgtcatccataactataacgaaacacagacccgtttcacagagatggacaacaaaactggttctattcatcccccaagctctaagaatcaggcttggtgcaaagaggagatgtaattaggaacgagatagggtgaagaagagagagaaaatcccgacagaggagagagagataaagaccgatctaaagtctgtaggttcttcttctgaagctgaagctgggttcgaagttcagcttcgttgatgcagtgttgtcgttttgacgcaaaattgctacttgccttcctatggatatgggcctaactataaaggcccactaaacatataagagtcggtattttcctgacaaaaaagccctaacaagttgtcggatttacaatcgtacccctatttttaagccgcgcttatctcgaacctatacctgtagagaggaaataagcatttgggggaaatcaatcgaaaaccctaggagagataaaaacaaaaatctagacggagatttatggcgacagcgaatcctggccgtggaggtggtagaagaggcggtggagctatggatgacgataagttggtcttcgagactagcgatggaattgagcccatcacgagcttcaatgatatgggcattaaggaagatgtgcttcgcggtgtctacgaatatggattcgagaagccttccgcgattcagcagagggctgttatgccgattcttcaaggacgtgatgttattgctcaagctcagtccgggtaccgggaagacatctatgattgctctctccgtttgtcaagtcgttgatacttcttctagagagtatgttttctgttcctttagctggattaaacccttcatttcaattttgaactttacttgctttgctcggattgttctctaacctaaatcattaggttttgtttcttatcgatttcacaaatttggtgggatttgtttgtctgacttgtagaatagatgaacgaattatgattcattaatgttcaatcaaaatgacaatgaaaatttgtgatagttattagcttttcggttagagtgattgagtaatactttcttttaggctgcaagatctttttatatgtgtactcatgtatttggtatctcggactgcagggttcaggccttgatattatccccaacaagagagctggctacacaaacagagaagacgatacaagctattggattacatgccaatattcaggcacatgcttgcatcggtgggaatagtgttggagaagacatcaggaagctggagcatggtgttcatgttgtgtctgggacacctggtcgtgtctgtgacatgataaagaggagaagtcttcgtaccagagctattaaacttctgattcttgatgaatcagatgaaatgctgagcagagggttcaaggaccagatctatgatgtttacagatatcttccaccagatcttcaggtgcaatttcactgctcaatattatgtgttggctaacttctagtttctttggatgttattgcattagctttcttattttatggattggcttcttgaactcttatgtggattgagagaattataagttgttaaaaaccttttagccactgttaagttgcttgaatgtcttatgtgtagatttggtagctattatctgtattatgaacagctaaattccactctataatagttcaatcctaatacgttttttttgtaggtttgcttggtttctgcaactcttcctcacgagattttggagatgacatccaagtttatgacagaaccagtgaagatacttgtgaagcgtgatgagttgactcttgaagtatgtttcttcttatgcttctgtatgctcgttcatgtttacttttacagtaggttgacactcatattcttcattggctatctttttgtgtacaatcttttcagggaatcaaacaattttttgttgctgttgagaaggaagagtggaaatttgatacactctgtgatctttatgacacgcttactatcactcaagctgttatcttctgcaatactaaacgaaaggtaattgtggttctcatgcaactgtatctcaaacttgttaacattaagcttctagcactgctatctgaacttgatttgcaatcttgtaattgctcaaaaattcatactatctngtgaatatatgtatttctttatttttaaa

SEQ ID NO: 38206 - DNA, 3086 bp, Arabidopsis thaliana landsberg
  unsure (1)..(3086): unsure at all n locations
ggttcacatcaccacattccccgttggcaacgccaccacggcgaggtccttcacgaccaccgccaacacggtatccaccaacagacccaccacggcttgctccatcagcatcttcagaaggtctcctgtatcctccagaaaatccattctcatttccaggagcatcattgttcctgttgtcccggttgtatccaccattacccctgccacgggaaaatccaccacgtccaccagtcccaccacgacctccttgaggagcattcctcgactccctcactacattcataacaaaaagctttcaatatatatacttatcctaatctaacaaagtattaagctttaccctaatctaacaaagcagtagagaaacaaaataagatacggaagaaactaacaaagcagcaaatgaaaaaagcacacacatttgactatggatctttcatgacaaccataaacaaacttcactagaactaatcaatcaaacactagacaaaacacagctgaatctaaatctgttaagtatcaacataaaggaaagaacttttacctgcttgagaaggaggagccggcttggttgggaacttagcggccttaggaggctgaacagcagcagcagctttctcgactttctgagacaaagccacagcgagctggcttggatcctcagcatcatcatccaacaaatcaaaagggttcaaagttgccatatcttaaaacaatccaagtgattaaaaaacctagctttttattccacacagagagataacaccactagtgactagaccaagccatgggtggattattaacagatctaaagaaaacgtcaaaatgaaggagacgaaatggggtagaaaggagaacttgttggttggtgagagaaagaaatgataagtaaataaatattagaaatgaaaataaaatgtgtggaaatttggaatactcaataaaacggtggtgatgatcagaatacttaacctaaggcatatctttttttttgcgcatcctaaggcatatctaaacaaaagtttatttttcattattggattatcttcctgtccagtgtcccctaccaaaaaaaaaaagcaatctattttagcaaattttggtcatttatgcccacttataactactttttttttgcaattttaacgataaagtgcttctatcagtctatgtatatgaaaatatcattacaatttataatatatttttgcattatgaagagatttttatacataagactattgagttttctaacataatacttaccgtctgatatataggcagaattagattaattcactttaggctcataattttttttttctagatcatagataggtttaaaccaaacagaaccaaaagatatagcaatttggttttttaagtagaatttttcttttagttcgattctatttagaaaaatttcatgcatggtttcaatcattatagcaaaaaaaaaagttttttaagcagcaaacacgttagaaccaaaaaggtacaatatccacatgttgaaaacgtgaaagctatttttatgaagtggataaatgttagaatctcaatgcaagcaattgtgtgataagactcagatgatgatccagactcttatgatgattcagacttagtcctactggatgtaacaattctactatcaaataaacaataacttatttcaatattggttattgtgttaattgttggttaaaacatactagtcttccatttgtcgttttaataaaatatggtcatttagccgtaccccgtacttaaaaaaaaaatagtttttgcagttcatacattaaagggttcctatgtatatatgaacataattcatcagtgtcattttaattgatatttaaggtttaaaaatataaattatgttattttctgttttctctatagtaaaatttaatttttatcgaatgatttagccaataacgtatgtaaatacagtactaacaacaccatctatttcatcttattttatttacaacttttttgtgcaaaaatcacatttgttaaaacatacgcgaaaagtctaaattgcacaactttctaatcttttattatcaccaatggcgacaaagaaatcataacaaacaaataaataaataattcctcccaccggtaatgaatatcttaatcttagaaaaaataaataaataaaataaacaaatacggtttttgtaattagaaaaaataaacaaatacttaagaagtattaaaagagaacaaatcttttttctttaataaatcaaagctcatgaagacgacggactaggcaaaacatctccgttatcatgaaaagtacggttaagtcttaaagactttcctgtgtacaaaactttgacgtttgaccgttgctcatccaacagtttccttaaactccgtttcgcgtttgcccgaaacggacagttagatgccaaaaacccgtctactaagtgcaagtacgcctcaaggtcatgacaacacgccacgtcagcgtttggtttcaagtacggagacatcttcatgtctacacgcagctctgctcccacatgcgagtaagcccatggattgttcctctccaccatttccattataccccctggacttctcccgttattacgatgttgcccctgcttatcattatcggagaatattccgggtactttcgtcaccacgtcttggctgttcacgacgcgtaggactttcactcccttcgaatctagcctatcagcaaactcacggttcccgactcgaggtccgccgaaggaaaacaccgcaaccggaggcgcgtgtggaacacgctcggcgatgtcatcggcggcaagaagggctattgcggcaccgaggctgtggccggtgacgcttatgctcagctcctctcctgcgtagagatcaacgagccggctgatttctccgaccaacgactcggccagacttggtgcgtatnnnnnnnnnnnnnnnnnnnggctattaaatccgcattccactttgggttgagtcgggtcggattgatcgggtgtgggctcaggcattgaaacgagattgggcctgaaatctctgaccattcgagcacgttgcgggtcacggagagcgat

SEQ ID NO: 38207 - DNA, 2255 bp, Arabidopsis thaliana landsberg
taaatgagaggtttgcagaaggaaaaaggattggtaaagaggatgttaagccttgcttacttctcatcgacgaacgggatcttctaggaactagaaaccagtctgttttatacaacattcttgattggcctaccaagcctaactccaaattagttgtgttgggaatagcaaacactatggatcttccagagaagctgcttcctcggatttctagccgaatgggtatacagagactatgtttcggtccttataaccacactcagctacaagaaatcatttctacaaggttgaatggaatagatgctttcgagaagacagctattgaatttgcttcgagaaaagtagctgcgatttcaggagatgcaagacgtgcgcttgagatatgcaggcgtgctgcagaagtagcggatcaccgtctaaatactaacaaatccgcaaagaatcagctggtgattatggcagatgttgaagcagctatccaagagatgtttcaggcacctcatattcaagtgatgaagagcgtgtcaaaactgagtaaaatcttcttgacggctatggttcatgagctttacaaaacaggaatggcagagacaacatttgaccgagtggcaacgacagtagcatctatttgctttactaatggagaagcttttccaggttgggatatacttctcaaaatcagttgcgatcttggtgaatgtagaatcattctctgtgagcctggagagaagcatagattccagaagctgcagctaaattttccaagtgatgatgttgcttttgcattgaaagacaataaggatcttccatggctggccaattacttgtgagtttttttctagtttattgaatcattcaactttctttaaatttaaagactagttttgattcgaatgtgatatgattatttggacttgtatctgtttcgaaaatgtgtcatgtatcctttatttgtgaaattacatacaaaagttgtattttttttttttctaaagagagtatttttttttatgaactaattatggtgaggaatggtatatcaatttttttctttcacatttgcgctatgttttttttttttttgtcggccaaaagttcatttagtaagcccaatgggcagttacagagggaaaagctcaatacagtacagacacaatttaaacggcccagattaaacctaatctttggatgctaacacgtgatttaacgccgggagtgtaccaagctgcgccgtaagcgtttgagcgtctgacgatgcatcgtgttgaacaccgtcgactccgttcagccatcgccgattagtcctgaaacggtggatagtctcctcccatctggtgatctcgaatccagacttaagaaaagtcgaaaatcttctggataaatctatgagggccgcttcaaaaattatctgagtattaccatcgtcggggaagctccatctctgacaacacctaaggagatgtagtcggttttgtgctcatatatgagcaaaagggattgatgaagattttattcctcgaacttgattggctaaaacaaaggatttgtgaaggtaacagagacatcgacaaaccatggatagagatctgaaaactggatagaaccggtaacaaaagtctgacttaagtcagaatttattgagttcgcttaagcaaaatatacaaaagatccgattaaacgaaacaaaagaaaagtaaaaagctaaatctccgattagaacggagaagagagctctctctctctaaaggatatgagagagataagagagagaagcttttttaaaggttgcggtaatggaccgactttcaaactgatgttttaaataacatttttctactaaataataaacaaaaacatataaaaaaaataaatacacaaccacgaacgatcgacaattgggctcaatcggatggaaaacccacatagcattcatttaattcatataaaaaccatttcagcgagaaaagatgtaattgggcttttccttaccggatttgaaagtgagcccaatagatataaaccctaagaactcagtaattaaagcccaaaacgacaaaaccccgttttcttcgctttacttaaaagaaaacaaagctcccgtcgccgccggtatcacgacgaccaccgggcgataccctaaatttaaacgttgatttcactttggcaaagtttggaatcctttccccaacttttgatttcccgatttttgtttaaaaaaattttggccaggatttaaaagaggttttttctttttt

SEQ ID NO: 38208 - DNA, 3004 bp, Arabidopsis thaliana landsberg
tttcttcttctgtttcttctgcaggaactggagtgatttgatctgccaatgaaaacagaagaaataaggaacataggagtgtgaacttgccgtttcattgataaaaaaaaacaattttctttgaagtgataaagcttctcgtgaatcaatctattccatcattatccatgaattctaaaagcagccggcaaaaacaaatagagctcaaaacttcaatgaaagttagaaataataccgccatttgcttcatttgaaatgtgatttttgttgtcgtcaaaagagacagctcgtacaatcactctgttcatggacaaggatcttgaaacagatgcatgaagaccatctttctgcatcaaacaaattccaatcttatactttcgaaaagaagctatttgaagaaaattaaaatacttttgcacactacaattaaaatgagactcacattagacttaggctgttcactatgcaccacagcggaaacaggcgttgttgatacaaccagagacagtttagcagaattactagaaggaagtgacaaacaccttttccagtaaggcgatgtgatcggacttgcaacaagaggcttttcactggtttctgaaacactaggacttagtagcaatcttctctcatagtttggtagagaagctttccttttcagactcagatttctcaaaattcctaaactaggcgtcggttttggtggtatttggatagaaacatccaattggcttccacttggctgagatctggatacatcttcaacagattgttctttaacctgataacaatcattgattaaaacctcatactgataaataaaaaaatgaatctttctacagtgaagcaaccaagttaacaatcatagcaatcagggactgaagaacactaagtatgcaattctccatttcctttttttctgattggttaatttcagataccagtgataaaccctagattattcacaaaatgaaattcatgaaacgataccaaaccaattgagcaagaaatgtaaaaccctttagcgattctgaaaaatatacatttaaaatcacactaacggagactttgtattataaagatttcaactttaacctagaatctagcaaaagaattacaaaaatttaagatttcgaatacctgagaagaagaagaagaagaagaagaagaagaagaagaagaagaagaagaaccagtagaagaatctttagcgagaacaaaatttctgggcggttgaattgaagagccttccatcataatcgaaccaatagaaaccaaaacaattttgaagaaatcaagtttgatcgacaaaaaaatctgagccagggagagaagcaatcaatctaaagagatttgagaaatttgtcgtttattaatatgtagctaaaatccgacaagagagattttttttattaatgtgtgtgtgtatgcaactatgcatgcatcagaagaatccagcatttttactgctctttaattacccgcttaattcaattaccagtcaaactcactcttcctctgttcttcagttacccatttactttaattcgactaaaccgaactaaaccaaacaaaaatgcttacccatttaatttatttcccatcaatatcacttaccaaatacaaaataagagtgtattcaacattcatatcaattgggcgccgacccagtctgtgtccggatagcccattatataacttttgggctaattatttgcaaaaaaaaaaaaaaaaaaccgcgagcttgtgagacataagagagaagacgaacagagtgttcacaaaccctaacatttcagaaagacgattactcgataacacagaagagagattaaatggtaaatctcatgcggaagttcgcaaaatcgtaagttcctctttcatatcattatgatatttgaccatttcgtagttaggtttcgggattgctttgataaggtagttggattctctccatttgtaataaccgtatcagttttttgaatttcaggattggtagaccgggaacagaattttggagaggggaagatatgataagcgcattacctgatcatttgctatgtcatatacttatttttctttctactgatgaatctgttttgacgagtgttttgtcttctagatggagaaatctctggaaatgggttcctaggttagacttaaacacctctgatttcccataccctaatgacgtaacttgtgcggctttcatcgacaagtttctgaatctttatatcgaatcctacttgcgggaattcaagttaagaattgaccaagctaactttcgcagtaatgtatctctttatgagccgtgtcttggtgtagtgattaagaagcccaacgttcgacatttccaagttgagagtgatctgcttgagcattggtgcactagtgagatacgattaaccctttccgcttgccaggcattggtatgcttaaagctccatttagtatggctgaatgactttgagtctctatctttgccctgtctcaagatcatgtacttggaagacgttttatttcctagcgatgcggctgcagagacgctaatctcgtgctctccagttcttgaagatttaaaaataagcctccatagagatgatgttgtagttgttctacgtgtctactcacagtcactaaagagcttcactctaaaacgggcggttcctgtttatgctataaacggtgcacatacagtgttggtcgatactccgaggcttgtgtatatgagtctcatagattaccaattcaaaagcttcaagataatcagcatgagtgactatgtcaaggttgatcttgatgtcgactttgaactgatgcgtgatgaattatcggaaagaaatatcgtctatgatcttctcaacaatttttcaggtgttagagatatgaccatctcgtggacaactcttaaggtatgtaaagtaaaactgtttacaagctctaaaatttccctttatcattctttttctcaactttcatgttctgtttactcttctttttgctc

SEQ ID NO: 38209 - DNA, 2614 bp, Arabidopsis thaliana landsberg
catgaacatgttactcatgataagatcttgaacggggaaatcatgctaagtagctttatcgtcttcgtccatggtgtccacttgtgtcttctggatccccagtcaacttcatgggcttctttctgtatcaggatccgacgagagtgatcccttgtcatcattcatatcagaaccctctgtatcagaatctgagacaggattgtgtttttccttctcatgatcatcatcagagtcagaacaactctctgtctctgagtccgaacgagtaccatgttttatcttcccttgatcagtgatccccactggctcgttaataactccacgctctgcatcatccttgttagtgaccaggacccctggacttgtcggtttagtttgactttcccctatctgaccagcagaatcctgtactatggtcacttccttgattttttgagtctgactctcttcatcttctctacttctttcagtttcgttttctccatgtacagaaggattcgtgctattagcccaactccccgcaacttcagaagctagaagatccgacgtccctatagtacctactccctctatgtcttgagtatcccttcgatcgttcgggttccttaacaagagaacagctccttcaatctgaacactttcatgtacctgagtttcacaatctatttgcattgtatcaccagctaaaataatagacttcctcagatgatcatttctctcataatcatttcctggactttgagtttcattgacttgctctgttcctacagggtctgttcccgaagtgggtgctgtaccaataccttctatatctgagccaaagccaccctttgcaactttatcagagcttggatactctgcttcttgggtgttttggccttcctgactcatgatttcacaatcatgcttttgggtagcatctgcatcctcacatgacgtatccacaacttcatttctggtagacctttgccctgaagtggacgagcttgccctggcagcaaaattcaaatgggaagttgctcttttatctccctgcgtattagctctgttgggacttctgtttattggattaagatcaatatctagtgaagtattgtcacaattatcctcatcttctagagttctctgcatagtcttgagctgttcctgctgctttgcaaacaaagccgagatctcctcagtcgtagaataaaatgcccgcatctgagtttcactgcatgaagattccgtgtgtcaatagttagaccaatcaaatttgcgtgaaatgaatcttaatagtttaaggcaacattttacttgacggttgaaggtgttaaacagaaagtaggatacccaaccaatcatacacactagaaatagcagcctaacgttattataccatgcatgcaaatgttcttaccggagcatgattctttcccttgcaccacggtgtctctgtctttcgacgtcaaggtctcgaacagcagcacttatctctagttctaaggcagacactttcgcccatgcttcttctcgagctgcctgctaacataacaaagacagtctcagcttaaaaatacaatggagactacgcaaaaaaagattttagctacatgtccacaatcgttaaattaaaagcatggcatcatattttcgtagcagaaatcagaggcgggaaccagaagcatgtcattaatggaaaactgggaaaaaagtttaaggcgcacaaatttgtttccattcttaccttttcactgtccagatccttttgcagtctttttacttgaaggtcaagttcttccagtttctgctccaaaagattttttgtgcacccgttagaacagaaataaaagagagaaaccatgcagaataagagggaaattgcattcaggtcacgtactttttgtgcatcagcaaaagcaagctgctcctcagaaacttgagcttctagcagacggtttctattctcagaacacaccaacctctgccttgtatcttcctataaaacaccacaaaaattctcaaatgacaaatggtaaataatttgagtacaagtttttgtgatcaagaggctaattgtgaaataaattagaataacataccaattttgacatcaatgtttcgacttgcattgacttttctttctctgactcctaaaatatttgccaagtaaacttgtcttattcgaaggacataataatgggaaaaattaattcatacacaactaagtctttacataccttcattttgttgattacttcttgttgttccctctcgtgtctcatagcagcatcagaaaatcttttcaattcttcctgagcttcaatttggcatctatgtatagcagctctcagttcaccagtggcagttgctcgttcctatctcatttggtctctctattcattcaacaccgttttcagtacagccatagatgccagttgactgaaaacaacatgtcgctattccttatggtcacacatgcaatgctcagccgatgtcagcatagtcacagcggatcttttataagggtacacatctcaatatgaaataaaccctttgtccatgtcccagtgcagactctcagaccaactgtcctgcaaaagaaacagagcagtgtaaatgtatgatggtgcac

SEQ ID NO: 38210 - DNA, 2032 bp, Arabidopsis thaliana landsberg
agagtcttatagttttttatacgttccttaatgaacactctaaagacaacgaatagtcgaccatgtgtttcatgcaccttatatcatatgaaatcaatagtacaattactttactatttatgtctgaaaatatcttgttttttttcttttctttttgtgaaattgattttacaaccgttgaggagacttattctttgacgaaggcggccttggagcaattaggtcgtcacattcacattttcaattattattttgcttcatgtacatacgtagttaccctaattaccatttaactatcccttgtaaccaaaaagaaaaatgcattaactatcttaataaatgatagttaccaataagagccaacgtaaaaatttgattctcgaatagtatgaggacacaagtaaggcatggataccccacaccttggcctacgtcttcactgaccactccagaaatagcacttcaaaacaaaatttacaaaatttcataatgtaccaaaaaaataagtaataataaggaagaaaaaaggaaaaaagagagagaatattacgaattattctttgcttgagcgcagaaacagttcttcttcgacttcttttctctgtctttcttctttatgcttagtgttcaatcactcgtttacttgtgaagattatggatctctgattaaagtttgtttctcgtatttattccaaggttgcttcttctttttctcacttgcgtattttatttgttggttttctttttttttcttacatatataatctttaattctctgttcactgaattatttattacactttttgcttctttctctgcgaaccatctttaagacggccctcttacacttcattattttcagttcttactttcacatgtaaagcaccagtttctttaatcattgggcctcatataaatacagtattggatacaggataaataaatatacagacacaaatgagtgtacaccagtctctctacagaatctaactccagatttcttggttggttttgccttctttcaccagatttctggaccatctttttgtgttttgttatctgctaatctcaattttgattcatgttgggcattgtttattgcgcaggtgttactccaaataaatcaaatggttatatgagaccaggacaaataaaaaccagtgcttttgctggaaattgtgataaagatgggatttttggtgatgataagagaagtttccatggcgaaagcaatcagagttgtgttgttatgtctttctgtcttgtgggtcgttccaaaggaatgtgcttggacaaggaattactcaagaaactcctcttcttcttcttcttcttctttgccggcactaacacaaaggccaagctctgtgaatgttggagctctgatgacttacgagtctttcatcgtaagagcggctaaacccgcagcttaagcagctatggatgatgagaatgctcaccaaactgcacttaatgtcatcaagctaactattatctgtcacgactcacattgcagaggatttataggcaccattggaggtatatagactgttttttcttcttctctcttgatactgttgccaaagggaacaacttttgaactcagaactagcttgtgaaaatgccccaaagcatgagtgatgattatgtttcatcttatggtgtagctttgcagctgatggaaaacaaagtggttgcagccattggtccacaatcttcagggattgctcacatgatctcctatgtagctaatgagcttcatgtacctctcttgtcatttggagcaacggatccgactctctcctctttgcaatttccttatttcctccgcaccacgcagaatgattacttccaaatgcatgcgatcgcagattttctatcatattccggatggagacaagtcattgcgatattcgttgatgatgagtgtggcaggaacgggatatctgtcctaggtgatgtattagccaagaaacgctcgaggatctcttacaaagctgcaattactcctggtgcagagtctagctccatc

SEQ ID NO: 38211 - DNA, 5431 bp, Arabidopsis thaliana landsberg
  unsure (1)..(5431): unsure at all n locations
atattctatatatatagaaggattcatgtttttcaatgaatgttaaacattttaatagacacacaatcacaaatagagtaaagaaagaatatatggggcgcccccaatgcacgttatgtacaaaaatgtcctgtgacaatgaacttgttttgttagttttctaacgtttgggaaaataaatagtcaatgaaatactataattcagatgtgaataatttctctttttccgcaaaacatggatgatcttacgttggggttcggagtgtcgatccatccaataagaaaaaaaatcacgattcgcttaaaccaattaaactgtagacatgtagatattatcgttaatgtccgaatgtcggatcacatagcgagttcaaaacaattgaattcacaactcaacatttttactaactacaaaatttacaaataattctaaatttctaactacaaatcgaatctaattaacctaataagaattgaatacgtaaaaatgatgtaaagatgatgatcctactatattatttgggaagtacattttaaatttaaccttaattttggtaattaattacataaaaatgctattagaaaaatttaatcaaaaacaaaatcctttaataacgtcattaaagttaccaaaatcatttaacgataatatgcatttcttaataatagggcttattggatctaaagacgggtcatcaaagatttcctaaactgaagcaaaatatattgaatattcaaatatctatctgttaccaaattataaacaaaaaagttcataaaacaatttagtatttttatacaaaatcaattaaatcttaatcacataaaaattagcataaaaaagtattcaacaattaaaaaattattcaaatctctgtgttatataagttttgatactatattcgaataaaatgtaatatacttttaatatatattacctttaaaaaataaatcgtcccgcgatataccgcgggttaaaatctagttgtattttaatttatgtgcaaaacttaaaacatcaaacttaataaaacaaaaaaaataggtatttctatacatcatagtcattttgaaacataaaactaaacgttgacgaatcatttaaaaaataaactaaacattgacaaatgtttaaacataaaaatttattgaccataccaaaattaacatattgttatcagtcgttaatagaacttcttaacttgttaatttgtgaactaattttcaaattgtagtaattttaaatattattgatcatgttgatcagaccaaaataaacatgccatcatcagtagttaaaacaatgtttaacaacttgataagacacatatactttagaacgtcatttattcttactaaaaattaacttagaagaaaagctcaaaatagctattttgttagaagatactaaaagctaacaacattaatctaaaacctaactgaagaaatctgaggaatcttaggtgaagaaaatatccattttctaacaagctttttgtggtctggagatacgcgtgagaagaacatcactatatggatgattttgcttcacttccaagtatcctttggtcttcaacacctgcaaaatcaaattcagagagtttctccatcttaagtctttcatggagaccgataaaacggtgaagacatgtgcttgtgaaaaaattaagacataccaaagtctcgtagaagagtcttgcgctttccttctgagttcttcctctacacagttgcaacaaactcaccttctcttcttcttctctttccctctgttccaaaaaagtattttccaagaatttcgccacattcctgtacaatccagcgtcagaaaaccaggataatcatctgaatgtaagcgaatcgaagctgttgataccgaaagtgtgagcctgttaccttgttcttgaggaccatgtctctgcaaatcaaaatatacatggtaaggacgcagcacgatgatcgtcatgcaacaaagaacaatttgataagatttggattccaaataagttgtgtatatttcgatggttgaaactttcactcaaagctacatataatttcagaaaatcttaatagattcttgtctactaaatcaataaaagcctgagcactcatgagacctatgaaaattcagaatgcgttttaccttgttgtaagtcctgtctttcatctgcattcacctgctgaagcagaaacacaaaaaaataaatgctcagtcttgtaattaaaagataggctaaaagaactgtaaaaacttttttaactactatcagaaggatgcaacacagcagtacctcatcgttcattaaaatcgtatcaagatctctattttccacataatacacagacgggtgctcctcaaaggaagtgaagggacttgcaggtctggattttttataacaggtcccagggtccttgaaaaatcttttcgacattgattccctcaccggcgtttcaggtgcaatctctacatgctcagagactactggtgtttctggagcaatcgctgtttgctctgatgtcctcacgggtgtttctggagcaataactgaaggcttcacaggtgtctctgcggcattttctgtttgatgagcagttccagaagttgtagaacttgctcccatctcaaccgaaaccacgttactatttccggctgtcactttcagcccagcaagagctgcagcctgaggagtctccataatttcttgagtattctcagtctgatctgaagataaaataaccccaggagttctgacggtgtcaagagaagaattttccttacatctaccgactttagcatctttaggagtttctgtggttgcccagtttttaagcttgatgggttgacaaaaaagcgattggaggtccgaagaaccatctgcgggatgacaacaatcagcaaacacaacaatacaattcgataaacagcggattacgaggttttacttacaatgaatcaaaggttccaagaaacttcgaaaaggtttggcaaaacgtttggttctcctctcaggacagtcagtatgaggtacgtttctccgttttgcaagcaatttacttgagtcctctatcatttccttcataactctacaataacagaagaaccaaatattacatacttgtacggaactctgcagacgaatataatccaggttacaaattgttctcttacttgttcggaattatcacttcatcatctatcagacattttcttttccgtgaaactcgagaagactcctttgcagccggcgtagggatgatcgagaattgtggacttgttccacctgtaattcaaagtgtaggttaacaggctaaaaacgtaagtaagtatattttaagctcataattcaataaagtgtgcaccttcagaaattttcaaccgggaaggtgttttaggagtgacagcaactggagtatctgttgcattaaaccctctactagggtcttttgaaacagtcatgtcagagagaaaacctttctcggaaccatggagattcacttcaaaagtttcagattgctctttaggagacccatgaaacaattcaaagtccgtcatttccgcttcattatggtctcgacatttctctacgccttctggcaagtctctggaaccagatactggttctggttcttctggagtactcatctcagggatatccttctccccattaattctggtggcaccagaaggttgatcctcaatcccatgaatcgcttcaggtataccacattcagatgggagggacctatcatgctctatctcttcgcaacttgtttccttcaaggttttctccgatactaaattctctgtgtgaccatctctgtgtagattatctcctgaggattcatgagaatccactagtctctgcacaatggtacatatggtttctctaactgtgtcttcttcttgagctcttaggatattttcggacatttgnnnnnnnnnnnnnnnnnnnnnnnnnnnnngatcctctctatgccttgatgcattttgatgatctttggatggttcattagaatccaggggttccgggttcaacgactttgatggatgcttcttcagtagtatctctgacgttttctgcatccatgtccatatcatgagcaaaactctcactgcaacaacaattatagacacagaaagttaggattgtgtttgccgattacatgtatggaaccaaaaaaatatcacactcactgtttattttcattatgaagggcagagaaagtctcatgaaacgtaaacagaaggtcctcttccatgtcaaactgcaactccacaatgtagattcacgaaattaccagaatgaaaaggaatggaacgaagaaacaatgtcaatatacgctgtagtagcttagaacctcacagttacacactcagtaatctataaggtgagaaaccataccctttccatcgaatacatgtccatgcgctctgtttcctgacttccatctgttttatcgcagtgcagtggtattagttaatgaacagtgatgagattccctttaaacgactttagtgataaaatacctttaagtgtaatatcttcatgcggcttaacatttcccctgagaaagaagaaacaaaagagtttgagactatgaaataatctctgcgaaatacattctatattaggaataacaagcatacccatgaaaatcctccagaaccccaagatcaaaagcatctagttcaaatctctcaggtaaagcaatggaaaaacactcgatagatgcaggcaatgatacacctgtcttttctctgttcctctccttagccacaaactcctttacaccgatcaacgctttattgcagtcatcgaacaaaaagtcgaccttcttggaatatatccttacaacaccaagaagaagatacgccaaaactctgtatgtcaacgcatctaactctttttgcaagatctgatctgtgcatccaaaaaaaaaaaagcccctgaagaattacacatcataaactgcaataagataaaaaaaagttcggaaaatgtcaaatgttgtaggaaaagattccatctttctcgaggatagaaggactttagagatcaagcaaactaagcgttgaccagcagctctctgatactaagtgagtaagatggaatgtttagatttaagtttatatgagaaaaggcagattggtactaaggattcgatactattcagacttaaaatcactgaactcaatctctgagttcactcaggcattttgtcaaacaactgatgaacataaacaagtaacattgaaagaccccaacaaaatcaacagtgatctctaattgacgctgccaatggatacaaacgaaaccctaaaattctatggcagctaaatattccattaaagctgcaaactttcactcaaacaatcacttttccaatcgccagagaaaaatctctaagtngaacagagagaagaagaaga

SEQ ID NO: 38212 - DNA, 3010 bp, Arabidopsis thaliana landsberg
ctctgtctttcctgggagtcatggttcatacacgttttcatgatgagtcgaaggagaagggaaaagaggtggaaggtttggatccgatggaggagaggatggcgaggctggaggcgatgatggaagctcatagcaaagcgacgatgaagaatctggctgatatgatgactgcgatgagcagatctacagctcagaaacagccggatgagcagtccagtggtgagcggagtctacctcgatcatcaacttcaacggatgatagagtggtttttcaggatgtccgatgagaaaatcgaccagagcaggatcaacgacgagacaatcgtcacgaacaggatcagcgaagggaaaatcgtcatgatcaggttcgatttgaaaacccaaacaattatggtaacttgacgcgtttgggtaagattgatttgcctcgttttgatggatctggaatcaaagaatggttgttcaaggtagaggagttctttggtattgattatacccatgcagatctgaaggtgaagatggctgctatccatttcgatggtcatgctgcaacatggcatcactcttttatgcagtcgggtgtaggtttgaaggtgttgtatgattggcctggttatgttcagtagttgagagagcggtttgatgatgactgtgatgatcccatggctgagttgaagaagctaaaggaaacagatggcattgttgattatcataagaagtttgagttgattaagattcgggttaacctttctgaagaatatttggtgagtgtttatttggcaggtttgcgaatggacactcagatgcatgtcaggatgtttcaaccacaaacggtgcgtcactgttttcgtttgggaaggctgtatgagaaggcacatcctaagcgtctttcttcaacaccttggcaacctaagacaagtggagcagctggtactttgaagtcacctagagaggcttctaatacacctgacaaatattacaacaaggagaatcaatacactaaacctgagtttaaaccaaataatgctaggaagctgtctcaacaggaaatgagtgagaggagaacgaagggcttatgttatttctgtgatgagaagttcagtcctgaacattatttggtgcacaaaaagcaacaactcttttgtatggaagtggatgaagagtttgaagatgcgttagaggaattgactggtgaagaagagaagaatatgcctcagatttcagtgaatgcggtttcaggtatctcaggatacaagactatgcgggtaaaaggagcttatgggaaaaagaccttgtttatattggttgattcaggttctactcataacttcattgattcgaaggtggcggctaagttgggttgtcagattcaggatgcagggttggctcgggtctcagtggctgatggtaggaagttgaaagtggatgggaagatagtggatttctcttggaagttacagactacacagtttcactcagatattttgctgattccattacaaggagtggatatggttttgggagttcagtggttggaaactttgggaagaatttcttgggactttaagcagttggatatgaagttcagatatggtaatcagaaagtgtggctgcatggtattaaggaagggtctgtgagagaggtcaaggcacaaaaactacataaacttcaagaagaagaggttcagttggctatgttatatgtaaggaagtggttgaatctgaagaagatgatgatacagaacatcaggttttgggttctattaatgccttaacaaaagatttgggagaggagtcattttgtgagaaggtttgtggcagcatttctagatatatttgaggaacctactgagttgccgtcgtttagagcacaacatgatcataaaattaagctactagaaggctataacccggtgacccatcgtccttatcgttatgcaatccactagaagaatgaaatagacaaaatggtagaggaaatgttgactaaaggtatcattcaaccaagttcaagtccctatgcttctccggtggtgttggttaaaaagaaagatggaacttggaggttgtgtgttgactacaggggtttaaatggagttaccataaaaataggtttcctattcctttgattgaagaccttatggacgagttaggtggtgcagtaatcttctccaagattgatcttcgtgcgggttatcaccaagtgaggatggatcctactgatatttgtaagacagcttttaaaacccactgtggacactttgagtatgtggtgatgccctttggcctcacaaatgcaccagcctcatttcagggattgatgaatataatgatgttttcaggaagtttttgcgcaagtttgttctcattttctttgatgacattctaatttacagttcctctatgaaagaacaccttcaacacttacgcttggtgttttagactatgagagaacacaatcgtttgccaaaggcagcaagtgtgaatttgctacagacaaggtggaatatttgggacattatattgcagctgatggggtttccacagatccaaataagatacaggcggttgcagattggcctattccacagacactgaagcagttgcgtggttttttgggtttagtaggatactacagacgttttgttaaaacatttggtacaatagctcgacccttaacgctattaacatagaaagatgcatttgaatggtcagatgacgcagctccagcttttcaactactgaagtctgctttatgtaacactccagttcttgctttacctctctttgataagccttttatagtggagacggatgcatgtacacaaggcattggtgttgtactaatgcaagaaggtcaccccctggcttatattagctgccatttgaagggaaaacaactcaacttatccatttatgaaaaagaacttctggctgttgtgtttgctgtgcagaaggggatgcattactttattgcctaatcatttattatcaacactgatcaacggag

SEQ ID NO: 38213 - DNA, 1423 bp, Arabidopsis thaliana landsberg
  unsure (1)..(1423): unsure at all n locations
gaaagtgctcggtggtatctttggtgaaagcggatccttcatcgctgagaaagattgaacataaaagagggatcatgtcttgttcactatcttgtaacccttctggattggtaatcggaacactagctgccgcgagccttgacctggaccaaataataactgattagcgaatatttttcaagacatgggtacgagtcagatcataatattatgaaatcacgagttccccccatttgcataaaagacaatcagtgactatgttttcctgagttgacataaagatgtaaatcgaaaagagcagtttggtacctgtttattccgtttttctccaccaagtttaccagtagccccaggatggcaacaagaaaatctaattcctgatcggtaaggtatttgtctttcttctgatgggacgatcccgtcttttccatctgactgtaaagctgagatctggtgaaagacggaaagtgtctggcaattaattcagccatgctttccagccctctacacccaccaacttgtcgacatccgacaacgttatcatttgttaagttcatcaaaacctgcagagagatagataatcatgaactaaatttgtgctactccagctgagagaatttcaccgcagaccagtaaacaggtgataaaagactctaagaaaattacctttacggctgttagaaggcaatcaaataaaagacagagacattcttcatcaatgtcatttgtacaatgagatggttgcagcgatgtactgcagtctctgttacttgattcttcttgggaattcaacctatggtttgatgactcttcttggcttgagaacagctgatacaaactttcatctttactttgtttgtagcatcctttcttcttttgagctctagacttcttttgttttacggacactactgcccacttggaaggtttataatcttctaaatcaaacgcaaaaggatcttcgctttcctcggggggtgcaaactctccaaattttttacagattggttctccagcttgagtagtccttaaagtagttctggcaatgtcactacccaatgacgctaatctccctgcaaatgagccagagatggtggaaccgactcttgtttttgacgtagtaggctcattccccgacacannnnnnnnnnnnnnnnnnnnnnnnnnnnnnnagaaatctaaatggattatggattgacttctttgggatacactcccattcctcgtggagatagagccaacggtcgagtatgtatctgaactgattgtcacaacctcattggtaactgcaaaagatataagtggcttagcatagaaaaaacagagaccaaagggggaatacaaagagacagtgagaggagagggactcatttatggctagaagaataaattacctttcctatttgcttccaaaacagaatca

SEQ ID NO: 38214 - DNA, 3736 bp, Arabidopsis thaliana landsberg
  unsure (1)..(3736): unsure at all n locations
aaagaagctttattgggccaaagtacccaccagcatatcccacagctaatcttttttatttttgacatatcccagctaatcatattccatgtttcttctatcctttttttaaaaaaaattgattatattcccatgataatcatttcaattgttttacgtaatcctatatttgttcggagtttctactagaatttctatctacatcaacatcaaattgtaatagctttatgtctttgctaaagcacattacctatgtagcaaacaatcgtattaaatataaacgaaaatatagctttatgtcttttcactaaaatcaacaatactaatccaaatcggagatttgctttcggtaaacatttttgttcgactttttatctagaatattataaagtaagaaattttgtgaataagttactaaaatgaattcattacaaagtagataaagtataaactatcatgataatttagaagtaaaaggattattctttggcgaatagcaattgtagataaataaattatatatctactaaagagtaaatagaaatatcaatccacttatttactttttaagggcaatacaattatttatcattttgattcataattaaaaaaaattgacgacgaacaaaaaagcttcgtaattttaaatatagcatatattaagagatatttcataagagacactaatgtctttctaattttcatgttaacttggatgttttaaatatcaatcaaaaaggttataattgagcctcaccaaaaaaaaaaggggttataattgatctgattcgatcaattatccagtgtaattatatattgcaatctagttaatgatataacgttataggtctcatttcctacattcaactaaaaggtaagctaaaaaatctaaaagatacaaatatccaacaggagaaatatctttttctctcattgtctatatttgttgttcttctatctctttctctctctttttcttccacaccctcataactttacttacgactttattatatatataccaccaacccattttgtcataaaagatcattactcgttaagactttccactacccattctcattctctcttcaactaatattcttccccggccctcgtaaagaagcttctcctgttctttattcacattttccaaaattgtatcttcttaaagtatctccaacaaaactaaatcctactaagttaagagatttgaaaatgacaaagataggaggtattcttgtttgtctagtcattgtgggcttagatgtagctgctgcaatcctcggaatccaagctgaagtcgcccaaaatcaggtaaaataaatgttctctttcaaattaataaatgttgtttccctaatttatgatgctaaaattggtaatgatggttgcataacatacatactgtctcaaacttagaaattttctcaaaaaaaaaaaaaaaacattaggaacctgaattaatagatttttttttaacaaatgaaaccatcgatttcctctattgtaggtgaagcacatgaggctttggttatttgagtgcagagagccgagccaggacgcgttcaggctcggtctaggtgcagccgcgatattggtaatggctcatgtcctacttaacttggtcggaggctgtctttgtatttgctctcaagacgagtttcaaagatcttcttccactagacaaatctccatggcttgtcttgtcctcacttggtacgttaatacaaaatcttcttggcattaataattgttggtccaagtaaaatgacatgattggctggtgtaatcacaggatcgtattcgctgttggatttgggagtatagtgattgggacgatgtcgaacagtaagtcaagatcctcttgtggattcacacatcaccattttctctccattggagggattttgtgttttcttcatgccctcttctgtgttgcttattacgtttctgccactgcggccaaagatgaagctaagtgacaaagtgtcacggttaatgatggaacaggtaggtccttgttcttgactatatttatgtataatcatataacctagtttcaatttatttcttcttatgaatcgtttcacttatttcgaagtcacttttgtaattttgaaagctgtgtcattttgaaaaatatggaaaagcttttatgtcacgctctgttgtcgcatgtggggttaaaatgcactagtgataatgacattcggtggaatcttgtctttgcttcgggtctttaaattaattcaattgtctctcgttctctatttttcacacacacacctatgtgaatccttgtcacgggaaacttgaaatctgtagaactgatttctaggaaaatagaataatttttatagaagagagtatcaaatggcactatgaagtagagaattgcacaaacattttttactaccagaagaagatctggtctgaaatccgaccaaaaaggagtttgtatgaaaactgatttttctgttgtttaacttcaaaatgtctacagttgtcatatcctgtaatcagaaaactaatggttcaaatttatatcattaggatgaattatttacttttatatatttatctcaaatctttacatatttacttcagaaatcttatacgtttatagaatttccccttagcatattctctaggacttctttctcaaaaatgtgcttcgcaatagagacagtacactctcaaagggtctaatactcatgtctgtctcgtccagccatggaaatggatcaaatggttctgtttcttccataaacatctccaatgattcatcgtttctcgatctttccaacggaagcagctcgtgattatacctttcaggctgtgaacaatactcctgaatcatgaaaagcacacacaacttcagaaaaatgttaaatgatcttggagcaaatacacatctcgaagagggctctttttgattgcttacttggttcgcatgcattcgtttcaagaacattttaaacgttgagaaatttggttcattgagaagtttatcagacagtctgagatatgtgaacccaaacatcctcggtttaccatcttgtttaactccattaggccttgcgtttagtatgatctggttatatccatttctatcgaatcttggaagcgcgttttcgcccgcaacttcaatcccttctctccatccagagctcaaaaccttcaaattttaaccattaccaaaatcaattcaagtaacgaatatacaaaagtgtggtatttacagattcaacttgcttacttgttgaacaagttcttgaggtccactcttagcttttgctggttgctctgtgtttttcatctctagacaagtgaaattcaagatagcgtgatgtctacgcattattttcgcaatcgcacgataaccatctctgtttttgagattgtaataacccgccgtaagttctgcagcatgactttcagttttgtaccaccaatggattccagagacctaaaaatttgagaaaacaaattaagaaaactataaatcttaatcatgtttagaattcatcccaaaggaaaatcctacaaacatttgatttacttttgctgctatcttgagtttacacccgagaaatactttattagctttatcaagaatctgatcaccatggagaagtaactttttggagtaccatgacangaagaaatttccttcttccttaaagtaagtcccattcgagtactcgaaaaactctgtttctcctggaacact

SEQ ID NO: 38215 - DNA, 7333 bp, Arabidopsis thaliana landsberg
gcgtgagtctgctgttgtatctatcaaggagttgataaagagacttaatgaatgtaagctttttaaacgaattggtgaagcattacaactatttttcaggctcagaactacaaaagaactttcggtttcatttgtgcaagaaaacaataatgagtaaagatgcaaccaaaacatatcttgtcacttactttttgcttctatttaggtacaccgagcaagactaggtggcaaaagggatgtcgttgtaaaagtgagaaataatcaggagacaactgaaatcttcctagcttgctttcggttagtttcttaatgtgctactacatgtttaggtacaaagtcgtgtggcgttgacaatttgatgatgatagatgtaataaacttgcaaatatttgcattatacattcagaaaacgagaagcaggtatttatcatttctatctggtgagaatttatagtcccccaagtcacactataagtccttgtttttcattttctagattgggtatgaattcaatggaggccaatgctatggaaatccttcgacgttttttttatgatatgataaacaatggatagagtcatgttccgttcccagggtacttgttttataaattgactttttaaggattcctgtttcactgatcaagtgtttgttgacagaatctcgctttgttattttcctatcttgctttccattagtttttgaaagtgctttcaatccaaagttctggcgttgagaactcgatggtgcaaaaaaagagaagcatgtatttatcatttctggtaagaattttacatgtaaatccttgtttttcatttttcattgcattggcctcgaaccttgatttatactgaaactaacagttatccattttctcttgttaatgcaattcacaccatagaaagcataaaaccaacgtataaagtcaaaaaggtttggactggtgatccttgctctccaagactattcccttggaaaggtacttcaaattaccaaataaaatccctgtaagtcattcatttcaacaagacaataactcatttttgtaatttcccttaaggaattctgcttatgagcttagttcaagtgggttacaaggaccaatagccgtctcatttagacatctttcccttcttgagtcactgtaagtatacaaattcaagccatacacacacactaccaccctctttattcacattatatataagagtcgtgtgcattgttttcccaatgattcataaaacaacaacctaagaaagtgacaaacatttgataatgtatttgtctatgtcacaggaatttgaaaagaaacaacccgactgggtttgtcccaagatctcacagaaaaagaacaattgatagataaacttgcacagagaggtacattttcttgtcaaaacctcggtaccatagtcatcttcttaagacaatctttgtctgtaccattttctgtagcttcttaattttctctctgtttccagtgtagatgaatagagcatttttcacccatgttcagattcgtcgtgtgccaaacatataaataatgattaaatatagtattatttagttgttaaatatattgtattttttaaataaattaattcaaatatgagttaattagtagggtagtagaacgatcctgactttttattttaatccatatgttacctgtaattctaattttcacatatgaaaataatacgttaaaaaagttatgtatttactgttttgactaaataatagtgtatttaagttgagagatgacacatgtaacaaggacagatgttacatgtcagcttcagtagcttttgaataggagaaaccattctttattatataagattataactaatttaaatatatatatacaaatattttatgagtaaataatattaaaaatgttatcttttaataaaaaaatgaccaattttaataagctgtatttgtttcttttgtatccactattagaatcttttgtatttaagtataaattttagatatttaatttttattttaaatgatcacaaaagtttgtaggaaaaatttcttttaaagaaatatttgggaaaaataatgatatataattaaaactattgaaaataaataatagtgtatttaagttgagagaggacacatgtcacaaggagagatgtcacgtgtcagcttctcgtagctcttgaataggagaaacctttatttattatataagatatatataaaattgattgtgtaagatttttttttcttttctaaatattaaattaaatataaaaatgtgtgtgagttaatatttagaatttaaatagtatcaataatattaagtgtgtaaaagcaaaataaaataataaaatagattgcaaaagattagagttttgtttaaataaaaaattattaaattaaatatcaagaaaaatgtttgaattactgtactgttgagaaaaaaaatatatatatatcttacattgtatatttaggcggtacttatctagtatacatattatagattttattattaattcattttttgttggaattttattttaccatattttgtgggttttcagcttttaatttaataaaattatattcactaaaaaaatacgtttgtacaaaattgtcactgagactatgatttggggtgaaaagctgtagagttggagggtgaggccactcaagatgtgaagggtgcagaggctgatttccagagagcactgcagtcttccctttttgattctcatcagaaactaatttggaggaactctgggatcaacttcattatgcgataaaagcattgaaagctgtaagattcgataataccatgcgacagaaagccatagataaattgatagccttacaggagaaagaatccattgcgtccaatgaagtatgcatagctagggaagttgttcaagaggctactttggaattatctttgggtgaagcgaggttgcagcaggttctagtggagtcagcgggtcacaatgcttctgaggttgaggataaagtcttggagactatgattttgggtgaaaaagctgtagaattagagcgtgagaccactcaagacgtgtaagatgcaaaagcgtcttttcagaaagcactgcagtctactcttttttattctcaggcccaaggacaggttttggttgggaaaagtacagttgttgacgaggatgcaatatcgagtggcgtggctgaaaatgagttagcagtagatgaaatctacacttgtgaggcaagcttttctatgaaaaagaaaaaacctataattgttgttataatcttgtttatgatgtttgtctctgacttgtttagatttgcaccggttgagtctctcgagctcgccaaaccctgtttcccatctccaagttactttatgttgtgtgttctacaaaatcgttgagaataattcattggattctatagtttgagactgaactctgatcttttgaatctcctgaaacttaatggttttgatgcaaaagattgaggcctctatttttcaaagcctaatccttgagtcccctatgacagcgcttatattattttgtgtatttccatgctactctgtagattccactttcttgtttgatgatcaagatttctgctttgatttcaggaattacttaacagatctggtgcaagaactttggaaccaaggacgatgacgaaagagagcactaaagttgatctatagttttcactttcctagtacagtactgtgtgagtgtgagtggattgatgatgtacagcagctgactttttccctctgtaatttctctaatatacagcagctgatatttccactataaattatgggatgtgtatcaatatggaaatctattaagataaatactttattaaaaggttttgatttataagctttctcattacttgctgctaaatttattagtttcctccttgaattcagcaacttttcttgggtttagccttgttccatcgtggcatttcctataaacttcagaaatctgcatgtgcattctactacgcttgtgctttaagtatgttgaatactattagataatttcccaaggattatattaattccactaatccctaggttagctgcaagatgaagttaaagttcacaactttatctctgcaactagattttgagtattttgcttctcatttcagatcttctctaagaaaagacaaaagaagatggtgttagcttgtgttcttgttgattttgtctgagcttgagggatggggaagacgaatgtattatcgaagatcagagctttcaatggcgtcaatagacccatctatgtgttggcaggtttggcttttcttatctcagtagctacattagctaagttcaactacatcactccactacgcttctctgatcggttctgtaactatcatggaagctttgacggcgacaactacaacatcggaagccaaatgagaaagacaatcgaaaccgccatttttaaaatccaccaagaaatggatgatctcaaggctttagaagctaattcttctactcctccatcctctgtttcatcagcttcaggatccatgtttaggcatgtagcttttcttgcggatgttctttcgctagttcagtcggttcatatggaattgccttcgttcgaagagagatccgtagcagatcatccgttgaagcagcagaaaggtgaccctggtgagcattttatgagagaagagataaagaagtgcataaagatcaaacctaaccggctcgggaagcagaatttcatgggagctaacggaacattcacctcgatcgggcacgcttgttttgcgatgaagaaagatctagaagagtatatggactatgatgttggagaaatctgcaatgatgattggagattagctcagaagcttatggttcatggatgcgatccgttgcctagaagacggtgcttctcccgtggcccgcagttataccacaaaccgtttccaatcaacgagtctttatggaagcttccggataatcggaatgtgagatggggacagtataagtgcaagaactttgcttgcctagcaagcaacacaacagcacgaaaagggttctttaaatgcactgattgcttcaacctcacgcaccacgaatctccgagatggcttaaccgaggcgaaatcgatcctgagacgaaccaaactgcggatttctcgatagctgaagtactcgagattaaaccgggagagattagaatcggactggatttcagcattggcactggaactttcgcagcaagaatgagagaacagaacgtcacgattgtatcagcaacaatcaaccttggcgctccattcaacgagatgatcgctctgcgcggtttagtcccgttgtacttaaccgtgaaccaacggttaccgttcttcgacagcacgcttgatatgattcacacgacgaggtttctcgatggatggattgatctaatacttcttgatttcgtgctgtttgattgggacagggttttaagaccaggtggattgttgtggatcgatggtttcttttgtctgaaagaagatgtgagtgattacatggaagcgtttaaagcgttgaggtataggaaacataagtgggttgtggtacctaagaaagataaagatgataaagaagttttcttctctgctgtgttagagaaacctccaagaccctttagatgattgatcattgcatagtctctgtctttactattatctttgtaatcatattcttaaaacaaaacagaatgtcaaaataaactgagttatattttagttatatgttccaatttgcttgtataaattcagactaagaatttcaccaaaagtgttatatgtttgacatttatgtttgtaatccattgtgatcaagatgatacgacgtagtaatgtaactctctgagcgagaaagagggttctccattttgttgttaacaacaaagcaatctccactaggttcgggatgaacgaaccaacaggctcggaccgtggaacgcgcggtatataaacaactttgcctctttgttcatcgattccgttacatcggctcattggaggaaatcggagaatggaggaggagaagctagaaatcgtcgggccgttggaggagccgttgatgggaaacatcgtaccagaggagatcaatggcttggattcgcttatgtcgtcggattctgatagcgagaaaccagattcccctgttcccataaatgctccgatcaaccggatgtttggaagagaacgaccaattcacatggttctcggcggaggtaaacgtatgaaacattctctacactcgttcccattttcatttctcacagattggttcggtctgatgatatatcgcacttagggtttggatgatgattagattgcgtgtgaaactgtagaaatagagattaatggggattgattgaatatgtgacctaatttgttgaagctgctgatgtgttgctatggagagacaagaaggtcacgttaggattactcagtgcagtgactgtgatttggcttttgtttggatttggtggttgtcgtcttctcacatctctttgtcgtggatccattctctttctgcttctatcattcctctggtccaatgccctcaacaagtaaagttctttttgttcgccacataaccctgaaatatgttttaagtaaaaactcaatccttgtttgctaatctatcatttatagatctccagagaacatgatggagatttacatacctgagaagccattactccaagctgcttctgcgatgacatttgagcttaactgtgcttttgcaaccttaaggagcattgctttagagagagacatcaagaactttgtaatggtacttgtttagtttctcaagtcttttttttagagaagcctctgatatgacaattgctttctttttgttctggaacataggcagtcataggactttggctagtatcggtcatcggaaactggttcagcttcttgtcattgctctacatttgtaagtacacactggttcttctcagactcttgttttttctttctatttagggataatgtcatgacctaattgaaaccaacaggttttgtactaattcacacggtgccaatgctttatgagaagtatgaagatgagattgatccaattgcagagaaggctgtgattgagatgaagaaacattaccaagtttttgaagctaagtttttaagtaagatccctcattagccaaaccactcaaaacatcgaaattgaattagattcgatttgcttagtttagtttagttcattcatttattctttctttagagtccaaatcatttcgagtcattcctctgttcatgtggttttggttacttcgtc

SEQ ID NO: 38216 - DNA, 1963 bp, Arabidopsis thaliana landsberg
tctgcgaatggaaatgaaacagtggtgaaaaaagcaatagaatacaagaggtttagtactgaggaggagagtgatgattttgatatcccggtgtatgagaagcttggaaaggaggaaaaagagattgatgaagaaacgttgaaggagaagaaacgagaagagcagttagagaaagctcgactagcgatggaaaggaagaggaaactacatgagaaagctgctgctaaagctgtcataagagttaagaaggaagctgagaagaaaccaaggcaattatattatcttgttcccattttttcaatgtatcattagtttgtttcttatttctttgtttggttttcaggagtgtgagaaaaaggcgaagaagaaagctgctgcaaattctacttctccttcagaatcagaccaagtaatcaatgatgaaaaggttaggacattagcagtttcagggaaagagaaacaccaaaaggagagattgttgtttccaaagcagagaagttttaggtacaaacaccgcggaagcggaaccgaagctctccctaaggccatcctaaaccgtagaaaggctcgtcgatattgggtttggggactttcttctgctgcacttgcggtctcgctcgtccttgtggttttacttctaaggtaaaacttggaaaggaaagagagacattagaaaggttttgactctgcctaattggaaagatagagtgagtgaaggaagagctgcttctagactttcaaagttagcttttagtttcataaccttagatgttggttaatatgtttctgtctcttcggagagttgtgtgataaaaaagagaaacatcctaataggagcttctgtaagtccatagagactccatgttgtctttatgtgaacattgtggattgaatccactttatatctagtcaagtatcttgactacatatatacttagaaattgcaaataacataaagctttcctccaacttttgtctctcgttacatactatttcagaagctaaatctagtttctacaagatagtaaacaaatttcaaaacctaacatccgtgtggttttaagggaccctttatcaaatacctgacgtccttaaaatctaactcttcttcaagtccacaggtaaagaatccgttatgaacttctttgaggaatttcagaagattcaccaatgctcttttggttctgctctcatcactcttcctctcggcgtaggataatcttgacctcatcatgtttttgccatcgtttttgaaataaaagtagcttgtgatctccaacaagtttctcttatgatgaggccaaacatttggcgtattatccacaatcacgattccacgctcatcagctaagacaagatcaagtgttttcaagtcaggactctcttttctagttattattcgatccccgaaatagattttgtttggatcaatcatcctcacaacagcttgaccgtaagtggaaccgccttttgtgtaagcagtcatggtgaaaagcttgttggcttctttaaggaactcttcaacaaaaggtcgaaacttaactaatctattgttatatttacgcagatctttccttgaacctgatttctcttctttgattagatatttctctgctttggaaagatttgaagtcttcatggagtggattagcgtgtggtccaagtcaagtaccaagtgaagcttcttgcgtccgtagactgagactagggttgtgagatgctttgtaaaggatacagcttcgtgactcagacgtaaaccggagaaaagataaccgaattctcggccatggacacaactcaccttctttttacaggcgaagcagattccgtgacgaacaaacaaatgactacaattactactagaagaagatgatgatgatgactcgttcatcatcactggatcgatcatcttagttctctagtttaaaaaaagaaacggaaagatgagttcatttcatgaatg

SEQ ID NO: 38217 - DNA, 6036 bp, Arabidopsis thaliana landsberg
  unsure (1)..(6036): unsure at all n locations
ttacctacaatgattgattcatcgacaaatatcttgttctatatatcatcaattctaaattcttcaaaaataaagtaaagatactcaaatgtaatgaaatgacgaagctggaaaaacgtattttaatttaattcattatttgaccaacaatttgcatcatgtgaatttaaatcttgatcggtcaatattagtataaactaccacactacatgcaaaaatcattcctcatttagtgcaattacaaatgataaacggaaacgttatcatttgtatttattttgtaaaatatgtaattcaagaaactgctcagaatataaagacaagaatcctctttcttccatctctatctctccgtaaacagttgctcaaaaccttcttcctgaaatggcttcttctctcatcttcctcctcctcgttaccctaaccttttcagcatcaaccctaatctcagccaaatccaacacaacaacaataatcgaatcaacttgcaaaaccacaaactactacaaattctgcgtctcagctctcaaatccgacccaagaagtcccacagccgacacaaaaggtctcgcctccattatggtcggcgttggtatgacaaacgccacctccaccgcaaattacatcgctggaaacctatccgccaccgtaaaagacaccgttctcaaaaaggtcttacaagattgctccgagaagtatgctctcgccgctgattctctccggctgacgattcaagatcttgatgatgaagcttatgactatgcctccatgcatgtgttggcggcgcaggattatcctaatgtttgccggaatatttttaggcgagttaaagggttggcttatccggtgaagattcgccgtagtaaagcgagtctgagacgtatttgtggtgttgtctccgggattcttgatcgccttgttgaatgatttacatttgcattaactactttggtaaaatctctatttaaattatcgtatttcatgaatttaatatgaccgttactttattactttcgtctttgctacaactttcaaattgccaagaagaacaatctttagagatcacctgaatatttggaatttaatatttctcaatcaattgactaatcataccaaaatcttaagtagtcgtgtttagtgacaaagatttgggggaaaaggcttcttaagaaatgggaagagtactaaagatatttgtatattcgttatatatctttaggtaacttttgctttatctgtatgcattatacgtgttatcgcttcagagatgttttacactttaaaaattgcgataaggttacaaaagtgtcatcttaaaagagaaaggtaacgtcgcctatatattttttttataacaattttaatgcagaatagttatcgacctcataaactagtactgcttttaagacgacgtcgactgctatgcgaatcaaaagcaaaagacgtatgactttttttaatatcattttaggtggaaacattcacatacattattgaaagtgaatgttcgtaggtcattgaatagtctacagttttcgatatcagttcaaataatcgacccataattgaactaaaagcatcaaaataattaaaccatatacgaacactaataagaccggttttggaataagccggactagtcggtggatagaatcgtcatttgacacggagactactatttggagtccaaatgatcccagaagacgcgccagagtgacagtgccttttagttattcttcttcccagtaatctacaacccctaggaaattttcgcgagaatctccgaatcacgattctgggcattgtggaggtttgcctatactgatgggtggtacgatacagataagttggcacgatgggaagcccgtgctaaccctatattttcacccgatttccggtttactcgccaccgccggagccgattacgatatcaaggtaatttaattctcaaatcaaaatcgatttgtatccattttcaggatctgagtttgatcaaatagtcactaattgtgtaattttggaatttgaatgtctgcgattgtttagaatttctaaaattcaaatgtttgaatttggttctcacgggttcatgaatttgaacatctgaaattgttttggttgtgattgttgactttgcattcactgttgactataaacaattgaaaattattcagctatggttgataaattcgggtcaagcggagaagaaggttcctagtgtatcttatcagagtagccttacttaccatggatgtgctgtcaataccattcgtttttctccatctggtatgcactagctttgtattatcagatatgttcttttagccgtaatcatgttaactcctgtggtgacgagtgttgttctatgattattttgcaggggaactacttgcctcgggagcagacggtatgcctcagaggcttagatgcaatgcaagtgtgttttgcatattttgaatgagtagtgaaaccaattgtgcagttttgtttttgttatgatgcaggaggtgagcttattatatggaagttgcatcctagtgaaaccaatcagtcctggaaagttcacaaatcattatcgtgagtcctttcatctaaataataagctacgctgactgggcttctaagagccacggttttttgtgtttgaatactgttgctctatcaagaagggagaatgataccttaggctaatttggtgaaatgagaatgaaagtttcaccaaaattgcaactgtgacccaatcgaatgtaggctaagagatatattttgacttttgtttgccctgctagatttcatcgaaaggatgtcctggatcttcagtggtctcctgatgatgcatatcttatttctggctcagtggacaactcttgcattatatgggacgttaacaaaggtgaaaaagtcaaagtgtagatagttttatttttttggtggctccagctttcctgcttctcacaattttgtatttgctaaaaggttctgtccatcagatactggatgcccattgtcattatgttcaaggtgttgcctgggatcccttagcaaagtatgtagcctctcttagttcagacagaacatgccgtatatatgccaataagcctcaaacaaagagtaaaggtgttgaaaaaatgaactatgtttgccagcatgttatcatgaaagcagatcagcaacggggtgatgaaactaaggttagagagaaaatagtttcttccagattcatcacggatacacagtattcctaatttcaaaatgacattttatgcagacaataaaaacccatctctttcatgatgagacattgccgtctttctttcgaagattgtcatggtcacctgatggatcttttttactcattccagcaggttactatcccttaaaaccattcttgtttttcagatagctgtgctagatcatccacattgtttactcgggcattattcatgtctctaacagtccctgatatcactgtgttgcatgtccaggttctttcaaggtttcacccacatccgaagctgtaaatgctacctatgtcttttctaggaaggacctttcaaggtaagataatcacctcaccatctcttgtttgaaagtcgtaaggctttgtggaacatattgtaatcatataagctcttctttaagctgagccaagtggccttaactggtcaagcttatgtatgagataattagaaatcagtacaaagtctcacactagctcaattcctttttccacaagcagacctgcactgcagcttcctggcgccagcaaaccggttgtagtggttcgtttttgccctgttgcatttaaactccgtggttcaagttctggtacatattatcttatctcacaccatttttttagtttcttttatgatagaaaagcaaggccttcatgacgttgatagttttcttaaatctgttacttttggtgatctcaaatggtgttttgaatcatgcagaagagggtttcttcaagcttccttaccgtcttgtctttgccattgcaactttaaactccgtgtacatatatgacacagagtgtgtcgctccaattgcagtcttagcaggtctccactatgctgcaataaccgatataacatggtgaaaagactatgcacattcttatagatcggaatggtttttctctaaattttcttagttttaatactaaccaatgatcttttggtttgttcaaaaggtcacctaatgcatcgtatctggcactgtcctcacaagatggctattgcacactagttgaatttgaagataaagaactaggagaagctgtctccatttcaggtttgctcttagtcctttcactcttgaaccttccagaacccgattgacccatcaatccaactacagttggaaagaaacctgttgatggtgaggagaaaaagcatgatttagagaaaggcgatgaactaatgacagaaacaacaccagacgagagcaagaaacaagctgaattagaacaaaacgaagagagcaaacagccattgccaagcaaaattaccacggatggtaaggaaaaagagcatattatgcagaaaaccgatgatgaagtaatgacagaaacaagacatgaggaagagaatcagccattacagagcaaagttaacacaccggtctcaaataaaccagcaaggaaacgcatcacacccatggctattgacccctgatgtcgtcattttccatcagtgtttttttttttactctgatacaaatagctttctcataggctacatttagacatcaaaatgaatcgtattgacggccatgttggaaatggacttgcatctttaatcatacgtctnnnnnnnnnnnnnnnnnaacatatagacacatgtatgaacgttcacatgagatggctttgcgtacattgtggatcatcattgggctcgtattaatacataagttagttagcttggcatcaatgtctgtaaggcccaaatttcatatatagctgaatgcaacaatgtcaagggatgttgtgttgatctttcacggcccgatgaatgaattgtagaatgacaataattgaccagtaaaatcaacnnnnntttcaccctaaattcaagtttctcaaccctttcttccataacacctgtaaaaaaggtcaatacatcaatcgaccctccacaaggcccaaactctctcatcgtctcaaatggctatcgctctcaatctctgaatttgatcctctgtctctttctctcaatcagatttcaataattcttacaagttcaaattttcatttttcccagtttcaattaaatttgtataaacaattcccaccaatacatacacaaatatatacagaaaatatcttctctctccctccaatggattctccgacactaccgcactctatctccgcctcttcctccaccccattcgcttccgccgccgtaaaacctcaccggaataaactcctttcccgtaatggcatcctcatcatcatcgccgcgtcctgtattctcctcctcctcatatctctcctcatctacgccaccgtctcaaaatcctcccgcaaccaccataatccatcgcaccaaaccccaacctccgacgatcatcctccgccgaaaacacctccttcccctccaccaatcgctcagatccgtctcgcatgcaacgcaacgcgtttcccagatcattgcgttgcctcgctctctaaacccggtcaagtccctccggatcctaaaccggttcaaataatccactctgcaatttcagtctcctacgagaatctcaaatccggccaatcgaaaatccaatcaatcctagactcctccgcagggaatcgaaaccgtacgaacatcgccaccatttgcctcgagatcctctcttactctcaacaccgtaccgaatcaacagacatagccgtgacgagcggcgatatcaaagacgcacgtgcgtggatgagcgcagctctagcttaccaattcgattgctggtcaggtctcaaaaccgtcaacgacactaagcaagtcgtcgacacgattacgttcttcgaaggtctcgtgaacctca

SEQ ID NO: 38218 - DNA, 1330 bp, Arabidopsis thaliana landsberg
cgcgtctgggatttttcagaccttgcgttacgcatcctaagatcgttagagatcacattcctaaaggaggagactccattactctccgtccttcctccatcgaaggtccgtggatcactaaagggacccttcagaggtaaagaatcgctgcttcctaacaaaggagaaaacgttatgtcatgaacactaaaatttgattgttttgtttccgattttggggaacagatttgtgcgatttgtgactactccggaggttcttgagaggtctgtaacattagagaaggagattgagcagatcgaggattcgattcaagctaatgcagccgccattgccggtgaagctgaaggtatgtttggacatagaatcagagattttcaaaattggtaatttaacacatagaaatataaaaatgttcaatcctttttcaacattgtgtaatcttgttcatatgtaggaaacgagttgggtggtacatggacttctcaaaagtctacggctttatcaaaggtgagtttttttctgttcactctcttagatgccaaaacttgagttattgcttaatgtttcaattgttgtggactctgtgtatgtgtagacgaaaggggaaactgatggagacactgtggaagaaaattctaagtaagttttaagtagtttacaataatataattatgatgttattatcacgtgagattatgggggtgtcttatgtggccatcaattccacgtgtctctttctcaatacggatgaagaagcagtgaagcactaatgacaaaaactttcccagatatgattgtaatgttttatctctcttctaggtgtatttgaatcagtttctgaaccttagaagcatatactgagtttaatgatgttgatgctcttgaattagggtctttgtttctgtttggaatcagtttcttgattgtgaacttttagaccatcattattggtagttgcttagtatagttcttagattaatcagattagaaatataatgtttatattgatttatttgttaagaatggctcttatataagagcaaaaaataaacttacgagctggacaggtggcgttttttgtgatatttctgcgtagattgtttattatatcaatatatgtctttgtgcttagaatcttagtctactaaaattaggcattctcaaatccgtttactatattgattgttctcacaggtcctagtcaagaaggatcctgttagacgtcaagttctgcgtgttaaaggttgcctggcaggatcaaaagctgaaaaccttcttgaacaaggcgatatggttctggcagtcaataagatgccagttacatgcttc

SEQ ID NO: 38219 - DNA, 4043 bp, Arabidopsis thaliana landsberg
aaaaatttaaaccggttaaggacgagagacccttaaattttttgttttccatcggaatctgatacatttaaaattaaaaagcatgcatgttccaaatatctagtatttttaaaaactgggccaaattatggatagaccatactctatataagggccaaataataataagaagaaaaattcaataaatcttggtgattttaagtagaaacgaataagaaaaatcgaagatggcccatgtccatatataaagaacacaaactgctgactcctaacgtgacccaatttggtatcttcatttcatttaactcgattggaagtggtttgttaactgattaggcccataggatttgtgtgacctttaaatgacttttggaggtggaaaaagttttagccttttctttctgctaataatccaatcccgagcaactccgatttgaagaagtgttgtatgacatattgacatcgaagtataaacgtgtaaaaaaaaaatcaatgtcaataatgcgtgtgaaactatagaaagagaaattggaaagtatagtgaaattgaatcaaagttcctaaaactagcggtgtaacacttgaataataataatcaaaatgattcctaaattagtcaacggcgctgcttcctcgttgtctttaatggtggcgatggtgagaactcactaggcaactctggtagattcacttctcctttaagcattcccaagacctctttcattgacggtcgtgaaatcggcaatctttgcagacacaacaaagccacctttatgcacaacactgcttgttcttggtctaagttttgcaacctttgatccacaagatcaacaagttttcctcttctcgccaacttcctcgcccaagacatgaggtttgcccgttgtatctcactcgcggagcccgtcatctccaacgggcgcctcccggaaatcagaactaacaacagaacaccgtagctatagacatcacatttctctgacacgttgttgtccaagttacagtactcaggagctgcatagcacacagtccctctcatgctcggcgtgctactaattccgcagctcttagctatctcaccgctcaccgagtcatggctatttccccttgctctcaaccatcgttcaccacttaacccatctaaccaccaatctatgctgctaccactaccactaccacgccgccattgactcacactactactcccatcatcactacaaaactcggcttctaaagtcatcttcttcttcttcttccttttcttagcgagttctctacgatactcatctttccaccactctctaaccatcctccgcttcttcttcttcttattctcatcctcttcctccaatgacaaccaccaatctagtctcttgctagtcttcttctcaagtttcttacttgacgaagaagacaaagctgccgcctcaatccaatcacttctgcttggtctctccttctttacctctgaaccaatccattgcatcacatactctttcactctccctctttcaacattgctctcctgcttccaccaccaatctttgctctcactctctttccccttcttcatcaccacaacactaccaccatcctcatccgttttctctcccatttccggagaaacagagacaaccgtcgtcgcctcaggagaagcactcacagacccaggaactttagcaacactctccggagactgatcaaccaacccaaagttaaaatcttcataaccagtcacagtagttaccacactctctacttcttcaaccatagatccatcaccatcacgctccggagctacactaatctccacttgctctgctttcaacctagccaaaccaaaatcagcgattttggcagagaagagactatctaatagaacattgctaggcttaatatcaccatgaatcacaggtggttcaagactatgaagatgcttaatcccatcggcaatgttaacggcaaccaaaaacctccgattccaatccataagctcagggcatctccggtgaagcaacgcgtcttggagattaccattgtccataagcttgtaaacaagaagcaaacgtcgtcgttttcgatcatgagagaaaccaataacagggacaacgtgaggcgagtcaagcttggcggcgaagaacaactcattttgaaactcaccttctccttgaagagatcctgaatccattactttaacagctacattctcgccgccggagatagttccacaaaacacgacgccaaatccgccctgacctagtctattcgcctgcgagaaagaaccggtggcgcgacggagagacgaatatgaaaactcacgtggcgacggtctccgaggcgaagaggaagcgttttccgccggaggtgatgaacgtttccggctgaatttacagaaacagacggagagagtgatgaaaagagagaaaccggcgccggctccagccaccacgaacggtggaaagattcgcgttgtcttattctgatgtcctgacggcgctgctgggactaaagaggaaacgatcggagccggagcaagaaccggaaccggtgccgagattgatcgtgacggcatagagatttagtaaaccgaagctgaaccatacacagaggagattttcaaagacaaattgttgctttttgtgtttgtttcagtttttagactaaaatcggaaaaagagagaaaacgttttgagctgttgcggaaatggaaaataaatttctatacatttaattgatcattgattaaatcattaacatcatggtttattacgtgttaaggttgcgaattttgattggttaaaccgaatgaatactaatccaaagtccaaacacacagacaaatccaaaacctgttattctttctatatcaaacaagaaccatagaaagaataactgaccaatattttatttatttatcgttttttgaatgacaaaactcaaattcaaattcagacgaaagccaaaacatatacccggataatgaaaccggaaccgggttagacccacgtgaagatttaaatgctagactgttgttgcgtggctttttgatagacaataaataatttaattagtaacgcgtttaggtgtaatttgataatgaaactaaacaaggtattccaaattcacgtgcggtggtggggaggccatcaaagatcaccatgtggaattgtctaatttggtattttacttgaaactaattaattactccttaagatagtgaaaacggcacgcaactcttttctgtatttagaaaacggaccgacgttttagaaactaccaggaagctgctgttgtctaaattatcatcaagttggattaggtatttatttggtttgtcttttttttcttacattagtcaacgtttttctttattggatttatgactgttcgaagaggattaaacacgtcttctcagtttccttattatgaaatatctctcagcgtttctattgtaacttttcctttcttagttatatgaggaaaggaaaatcaataacttaagataagaaacgttagcaaacacttatcgaacgtagattagtattacaaaagaggaaacacttaccgaattgaatttaaaaaattggaaacttaattgcactacacaattccagaagaactaagaacaatagacatcctctatatatttagattttagagtcattgatagagctcacacaaaatcttgaattgactctcataacaactatcgcaagaagtagaagaaagaagatggtgaacgaaacagaagcattaccatgcgagggaggctgtggactctacggcacccgagtgaacaacaatctatgctctctctgctacaaaaagagtgttcttcaacactcgaccgctttaatattcgaacccgagaccgagcaatcacagtgttgccctcctatgagtagtcccgtcgctgaagaagaaccggtcaaaaaaaggagatgtgggagatgtaagaggaaggtaggaatgttggcattcaagtgtagatgtggacacaaaattaaagggtcacatcggtatccggaggagcattcttgtcc

SEQ ID NO: 38220 - DNA, 13466 bp, Arabidopsis thaliana landsberg
cagatgtaagctcatcatgggccaagaactcaaactaactatgagtctatgatttgttaatttttaattcctggttaatactagatatatgggggatataaaaatccagtttattattacaatacatatatatatatatataaatatatatatatatataataaaatatatagttaaatttgaaagtagaagcactgcggctgctagaggtgaacgtgagtaaacatttctcttcttatttctcactatcttaatttgattacattaggtttctttatatagagcatatagattatgttaaatcctctaaacatttgaacctattagtcaagataagatcttgactaggaaagctggagatgcctttcttaggagctgccttagccacaagcttcacacattttgtcttcttgttcttttgtagatgaccgttgcacactaacaggctgactggacatttgtttcgtcttgggcttccagaccatgttattgggcttgggcttatctgaatctttagacaacattggtggaactacaccgtttagagttgtgtctgaatttgacctaagtctcttgtccttttgctcgattaggttatcttcaccttttgttgacctttcaatctcattctccatcgatctctttgtatctccattaatagtccccctcaaacctggagtgggtggaacatcaacgccaagttataaaccggagagaagcaaacagaccatgaggcagagacttggtgaagatatctgaaggtcgaaattgattcgagatgccagttacccggacagttcccagagctacctgtgtcccgaacgtagtggcgatagattacgcgaagtgcttgctcttcttgtgacatggcggattcgtgctgaagaaaaccgatgacatatcatccccgtgcaactgcgatgtttgacgatgtggacatgtgagttctttcagaagctgacatatccacgtgatacccgaagcagcttcagacagagttctgtactcagcttctgttgagctctttgacactgaggactgcttctgtgacgaccacgagatgaagtttaagccaaaataggtacaataacctcctgtagaacgtcttgtttcctgacagcccgaccagtcactatcactgtaagcccttaatgtgcaatctgactcctttctgaagttgatacccatagtaatagtgcctttgacatatctcagtatccttttcaacagggagaagtctagaactgttggtgcgtgcattttctgacacacatagtttactgcaaactgtatatcaggtctagtgagagtgaggtattggagcttaccagctagacttctgaaataggtaggaattgggaaagcttcttggttctgatttctttgtttgttgagttgcagtggcagcggagttggcataggagcacaatcactcatggcagctatagctagcatgtcttctgcatatttctgctgagacaagaacagcccatctaagtgaaactgagcttgaattcccaagaagtagtgcatctgacccaaatccttcattttgaactgcttattgagttctatgagcagtgaagccagagtttctgagttgtttcctgtaatcaacatatcatcaacgtagagtagaagcagtatgatgtcctttcccttcgcataaacgaacaacgatgggtcaggaatactgcaagtaaagccaaattccataagataggtactgaacttgtcaaaccaagctcttggtgactgtttcaatccatataatgacttatggagatgacacatgatctggttttgactcatctacaaatcctgcaggttgtctcatgtagacagtttctgtgagatcaccatggagaaatgcattttgcacatccatctgcttgatatcccactgcatgattgttgcaagatggagaactcctctgactgtggctgttctcacaactggactgtaagtttctagataatctatgccttcagcttgatcatatccctgagctacaagtcttgcctttagcttctgtagagatccatcagcatttaatttggtacgaaatatccatttacttcctaacacatgcatatctggagtatagggcaccagagaccatgtgttagcttctttgcaatttcccatttccactttcatagcgtcagtccatccttcatcgtttagagctgctgtaacagttttaggttcaggatatgagaccttgtgagttagcaaagcataccgtggatttggttttcttattccactcttctgtcttgtaatcataggatgagttggctgagcttcttgtgttgtcactgcaggttctgagcttgagctgatagaagcaggcatgtcttgattcaaactttctgcagctgtatcttgaacttcagatgtgtctgagctggtaaaagaagaagaaaagctgttgcctataggaaaaggatctaagccctccgtacacccagaacttctctcttcttccacagtagacacaggtagagttgcaggttgttcttctacagtctgagatcttcttgttggtagtggagggaagtctgcatcattaaacaatgtttcttcttgaactgattgatttggcgagcttgatgtttgtggttgactcttgtaccaggcagtcatcagtggagtgagcttattaccttgcatctttgagtgagattgaggaaaggggaaaacagtctcatcaaatatgacatgtctgcttatataaactttgcctgtggactgtaagtagcatctataacctttgtatttttcattgtacccgaggaacacgcattttagagaccttggatcaaatttgcttgatgcataatctctcaatgtagggtaacacgcacaaccaaacacacgcagagctgagtagtcaggagatttaccattaagggcttcatagggactgcattttgttgctaaagctgtagtaggaagaaggttaatcaggaagcttgctgtgtaaaatgcttcaacccaaaacctctgaggtacattactctgaaacatcatagataatcctagttccacaatgtgtctatgcttcctttcagctaacccattttgctgaggtgtgtagggacaagagagcagctgctggattccacatttctgtaagtgctctataaactgtttgcttataaattccccatctccatcacactgaaacgttccaatcttagtttgatactgattttcaactaaagcttgaaacaccttgaaggtatgagcaaaatcagacttgtacttaagtggatagaaccaacagaagcgagaaaagttatcaataaaaactgcataataactgaatccttgtactgattttataggtgaaggaccccagagatcacagtgaattctctctaagggtctagaagatacaaaagatgatgcagaaaaaggtaatctaatactcttcccaagttgacatgattcacaaagcagcttggtacttttattggtgatggagatcgattttgatgcagacaacaactggagaacttgagcattaggatgtcccaaccgtctgtgccagatatcttcacttgctccttgttgacgtgaagagaacatagcttgaacaggtggctttcccaacacgtacaacccattattgtttcttcccattgtcagcagtttctttgttgccttatcatacacacgcacatcatcacaatcaaattgaaacacgcagggatagtcttttgtgagcttagaaacagacaacaatggtttagcaatgtcagggcaaacaagtacatcattcaaagggaggttacctgaagtagtagcaagacttgttgacccggtgtgagtgatgggtaagaagcttccatctcctaccattactgactcacttccctcatacatgtttgattgttgcagcttgtgtggagcgttggtgatgtgagaagtggagcctgagtcacctacccattcactgcctgcatggtctgtgacatccgtaattctgagtgcagccagagccttaggtaagtcctcatcttggtaactattgttgaatctgtaccaacacttcaaagcatgatgtccgggtttaccacagatttgacagataactcttgtactgccatttgagtcttgtgaaatctgttgatgaaaacctctcccttgtgttgtgaactgattcttgttgttgtttctgccatttccaaactttgagttgcctctgcccttgttgttgtagtaaccagaggaatcaggcttggaggtgtaaaacgccatgtgaggagatgtttcagaccctggagcataactctctaagcgatctgcatacccggtgagccttggaatcacactttcaaaggttggaggaggcacagcatccatagatccttcaacagaggttttaatgggttcatattctctacctagaccatgtagagcagcaaagatcttcatctgttcgctaacaggacttcctactgaagctagcagttcacacaccctcttaatctccttaagataagcttccatagttttatcttgcttttctatggtttgtagctttctttgtaactcaaagagacgggaagatgataccttgttgaaatgctgagctaaggacatccaaacttgatatgatgtaggacagctgacaacttcacgcatgatgtcttcagttagagaccccagcagccacgcacgaacaacttggtcagatctatgccatgtatgaaactctggatttggaacctctgtggttaggccatcaatgttgttgaatggtgttgttgcaggcggaggcttgagagatccattgacaaaacctagaaggttctgtccagaaagaaaggattcaaactgagatttccaaagtatgtagttttgctcattgagctttactgtgacacagttagaaatgtgaagaacaggaggagaatagagctggatagattgatccattttcagaaaccgtagtgctctgataccatgaaagtaagagcaagacggctactttaggtaatgttttgagtgaactttgctttgtattatttcacttggtctttaagttacaatattagttcccttttatagctagacaatactaggatttcaatgattgtaaactgacagctgtctctgtcttatcaagcttcgcaggtcaccaaacaaccaaatctgttctttgtgttgattggctccgtacagacgttcttcttctttgtcttcactctgtttttgttttcttgcacaggtggtggtcttgtctgttgagaagaggaagaagacttgttgggcttcactgttgtgttggttgtgttgtcattgggcctgtttggtgagtggccaataacccttttcctttgttaagctgagcgacgtcgttctctttctttgactctttagctgaacttgagctctgattcgatctcatttcagatcttggagctcttgatggcggagcagtggagctcttgctaatatccccccgtaaaccggtgtaggtggctcaactacaccgagtttgtacctgagtgaagtaaacgcattgaacggaagcaatttggtgaagatgtctgcggtctgctcatgtccaggtatgtgtctcacttccaacaatccaagagccactctttctctgacgtagtgatagtggttctcaaagtgtttggtccttttgtggaacgccggatttactgttaggtagactgcggagagattgtcacaatagagggttggagctttgagaagaggaactcgcagctccttcataattgagctgagccaggtgatttcagaggctgctttagatagcgttctgtattcggcttcagtggagctcttcgatacagagttctgcttgtgagacgaccaagagatgatgttgagtcccaaatacgtgcagtaaccaccagttgaacgtcttgtttcaggacaaccagaccaatcactatcactctaagctcgtagtgtacaatctgactgctttcgaaagtttattcccatagtcattgtacctttaacatacctcaatattcttttcagaagtaagaagtccagagttgttggcgcatgcatcttctgacaggcataattcactgcaaactgaatgtcaggtctagtaagtgttagatattgtaacttaccagcaagactgcgaaagtatgttggattctcaaaggtatcctgattctgtctcctttgtttgtttagttgaagaggcagaggagttggcattggggcacaatcactcattgaagcagcaatcagtaagtcttctgcatacttttgttgtgataagaaaagtccctctgaatgaaattgagcttgaattcccaagaaatagtgcatttaaccgaagtctttcatcttgaaccttttgtttagttctgcaagcaataaggcaagtgaatctgagctgttacagtgatcaacatatcgtcaacatacaggaggagcggaatgatatcctttcctctgctgaagacaaagagggacgggtctggaatactgcaatgaaatccaaactccaagaggtatgtgctgaacttgtcaaaccaggctctaggtgactgttttaaaccatacagtgacttgtgtagcttacagacatgatctggtttgtctggatctacaaaacctgcaggttgagccgtatagactgtttcagttagatcaccatggaggaaggcattttgtacatccatctgtttgatgtcccactccattatggttgcaagatgcagaactcccctcactgttgctgttctcaccactggactgtaagtctcgagatagtctatgccttcagcttgattaaatccctgagccactaaccttgctttcagcttttgtagtgatctgtcagcatttaacttggttcgaaagatccatttgctgcctaaaacatgcatatctggagtgtaaggaaccagagaccatgtttcagcctctttacagttccccatctcttctcccatagcacctgtccatccagggtctttaagagctgcagctacagtctttggttccgggtaagacactttgtgtgtcagtaaagcatatcttggatttggctttctgattccactcttttgtcttatggtcatagggtgtgtagacttgacttctgcagattcttgtgcagactcttggacaggtatctgactagctaagatgtcatcttgtctctcattttctgatcttgttgtggactgttctgtgatttcttttgtagcctgacttgatgtttctattgagataccaggattgtgagaagaagaagagaagctgttgcctataggaacaggatcggagcctgccgtacacccagaacttctttctccttccacagcaggtacaacaatggagattggtgtctgtagaatgattggagttttcacaggtataggaggaaaatcttcttctgaaaatagactatcatcttgttttggtggagctttgttaacattgttgattccttttgtccaagctagcattagtggagtgagacttcctgtcttaggtcttgagtgagactgagcaaaaggaaagactgtttcatcaaatataacgtggcgactgatgtagactcttcgagttgatggtaagtaacatctgtagcctttgtacttctcgttataccctagaaacacacacttgagtgatctaggatcaaacttgttcgaagcataatctctcaatgttggataacaggcacaaccaaaggttatgagagctgagtagtctggtggcttgccatgcaatttctcataaggactgcacttcatatccaaagcagttgtgggaagaagattgattaagaagtttgcagtgtagaaagcttcaacccaaaacttctgaggacaggtactctgaaacatcactgagagaccaagcttaatgatatgtctgtgtttcctctcagctaacccattatgttgcgatgtgtagggacaggagatgagctgtttgatcccacattgttgtaggtgatctgtcagctttctgtttgtgaactctcctcctccatcacactgaaatgtaccaatctttgtttggtattgattttcaaccaaagcttggaacacagaaaaggtatgagcaaaatctgatttgagctttaatgggtagaaccagcaaaatctagagtagttatcaatgaacactgcataataactgaatccttgatttgatttaacaggtgaaggaccccagagatcacagtgtattctctctagaggtctactagctacgaaagtagaagcagaaaagggaagtctaacacttttcccaagctggcaagattcacacaccatcttggtactcttattcccgatactgatagctttttttggagataacacatggagaacttgtgaatgaggatgccccaacctttgatgccatatatcttcactcgccccttactgtgctttccctttgtcaacagtttccttgttgccttatcatatattcgaacatcatcacagtgaaattgaaatacgcagggatagtcattggtgagcttggaaactgacaacaagggtttagaaatgtcaggacacacaagaacatcatttaaaggtaagttacctgaagtagaaggaagactgcctgatccggtgtgagttatgggaaggaaattgccatttccaaccatcactgagtcacttccttcatacaactatgtctgtgtgagcttgtgaggagcattggtgatgtgagcagtggagccagagtcaccaacccattcactgccagattgatctgtgacatcagttatcctcaatgctgcaagagctgctggcagatcttcatcctggtacctgttattgaacatgtgccagcacttcagagcatgatgaccaggtttaccacaaatctgacaaacaattctttctccattagagttctgagatatttgctgatgaaatcctctaccacgggttgagaatgaatccttgcttttgccactgccaaatcttgagttgcctttccctctgttgttgttgttgtagtaaccagaagagtcagatcttgaagtgctgaaagccatgtgtggtgaggtttcagtgtctggaccatagctgtttagtctgtcaacaaagcctgacaaccttggaatcacactctcaaacgttggtggtggctgagtatccatagaaccctctacagatgtcttgatgggcttatactctcgacctaacccgtgaagagcagcaaaaatcttcatttgttcactaacaggactacctatggaagctaactgttcacagaccctctttatttccttaagataagtttccatgggtttatcctgtttatctatggtttgtagctttctctgtagctcaaaaaggcgtgatgatgataccttattgcagtgttgagccaaagcattccagacttgataggaggtggcacagttgacaacttcccgcatgatatcttcattcagagatcccaacagccaagctcggactacttggtcagatctgttccaagtatgatactctggatttggtacctcagtagtaagaccatcaatgttgttgaatggagttgttgcaggaggaggttttagtgacccattgataaagcctagaaggttttggcctgacagaaaagactcaaactgtgtcttccaaagagaatagttttgctcattgagcttaaccgtgacacactttgagatgtgaagaacaggagcagaatagagttggatagattgatccatcatagaccgctgtgctctgataccatgaaagtaagagcaagacggctactttaggtaatgttttgagtgaactttgctttgtattatttcacttggtctttaggttacaatattagttcctttttatagctagacaatactaggatttcaatgattgtaaactgacagctgtctctgtcttatcaagcttcgcaggtcaccaaacaaccaaatctgttctttgtgttgattggctccgtacagacgttcttcttctttgtcttcactctgtttttgttttcttgcacaggtggtggtcttgtctgttgagaagaggaagaagacttgttgggcttcactgttgtgttggttgtgttgtcattgggcctgtttggtgagtggcccaataacccttttcctttgttaagctgagcgacgtcgttctctttctttgactcttcagctgaacttgagctctgattcgatctcatttcagatcttggagctcttgatggcggagcagtggagctcttgctaatactttgctcacaaacacgtatgatcatgtaacaatctccatcctacttttgtcacaagcgatgtgttcaaatcctttccagaccaccctctgtccgtggacgacaaaccctatcccaagcaaccaaatgttgttttctcttttctggtgtacttccccataaaaagcctcttgaaactttatccaaaccatcgccaatcgattttggtaaagatattgtgctcatggtatgaatcaatatagatgccaacactgatttggtcaatgttagtcttcttgcaaaactcaaagagcagcctttccatcccggtagctttgatgacacttttttgaacaaaatagtattagcgcggagaagatgagaattctttaaggatacttttgggatggttgtatggaaacttgggctgtatggaaaaaatggcagaaagcacttggtcgaccaatgtttgccatgggagtttggttgagcttgaaatagaggtgcggttatgtgtttggcgaattggaaaaatgtcgggaaagagtaaagtttaccagagaattgggacaagaagtaagccgtgcacataactcacttcgggagagtataggtacgggtgtgagagttgagcgaatggtaacgtggagaccaccgcgggacgagtagttaaagctagatatcgacttgtcctttcacaagaatccagttttgactacagcggggggactcatacgggatgcaacaggtagttggtgtggaggatttgctctcaatatcggtgtttgttcagctcctttcgcggaactgtggggagtttactatggactttacctaacttgggagagacatatcacaagattagaggtcgaggttgattcggagttggtggttggattcttaagcaaggggattagtgattctcatcccttgtctttcgtggtacatatgtgtcatgactttttatttaggaactagatagtctggacttcacatgtatatagggaggctaaccgcctagcggatgagttagaaaactatgtttttactttaccattaacctttcatatgttaaaggttgttccacatgttgagacgatttttcaggatgatgaccgcggaattgcgtttctgaggcatgtccgtctttagttttatttttttgggggggaggaagttgttcccccgggttgtacagaaattagcgagtaacaccttaaacacatgaaacgacaccaaacccgagcacattatctatgaaatataccatgccaagttagaagaggagaaacactttgaggattatagtgatgctcccttgatagcaggtcaagtcggcatctaatagagttattaatatcctgaattagaactgagcttggcctcgaagagttattgtgaggtctagagattctttccctccaaatgagataaatagacgcttgaaaagccaacttaagaatcaaagcaatgttcttcttcctgctaggatttttaagcatctgactcctgcatcaaacaaagatggcagagaaacatgggcccttgcagtgaaagaactccatacttctatagagtaagagcaatagaaaaacatatgttatcttatatttttcttaattttgtattaattctttgtaaagtttaattttcatatttttactactttaaaaaaaaatattttgtttttttaaaactttataattgttttctacttgtaattggttttagaaaaatatttttttataaaaaagggtattttttaatatatgtcttttaaaaactacaaatttgcaaaatatttctataaatgaataattattaattttttattaaattagtactatttaaaatttatagttttttctcagttgcaagtgcaacattattaatttatagagattttagtgtacacttctataaataaatcaattcattgagattttttttcactattcatcaaaaatattaaaattaagaacaggaaaaagctcttcatttgcataaggaaaaaacaaaaaacaaaaaacaaaaaaaaaagacaaagtaaggaggccagatagcagacccgtctctctccgtctccgtctccgtctccgccatgaccagctcttccgctccttcacgcaaggtcgctctctttctctcacatgtcttcaaattcatgtttctctttacaaaaactttgatgattcaatctgagaaattgtgttctttcattcatgcgtaggctttaagcaagatcgcgtgtaataggttgcagaaagagctttctgagtggcaattgaatcccccctctggatttcgtcacaaagtcactgataatcttcaaaagtaattttcattttcaaaatctttcgttttttgatttctttttttgaaatttttgattgttttttttgtttttgtgtggtttaaagatgggtaattgaggtaacaggagcacctggtacgctttacgctaatgaaacttataatcttcaggttgagtttcctcaacattatcctatggaagctcctcaggcaagtttttcattgtgttggttttgttctgaaaaatttgttgattttgattaagggtttatttcaaatttcttaattgtggcttaattaactgaaaccagtgttttttttaatggttcttttgcatgttttggtcagagaatttgtttgagatatagtgacattttttctgcttggtttttgtgttgtgttctgattttcatttgtttggtttttgatcaggtgatttttgttccaccagcacctttacatcctcatatttacagcaatggacatatttgtttaggtaattttactcattgtttctacactacttactctttgcatttgctcttactttttggtttctctgaaatgctagctcaagtcatgtgtgtgtcaatgaaattagtttatctgtttgatacttacatatataggttgttcttgttcacggaatgtaatgtagcgaaaagagaagcaatataagtaacaatacccttaagagtcctaatatattatatcaacattgttaccagtcttaaactttttctcagtctgtctcattcttaaagagttcctaatactagcgtcgcatgacatgaaattaggtgtgaatgtgttatcaacgccataaagaaaaccaataccgtcccttttggactctatggtgaattctttagcaaaatcagaatctattccatgagcctctcaatttgctagtcatttgaaactcctt

SEQ ID NO: 38221 - DNA, 5738 bp, Arabidopsis thaliana landsberg
  unsure (1)..(5738): unsure at all n locations
ctgcacaggaatctccctctgatctctaattgcgtctcttatcttctggacagtcgcttgatctgtctctgggccctggagaaacctgaagccaaccactttgcacatatccatatcacgaaacaacaaagacgcagccggagaagactgcataacttaaaaggcatgataaatctcatgagtagaagatacaannnnnnnnnnnnnnnnnnnnnnnnnnnnnnnnnnnnnnnnnnnnnnnnnnnnnnnnnnnntcaattcaagaaagctgtctgatgcaaagatctgcaaataaaacgatttccattatcaattcaagattatatgcttacaaacatagtagaacacttgagtaagaacaatcaatatatgaaatatactctacaattgatacattaaggttcgagaaaaaaacgttcatctcaattttagacagaaaaaacatacaatgggattatcagggagacgaggatcactgatgacgaaattcttctctatgcgctcaagagtggtagctagatcaatcccttggcgtatatccctttctctatccgataggtcccaactgtccctctgccctattacttctgtgctcaacatcaattcttcgggttccatacgtaaaagatcttcatgcctgttattcgagcttttgagctttgacctgcacattacacgaagctagatcagaaatccttgagtgtatatgtatacatatatatacacagcttcagaattcactacccaatccatgtcagaggatacattctaaggcccagcacaaagttacaaaagtacacgagaaataagaaacagaacaatagtaggagattgcaactgcatcttcgtattcgaatggaaattatctatgagttaaatattgactaacacaacaactagattgagattgtgtagtatatattttaccactatttggcaatgataatagcaagttgtttctgcaaactttggcactgccatcacactttttgggcaatatatatgccttattttatgttcaggaagactactgtaatctggtggttagtggttacgaagactcaccccgttggagtagaaacacgtccaggtgtcctgaaagactttgaagcctcatctgactgtcttgtttgtctaccaggtgtaggtgtagtagaactatcaggctttaccatagtgtcattgctcacggattcctgaacttgagacttacgatgtcttatagtttgcacaacctctgtgatggaatccaaagctttctccttctggcgagctgatatcatcatcaaaaccattacatgttaaagattgtggatcagcactctttgctaaattatatcattgtttttggctaaaaaaaacttgttgaattaacgaagagatgcaaaaaaacagataccatcatatcgaatcaaggatttggagagtccattaggcctcaatgctttatcatttaccccttctgtgtatttgctaacttcaacctgcatcctgcagatggaaatgtgaaaatgattgatcaagggacagtcgattaattagggaaaaacagggaggaattaagggacgtacccaatgaacttgatggtattgccctggtcgtccttgataggagtgactgtgagaagattccagaagggagttccgtcctttttgtagtttaacagccttccacagtaactttttccattcttaacacaatctctgattttggcaacctcattcttgtcggtgtctggcccttgcagaaaccgggctggcgttttacccacaaagattaagagcatttcagagtaagttggcatgggtttcaaaagcaatattattctaactaataactgggaatgaaactagaagcaagatacgagatgagcagtaccagtttcttccaacaatttccttggaagaataaccagtcatggtaaagaatccactgctggcatagactatgggacagtgaggctgtgtagcgtcagagacaacaaaagtctgctgcaacgtggatagagcagttttgagctcctgggatactctagggaaggcccctgattcagaagatgtagattcttcggatgacctcctagacatgttcttgcttcgttccacttcactggacagcttgaaactaatgccatcgtctcccgaatccggcttaacagctgacaatccccattcagcggttctttctgtaatcttagcggaatcttgaaactccatccacttactactactacctttgttgttgccatcaagaggaggctttgaagaagaagaagttgatccatgtgtctcttttccactcgaagggttgaaaatctcaagagatctacgttcacttaatgactccgcatcattcaaaggagatggaggggctcttggcctctccataacgtttctttattctctttcttatggcgaaacagagtaatgaatagtctgcaaatcaaaaccagacaccacatagacaagttagatagaaagaagaggcagacacaactgtaggttcgagaaacaaagtaataaatgccattaaaagtctttagaagcaaatcaacaaaacacgttaaagaaggtgaagtagataaaataaatgaaaaatatatatataccaaccagagtagctttatcagctgcaactcatggaaatatagtacacagtctttaaaaggagcaaagacgatgagaaagatagagagatagaccaattaaaaaacacaactgtactgtttccaaaacccagttatattattatttgagttattttaaaaagacaatcatgtttctgaggctgcaaatgagcgatgcggaagcctgggaggatagacatcgctatcaataatcaaactcacatggaccctttttcaccctcaaggtcaaggaccacacaactctgtttcctcttaatacgtgcactcttgttcatcattccctcttctttcacaaattttcttcataatcaaacgaatttattacacccctcacatcaatttttccagtacaataattcagacatgtttcaatgtaaaatgaataaacaataaatagataaaacccagtaaacttacgattgtagtagaacagaacatgcgccatgatttgattagacgaaaaatgaacacgtttaagaaaatgactgtggcttcttctctcccagatgctttcgcagacgacgaatccacaatttgtttcttctttcactgtctgtttcaaataatgtcgatgaaattaaagagaagggacccctaaaaacttgttaggccttattattttcccgctaaaagcccattaagtcctagtgggtcttctctaatgggccttattagttaagattaagaagtaaggaaagtgagggagaggcgagggaaaactgaatccaactgaagcaagcagcaatggaggacaaaagcagcggcggcggcgttaggcttcacgtcggcggattaggagaaagcgtcgggagagatgatcttctcaagatattctctccgatgggtaccgtcgatgccgtcgaattcgtcaggaccaaaggtcgttcctttgcctacatcgatttctctccatcttccaccaattcactcaccaagctcttctctacagtgagtgaattcgatctctctctctctctctctctctctctctctctctctctctctctctctctctcagtttttaccaatttgttttagtaatactggttctagtgacatattttgagatctatgattgttttagaaacttgtggatgttgcaatctcttgaatgtttgtgatcatcactgtgctggatcttaacttgtgtctaatataggtggataagttgtatttggtgttgttagtgtgatggtttagctcttgaattttcgatttgtcactgcttttgattctttgattcaacctacttcagtcaatttggctgtggaaggttccatatagtcccataagggatttgttatttgaagtcggctttttaagtttcagttcgagtgttggaactttgtcttttgctttggtaaaccttatttgctagtgtgattgtttagctctggagttatccctatagtgaattaagggttttgttagttggaaactggaatcagctttccaagttttagtttggtttctttgttcattggaagtttctcttctgctttggtaaaccttatttgtgtgtgtttcttccaggtggttttctattccttgggctaatgatagacaggctgcatcattacatgagggagctacgcataagaaggaagaacatggaagttataaagaaggaaggagcattattggaaggtgttaaggccagaggtttagatgaagttaaaaacttgatggaagaaattacgtcccttcggaaaaggcaagagcagctggactctgagcttgaggcaaggtctaaagaaatccgtaccgagaaaactagtgcggttgctctacagaagcaatctgaagggttccttattgagtttaaccggttgcttgaggaaaaccaggtgctgcgagaccaattgcacactgtggattcgaaactttcgcgttcaagcagcaaaaagaatacttgagagaccttattccaacacttgaaacttctttgcgattctgccgtctgaatatatatgtttcgagtttgatatcaggagcttgtggtttggtgttatcgcatcttgttaacatggaagatgattgggaaagatcagagaatacaaaacaagtataggtttgcttcttgtttaagtgtttagctaaggtagaaattaatcaattcttctgctataggaaactgtaactcgttgtaacttgttcatttcgcaacaaaaacttctcgaattggttcttatttccttccatatacgtatacagtcgctgcaagtgggttgtcattataatttctcataagttcacagacttgttcaaaatagatacttgttccgaaattcaggaaggatgctgcaagcttcgtgttggggaatttacctcgctcttgacgaattattaaggttttagaaaattgggtctcaaacagtctatcaacttaaaatgcatgtttcaagcaggaacgttcttcaatatatgacaaataactattatcatcgtgactttttgacgttttaatttatgtggttagaaaatgaagataaagcgagcttgaccattttcaaattttttatgctacaccgtttttaccgaaccatttgatacaacttactaagcataaacaaaagaggcaggctttattaaagttttcagttttttcaccatcgaacttacttagaaggtatttacaaagccaatgccttcaaaactacaaaggccttttttcgttaggaaacaacttaaaaggaactgcgccaccatttctactacgactcaaagtcctcaactccagaaaacatacaaacaacacttgagacgcagattgttcatactaaaaccatacgcgacaccaacccgatcgtgtttaggctgcctctgcaaacccgacctgttcgttaccaaagtcaaatacggtgtggtatttgcccatgaacacatctcccaagatcctgttacatttttaccaccgttcttagggttagaaaaagaaagcaagaagaaattgtgctacagagtaatagattcaatggtttaccagagaggtccacgaggtggagcaacgtcaagagcaataaaaccactgatgcactgtgccacaggtccctcaccaactttcagaacatactgctcacatcataccag

SEQ ID NO: 38222 - DNA, 3201 bp, Arabidopsis thaliana landsberg
atgacttaccaactattatgattaggggacacctgttatttacgtgcttccctgttgccatatggaaagggatggtcctggtaaacattctgttgattgagtatgtatcgttgcattcttaacctacaaatgtgacgtaactattctaataaatctacagaaaaaaccttttatctgcaaaaatggtgcaacatatcatcatatactggaatccgttcaattattgactggatgtattacaagcagcgtcttcattcagctattcaaaaagttattaccattcctgctgcaatgcataaggttcattgtgacttaactattttcactcctttttatctgagtctttgtttactgttgaaaaacatttaaccacttatatgacctctataggtggcacatcctgtacctagggtgcatcatccttattggctctagaaaaaggtctgtgacaaattccgtcagggaaaaatagttgatatgtttagctcagcaaacaaagatggtgtcttggacaaaaatcattcgactgatattgaagatttttgcaaagaaaacaaaccttccgtaaaagggccaaagccagttgcgcgttcatatgaagtcgatagaaatcactctgagcaagaaagttgggatccagagttccatgatatctcattacagaacgttgacaagaatgtagattaccaaggatggcttgaattggaaaaaagaaaatggaaaatgactctaaagaataagaaaaaaagaaggtactcttcaagtttatttggttttgatttggaacaaaatgtagatcaataaatatactcttatgaaaagtttcttaacttgtcgacactgtgtaggtttgatgatctaaagccttgtaatcagattgatgctcacaagataaataaaaaagtctgtaagggaagagcaggtgtaggctcatactttaggaggcctgaagaagctttgactagttcctatttgcaggtatgcatgacatttggtgagacctcatataattggcttctcttttgcaaccatgttaaatgttgtctttccgagtttctcagataatacagttggtccaaagtccacagagcgggcaatttattgcttgggttgttgtggaaggattgatgcttaagatcccattgacgatcccaagggtgttttacataaattccaaagcttctatagctggaaacttcacgggaaagtgtatcaacaagattcttcctcatggaaagccttgttacaatttgatggaggcatgtcttttacacaatacacatcttgcttcttgtatttcttctagttagttataattttcctttatttctttacaggtcaatattcaggaagatcaatttaaaaaagaaagcaaaaagcttgccgctctacttgcagaccccgaaattgaggtactattattattaagtaatctaataaaatgccatcagaatcccaacctttgagttctatcgaatacccttcacatgccttgactgttaaacaagaaaaaacttcactgttttaacgattttgactttggcagggcatatatgaaactaagatgcctctggagtttagtgctatatgtcagattggatgtgtatgcaaaattgaagacacggccaaacaccgtaacacccaagatggatggaaacttggtgaacttcacaggataactacaactgagtgtcgctacttggagaattcaattccacttgtttatttgtatcacaggtagagctgagttctacttcttcatcaaggaatgtcttgcttgtgaactctttttttatcgatgttcgagtgttaacaacatcatgcctacgtttgtagtcatattatttttaacttttttttgtctcttttattctttgggcatatgctattgattccctaatatttccttgtttttgcagcacctcaacaggtcgtgctatttatgttttatattgtcatgcttcgaagcttatgtctgttgtggtagtcaatgcttacggtgacaaggaattattatcatctgccctagagagacagtttagagatagatgccaagaactgtcacctgagccattttcttgggatggtatccttttccaggtaagctctaaaatatgcgataacagtcctgcatttttctagcttgtctaatgctaatcatcaggtcgagtatgttgatcatccagaagctgccacgaaatttttacaaaaagcgctctgtgtttacaggtaaactcatttccctgaataaaatagtgcagcacgttttacgaaacccataatttttctaatgctgatcagttgggcatgctttttcctattgtaattttttcctgcatgatctagttcttcttcattagaaaaattcagcaagttaattgtcaaaaaaaacaaaaagagtgtgacaatgacggattttggacttcttcaagacactcatgtcggtcaggtttgaatttttcccattgttgccttttcctgcagagaagaaaattgtagaccaactgtggcagtcattgaatgccctgactttaacaccatgaaggaaggtgtaaaggccctggaagatttcccatgtgtgaggattcccttcaacgacgatgacaattgttatcaggttccttgacttatcaaccaatcggcttcattcttatgttgtgatgaactttaatttgatcaagtaatgctaaatatgtacgtgttgtgatgcatatagcctgtctcctggcaacgtccagcagcaaaagtagcagtgctccgttgtgcttcagcaattcagtggttggaccggaggattgcccagtcaagatacgcccatgtaaagtggaaatgtacttcttcatattagtgtctttatgcagttattgatatttcctaaacaactgactaggtgcctctggggaattttggacgtgattggttaacgttcacagtagatatcttcctgtccagggcactccgtgaccagcaacaggttctttcttccactttctgtccagataaagagttccactaatcttgatctgtgcctctacagcttcaaaattatatgacaaaaggctattctctctgtatcactgatcttttttccatatcattgaatttggtattgtattacaggttctttgggtctcagataatggtgaaccagaccttggagatataaacaatgaagagacatttctagctgatgaggtatgt

SEQ ID NO: 38223 - DNA, 3188 bp, Arabidopsis thaliana landsberg
caacacatttgaacatagcatcatatttattggaaatcacacacaagataataaatgacacattatttaattgtatagcatatatgttaacatattaaaattaaatataatgcgtactattgatttataatgcgtatgattttctttcttaagctaactacatttcaacatatatagcatgctatataaagacacaatacacacgcaataaacaaataacatgttatcagaacataaaatatgtcacccgttttatgttcacaatgacatgatatgcatggacactgaagggtatcgcccatgacttctcatttttacacattctcctcccatttctgcatatcactcgattaggaggttggatacactctatgcctagttttggtggtcggtagaactaatctggacgcttttagtgttttcctttcgcacgaaaaaaataatcgattgaataaatcggctggtattacatagttgaatacgaaagataacgagatcacatatatttattaaaagcaaagcgtaagccatgggctagagaaccaagcctgcactgttcttttggggacaagtcatagaggaaggtgaaccatctaacgcatgaaaactcctgttccgtttgatttgaaagtttgatagtcatttttactctcatgttgtttattttgtaatatcaaacaaccttttcctctaccaaccttctctttaatcggtgctgcttactactaaatatctaaaggtataatgatagaatactcatgaacaaaaaaatacgcactttgaatgtatttaggtaaatactcgtgaaaaaatggtagaagaatatatttagttttttttcttgtggtaaaataagcatacgaattacaccataaaagaaaactgagccaaaattcatcactcggaaccagaccaaattttgttttaacgtatgatatagaaatttctgtttagaagtatgaaaccgaattgagctggatattgtccaacagaataaattaaccaaaattcaataatttttaatctttaagttaaatatatagacaaaattaatatatactaaaaaaattcatatgttaaataaaactgattaattaattttattttatttcataattctttaatccaaaaccgaattaaaccaaaccgatataaaatttgattctgtatttccaaaaatacaaaacctgaaaattcacatttttatttttattatatttctatttgtttgcctcaaataaagcctctctcgcctccaatatatctctgaatgctcgtcttaaattaaaaatttctatattctatctgtttctaaataaaaacatttgttagagttttcacatatattaagaaaatatattaaaagctgactctaaatatatatatatttttttatgatttacagttttaaattatttaaaccgataatattcaaatattttttttgaagtttacatttcatcaaaataactaataaatattgcgtagataacctaaaaactttattttaaaaagacaaatatttttgaaaaacaaaataaaaaatctattatttagtaacagacagagtagcatattaagttcctagggagcttcacacacattggtcctgaataatatgatccaaataaacatgaaataaactgagcatgtaaatgcatgggccatgtatacaatacagagcagacatggaaagttggaaacatatggaagtatgaatcacctggattacataatatactcagacatcataaaacatcatcattccatttttgaagtaaaaattttccccacatttaagattttatttaagacaaatgctcttcttttgtattttctatataaatatcgaaaatcacattcttctagtttccacaccttatgttctccaatccaacacatatattttctttcacaaaaaaagacatattttaccttgttttgttttacatattcttatattttatcgatttgtctttgtccccggctcatgggaatgtcgaataggtcagtttctacatccatttttttccttgcattggtggttttgcatggaattcaggacacagaggagagacatttgaaaactacttcgttagagattgagggaatttataagaaaactgaggccgagcatcctagcattgtggtcacatatacacggcgtggtgtccttcagaaggaggtcattgcccaccccacagactttaggccaacaaatcccggaaacagcccaggcgttggacactctaacgggcgacattgattcgatcatatcatacgtcataatcttatatcatatagaaaattacatgtattttcattcagacttgtcttctaatgctaaaggggtgtttggacatcactttatcatttcaatgttttgacagtactatgatcattatgtctttgtcgtgggtttgttacactgtcacgtattgtaagattatataatgaatgaattgcttttaaaaattaatatatacattaatgataaatcccttgctaaactgtctatgattgctagttgatcaatgggtttcattaaatatagacctaactgaaaacactttaagaagaagtttagtaggaaatatttacttatcacgctttgttttgggtcaatggttaaattatttctaaatacgaattcttagacgatatagaataacagagttaaaatattcaaaatgtttatggactaacgatatgctcattgagatgaagcttttattaattaatacccaatctcagtctttaggtccctcgttttttttccttgctttaccatctagggtatcctctctgcttctatatgttgatctctggtatcaatgctaagtatttatacaattttcacaacatttaacagaaaatatacgaatatcggaaaagatcgagaagctaacataaagaatgaaatctataataaaacgcatcaaggaaaaagcacaagcgataacccatctagttgattctaagaagattcatgattgtctcagtttcaaagaactcgactccgcatcgctgttgccatgagcaaactcttccctaggcaagccttcaaatcctcatctttccaaatataaggttctccttcaagagccaactcttaagtatatttattttgttgatttgagaatagtacttggaaagaagattactgattggttcatggtaaagttatt

SEQ ID NO: 38224 - DNA, 3787 bp, Arabidopsis thaliana landsberg
aaaatctgtattcttgcaaatcatctttcttatttaaagagaaaatagaaaattagaaattgctccctcttgttaaaaaaaaaaaaaaaagaaaaagaaactgcatcttctagtggacaaaaaaaaacttgttcttctcgtaaaacccaacaagagaataatcaaataagtaaagtaagcaagtagcagagcaactagaaagttttataaattttagttgaaagttgactttgagatcttcgttcttacaaaacagaaccaaacttcgacaatgtcactcatgttttcttcccctgtcgtcaccccagcactcggatctttcaccttctcatctcgaccacgctccaattacatcgtgatgtccgccgtccgatctaactctgcttcgacgtgtcctatactgaccaagtttcagaaagactgcgaaatcttcttctggaatcacggtagtatagatttttatttttactcgaatatctcaaaattaaaatgtaaatatttttaacatgatttagttatttaattatttttttaatttgttaaaccaatcatttgatgaaaacgtagatatagtttctacagagtttttaaaggagaaacgtatctacactctcttctcatttttttatttttctagtctagtggggagtctcttatgtgagagacccccaatggagctgctcttaggtttgtcaatgttctaatgcttaaaactgttttcattcagaatcagatcataaacactgagtggggaggattctctaaggttcttccgcagaccatttttgaccaagagatggatgcggaaagcccgaatcgtggtgaacatgtaatagaatttatcctttctttagatgcatttatgtttggctttaattttttttttttatttttttaggtaccgtctattgccacaagactcactatactttactgttttgtgtgtgtatgaagttatatgagaagatggtctcagggatgcaccttggtgaaattgtcaggagggttttgctccaaatgtgtgaaactagtgacttgttcggtcaattcgttcctggcggcaatctctccaaaccctttgtactcaagtacttctctctcacattctttatccgattccatttgcactcaagtacttctctctcacattctttatccgattccatttgcactcaagtacttgttcggtcaatgtgcagtttggtttatggttttgtttcggctcaatatttttggttttggttatatttgtagaaaatagaaagtgaaaccaaatgataaccacttgtacacgtgtacttcagtttcttcaatttgttgcaatttcgtttattaaacgaaaacaattggatttttttcaactttagtgtattttgatttctttggctcagtttgatttatcggttttggttacgtttcgatgttggttcagtacgattttaaaccaggaaaatcaatttggtcacaaacacattttgatacaaacattttggttcagctttggtttatatgcttatatccctaagattaaatatcctaaaatcaatactatctcaaagtggccgtgtgttttgcttttaaggacctttgaaacttgaaattaaaaaaattcctaactgataattttaattatatttgtgtaaattttgtataggaccgagcatctaaacaaaatgcaagaggacactacagatgatcttcagactgttggattagtcctatacaacattttggaggtaagttgttatatacaaataatgacatttagagagtggataaactgtataaaactaatcaagatattggaaacaggtagaggcaaatctgcaggaaaggaggagagtggtggaagtgtgtgacacagtagtgaaacgcggagggcgtctagcaggagctggtatagttgcaattgtggagaagattgaagaagagaccaaaagaatggattcaggtaaaagaaccgttgtggctatggacggttcactctacgagaactacccacagtatcaacagtatatggaagaagcactagtcgagcttcttggctataatcgaagttacattgcgatcgaacatgcgaaagacgtatctgggcttggtgctgctcttttggctgctactaactctatttatagtacttgaacgttgaaccgctacttttgtagtattactttcgtccatcccgcattgtgcccattatatatatataattaagattgttcagaggagcaacaaactagaagagatgagtaagtcttggcagaacaattcccaaaatgaacaatcttgatgacaagataaatactcttggataaaagtctttccctatttgctaaatgaaacactctaaatgactatagaagctttgacttaagactaatcaatgttataatcatacatatcggtcttggaaaaatatctatagagctagatcataacccgttattgtgcagcacggtagaactttaaattttaaatatttattgaaagttgaattattgtttgtttatagtacattttaatcattctatacataatacattgacatataagataatatcattaaaaatgtattttatttttctaatttaattaaactaatgaaattaattaaattagtattgacttgtttattcttgttgagatgaattaatttactctttcaagtttgatttccaataactttctaatataattacttacaaggggcaatgttacattatattttgtacttcccaaatactagtataaaatatatttattcgacccattatctactttgatatgattcgaaaattgctgatatttgtaagttcataaagcaaagcaattatttaaatttaaagataattttcataaatagcacttaaatgagtttttgttccaaatataccatcactagttttctttctaaaaaatactattaactttttccccaaaaatactacaaaactaaacctactttaaactttcacaatatactaaatccatacccaaaatttcaaattataaacacttgaatattattattagtgttcgtgtgtatccgaaaatcttttatcggatatacacataaacaaactcattttttcgcttccaatcactaaatcctgtgttggtaggatatttgtagatttaattctaaccataatcatgaaattgaaataaaatcaagccttttagatagatatatatatatatatatatatatatatgacttttatgaagtttgcaaaaaccaaaaggacaacatttttcaaattagaatacaatttttttaaaacaattgtagaatcaaatcgcatcctaagttcctaactattgttaacaaaaccacttactaaatctttgtgagaaattacagaaattatacctatttaaactttctataattaatgtaatttttacttttaaaggttaagtgattaacccaaacattttaaaagttaagtatttatttattatatgtgtatctataaagtatctataagattttcaggtttttgcaaggaattaatagatctaaagtggaaagagaaactattgtttttttctcaccttttatgcttcttcttctaacaactaaacccaaattgatcattagtccacaacccatagtgttagtttctgtgttatacgtttaattaagttatcaaaatctgtattcttgcatatcatctttcttatttaaagagaaaatacaaaattagaaattgcttccttttgtttaaaaaaaaaaaaaagaaaaagaaactgcatcttttattggacaaaaaaaaacttggtt

SEQ ID NO: 38225 - DNA, 5143 bp, Arabidopsis thaliana landsberg
ccgcaccgtgggcgtcttcgtcttcttcatcctcgacattgttgatttcctgctttgctttacctacaagactcttgatttcttcttcgagtccgagtggaaaccctgctactgctgtccgccgcccgaggccaaaccaatctcggctggagggaacagaggcggtaagatgatagtgtcggaaagatcaggagactactcgaaggtggtctcactcacaaggacaaagatctatctggatgagatctccgacacactctactctcgcccttcactcctcaccaagctcactaagctggtgaagtgcttcaagaaagatgttgttaaatgctgtgatgagtccaagaagagatcaccgtcaactaaaaagacattactcactgtcaactccacggtggtcgagaagttgcaaagaacaccaagatggtctgattgccattgcactttctgcacttcttggctttcctcttccaaccaatctctctttgtcaatgtccaacagcccacaggtacatatatatatgttctctacattctacattttatataatctcagtcccctgtttcgttgtcctcttttgaaatttgaaaaccctttcccactctaatgtctcctgcagcatgcattctcatctaaataatcttttatcatgaatttgattattacaaaagactggtagctcattaatcataattaaagaaatgtttgttggttgaacaaaaaacaaagtaatgtttgttgtatgggttctagctagttggggttttgcattagccattagtacaatcaaaaatcatttattactaagatgagaaaccagtcattttaaatgaacagacgcgttttaactaggattaaacattactttaaagaaatgccttaaagatccgttgattcttccatggaatagacaaaattgcatggggatgtttctcatctagtgtggagtgatcattcagaaacaatgtgaagaacttatgagacaatgcagacctaatgtggagtgaaaagacttagactcagaagctgagtgaaaaaatctcttagtagtttatccgtattacatcataaattatttacattatattgcttgttcaaaaaacaaaaaaacaaatattgcttgtgctacactaggtcagaaacaatttttgtaagaaatatataaactaatttttgagaggttaaagacataactaaatattaaatattgaatgtgcagacaacaaggcacaagagaacgtagtgttcattcatgggttcttatcatcatccacgttttggacggagactctgttcccaaacttctcagactcagccaaatcgaattacaggtttctcgcagtggacctgttgggttatgggaaaagtccaaagccgaacgattcattgtatacattaaaagagcatttagagatgatagagagatcggtgatttctcagttcagactcaagacattccatttagtggctcactccctaggctgcattttggctcttgcgctcgcggttaaacacccaggagccatcaagtcactcactctattggctcctgtgagtcatataatactgtttttatttgagtaacgcttcctggttagtaatggtaattaactgatatatgtgaacgaatggggaatgcagccatattattcggtgccaaaaggtgtgcaagggacgcaatatgtgatgagaagactggcccccaaggaagtgtggcctccgatggccttcggagcctcagtggctagctggtacgagcacattagccgcacagtcagtctagtgctttgcaagaatcatcacttgttggaatttctcaccaggctactcaccagaaacaggtaccattaatttatctactggagcttttctttttggtctcaacaattcattaaacatctaacatttaatgtaaccagacacctttaaatctctacctcatcctgagatagagatgtggagaaatcaatgtgacataatgcgatgttgggatatacttaaaatccaatttatgtgtatataattaatctactttcaccggtaatagtagtagatgcaatgaaaaaggtgaataactggaatgatgtattcatcacgcatgcaggatgcgaacgtacttgatagaagggttcttgtgtcacacacataacgcgtcatggcacacactacacaacatcattttcggatcggggagcaaagtagaggcttatttggaccatgtccgtgacaacgtggactgtgaggtcgcagtcttccacggcggtagggacgagctgatccccgtggagtgcagctacggcgtcaagaggaaagtgccacgtgcaaggatccacgtcgtccccgacaaagaccacatcaccattgttgttgggaggcagaaggagttcgctcgtgagcttgagctcatttggcgcagatccactactcctcaacttcattcaataaattaacccttctttattttaagctaagtatatatatattaataccaaccactattattcaaaccatcattttatacccattcacttttgcatatttcggtgactcctatgtagaaaaaaaaaacagaacatgtttcttttgtggttgccatttcattatgatttcgaattttgaagaaaaaatagagtaaatagttttgcggccaagaataaagtggtttgcaatgtgcgtccaatttcggatacccttgctgttttttttataggtaaatttcactttctaaccaaaaacacaaatattttttagttacatatgcaagaaaagactcccgaagactagaacattgtgatataacaaataagagactgaacattggccacatcatacatataacgcagatgatgaattgttggtatttgggggaaagaaaaccatcatatatagaagaagacattttacattctgaggaatgctttctcgaattgtgtccacttctgctccaatgtacccacataccccaccgacattcgtacaagaccaggagagatgcctgcagcttccttctgtgaggggtcaagctcgctgctagtgctgctcccggagcaggacatgagtgtctcgtagtaacccaaactgacggccatgaagccaaactgagtggcgttctggagatatgccatgagcttgttggctttctcctctgtctccatgtctatcgacagcaatcctccatatccatagtctctattcaccatccctttgaatagcttgtgctgcgggtgggtctcgagccctggatatatgactttcatccccaaatccctcattctctcagcatacacttgggctctgtggctgtgctctctcatgcgtaggcccaagtgagggattcgctcggagagctcgaaagccaccttggcgttcatggtgggacctagaagcatcagagatccgccacgaagatccatcatctctttcaccagcttctcactcccacacacggcccctgttttttaggtcacgacaaagacacgtgtacggttattttgctccttcacgtgaaagagaaacttacgtacgtcgcgacaaactaaatataacgctacctgcgatgatgtcagccccaccactgatgaacttggagatactgtgaaccaccacatctgctccaagcttggccggagatagcaccatgggggcgaatgtgttgtccaccaccaccgtcacgcccttctcgtgtgccatacggctcagttcaggtatgtcagccacagtcagcgtcgggtttgccaccgactcaaagtagagaacctgtgtcctaccctcaacgatcgcgtttgccaccgcgccatggtccgttatgtcaacgaaggaggtggttatgttacatgtccgtggcaagaaatgagagagcaaagcgtgtgttcctccgtagagcgtgcttgccgcgaccacgtgtcctccgctgctgcacagttgcagcatcactgacgatatcgccgacatacctgaagtcaatccgataccattatttatttttcgtaaactactaaaagttgaagtccaaccaaagattccgtatcaaacacgcaactaggttaccatgggttctgtatattcttttattttatatataacaattaccgctagaggtacagtaggcagcttgggtgccttcgagagcagccatctgacggctgaggttgagcacggtggggttgaagtgtcggctgtatacgtagaagtcgttgtccggtcccagttctccggtgaacatccgcctcatggtatccggttccatgacggtgaaggtggcggaggcttcgatggacatgtttactcccccgtgctccccaaactcatgtcggatattcgctatggccgctgcagggtcggcatcacacaccgccagtgctgatttctttgaaaccaaggcgtcaccgtcgtcgtcatcgcgatcgtttcgtttcttcccggagaatacgaggggttcctgtgtctcgaggaaatgagccatagtagttaactaaagaaaaagtagagcctttgttaggaaacaagaacctaggtgttaacgaaatgtaaagaggaaaggcttcaatttatagaataattaatcaagatttttttatcttatcaaatcaattacagacgttacttacacatttttttttttgttgtttacacatttgaattgatagtactattatttttttttaaagtgggagtcattcacgtgtaccctgtctaaatgtttggaacgtaacgcttttttgggggttattttttcggttaggtaagcttaactagagttttcgctttgccaaaacatgaaagctacatattttgcccttgtggccttgttgctttaggattagcatcccacgtacgtatcatgtgtttttgtgagtcactttttgatcatgtgtttttatttgaaaattattttataatgaattgctgtgatctctatctgtttacttttgctctccttatcatacacggcatcttaatctgttgaatacaaacagaagtagaagttaataatcacgaaccttatgatgaactactttcattattccaatttattattatatatcccttgggtaattgattgacaaagagaaccaatgcttgaccaaacaaaaaaaagactgctttttttattggttggtaaaagaggaatgggcaagacaa

SEQ ID NO: 38226 - DNA, 2851 bp, Arabidopsis thaliana landsberg
agatcaatacgctcttgattcaagtacctttatgaaaacgcaaaatctgtaactcacatcatagaagtttccctctttcccattcttatatcaaataattcacattaaaaacttgcaaacctaattcacatgctactagtaaagttcattattagcacaaagagaatcatctattcattgaaacataaagcataacatccaaatagctcgaaaactttgtaaacagaagaaaaagacagtaatgatcagcagtggtgttgagaatcaagctaacctgaggagttgagagagtcaaggcatcatgtttgctgaatataggatgcacaagtacaaagtaaatcctccagaagcaatactcgctcatgtacgcaggacaaagctcaatcctcaaagcagccagactcgatgcaagattctccacagccaacgcatgctcatattgggcatcagtcatttcaaagtctgatcataacagttgtaaaataccacttaacaacaacaccttcatataaaacaaaccctaaactctaaagtgatcagaaaaaactctcaaatacggaatatctaagtctagaccatagtagattccctcatcaacataatcgattacaaattagtgtcgaatctgctgcgaaatcgaaaacgtaccatcaaagttatcatcctcgtcaggaaaaggaaaatcaagccaagtctcaggatgcagagcaagatctctagcaaacaaaactacttcctccgtcacaccaattgcatttccaatcgcaacatcacggttcttcgaatccacaccttccgatcccaattgcaagaaattcgaagccatatttgtaaacttcgataccggtaagtttccagagagtttcgagatcccagtcttaaatctacctccgatctcaacgaaatcgttcctgattccagcaatcagatcctcatcaccttccgcgagatccgatgacttccgagtctcctcatccacatgatccgccgtatcggaagaagaaggaggtggcgcgaggaaagaagcaacgccccatagctgacttcttaaggtcttggtgagttcagagatgtcttccttcacgcctcgtggagactgtgtttgcaacaccgatggcgaagacggttgatctgagccggaattttcaatcgaattggtcttaatcgtttccttttgatcatcttcttcctcatcgatcttcagagaattcgcaatggatctagcaagccatgccatttttttggggatctctcacaagtctctcgagtatctctctcttaatccgcgacctttaacgagacaccattgacgctaaatattcaaccttacgaaacgtcgtcgctggattagttaatgagctacgtaaaaatagcccataagattgaaagtccagcccatctaggggctagggtatgcgggacaccattcaatttaagaaacgtcgttgtttaattatgcaaatgggcttagtagctaaagcccataaggtacaatatctagcccatctataggtttggttactgttattctctgttacagagttttatatgtcaagacaaaaactctcacatcacactgtgttatacacaaacccactcaaaacagagatttgctcagactcatttccaaaaacaggacatgtaaaataagcctatgtttattttgtgttaaaaaacagtagaaattgttgatgattacttgtcaaatctcacatttcttttcaattgttcattacaacagtagtagttcagaacaatgtatggagacttttggtctccaccacaacttatgtgctctacttattagacaagaatcaaaattcacatcatactgtactttgagatgtcactctatgcaataacagtgattgatttttcaagaatcacgtttttgatatttacttcattgaagacaataaggaggctgagaacaaagatgaaatcatgacaattgtctaattcctaatctaagtaaagctaaaagaaaacattgaatgaagaaaaaaagattcaaaagcttaaaagaggcttctacaagttcagggtcaaagattttgctttttttttttttttttctgttgtgaatggtcaaaaagcaaaacaacctctcacaagaacccaaagtagagaggtttaacttaatatggttcctttcttcaaattcttctttttctttgttcttctgaaattgatttgagccaaaggcggtaactttacacagtttttttctaattcccaatgcttattgcaaaacgaaccaatatggtaacattacataccgatccctcaaccacccggtttcttcgtcttccccatgtttccatcagctgattgcctcttcctttgaattgttaccaccaaaaccaatagctcaatcttcaaactcatcatctatatatacatcagggcaaaggcagattcgtaatgcaatgcacatttgtcgtttcatggataacccgctgaatcctgtgatcaatcagtgccaatgctattggattgtccttgtgagtttgcatttggaaataaacatggtgtctgaataatgtagactacaaagcttaagtagctccgctgaccgctgcttcaacgctgcatcacacccactctggatcacgagtaacagctttgcagcaagaccaacctcaacagcaagtggtgaacattcttctggagctaatttgcagacagaccaaagaatcgacagcgcgtagttagtgcaattctcagacaccctcatcagcaccctaactgtataaggtattgtgtttgcagagtctttgacagcaactcttccttccacgtctgtacacaaagcatcaagaacaaacagagctaactccaaacaggggat

SEQ ID NO: 38227 - DNA, 5296 bp, Arabidopsis thaliana landsberg
ggcctttttgaggaagtcgatgtggtgattctccatgacttctctactttcttgtatagtcccatgagtccatgaaaagctgtcttcggtttcggagggcttacaacagttgaaaacaagtcgcaaaagctgatctttgagcttagacatctcgtccatggtcttcaaatgcaacccattcgcctcgcagaagcccatgccattctccgagacctcaaaggaatgcaatgcgtaagctacagtcaaagcatcgctgctcgggttggaaaatctgtcccgagcagctttaatcttctctttccgatcctttttccgttgtttatcttcttgtttgacggttttgtcagcatctttggactcgtttttcttctctccttcaaactccattatcaaagggtttggtaagctcaacgcggctactgctgcaaccgcatatccaaggatgagattcgcgcgtgagtaattccgggtctcttttagcatttggatgactgttagaagcattcttgagtgacgtggactcataggatagtgagacatagcctttcctaatggtgttaaccctccgttgctgtctagagcctctaaagcttttaggcatcgttctgcttctctaatagctgatggctcaggcggagttggaaacgggaaattctcaacctgttagcaatagaaaaacgcaaagattcatcaaaaagtcgagcgagacagaaaaggagatctagtccattgacaatggtggctacaaacattttacctttggaatgttcatagatttcatgagaagaatgactccatcaacaggaactttcatgatttcaggaagcgaagattcctcaaatatattgctaaaaactgcagatgaatagagacgataacagtgaccaggtccagttcgtccagctcttccagctcgttgactagccgaagcttggctaatccaatctacctcataactttccataccagtcttagaatcataattctttactttaacccgacctgtatcaaccacatactttataccaggaatagtcagagaagtttccgctacattagtcgccacaaccacaagtctttcttctttctcaacttcctcaaacactcgaagctgtgcagctggagatagcatagcataaagtggaagaacacgtaattttcctggagaaaacttgttttttacctgctcagcctcttgattctctgctgcaatggactttgccggctcagcagatacggatccatttttgtctgccaaagcattaaacgctgctcggagagcattaagcttgccctcctcaacaaatgatcttgcaaatctgtcatcaccaggtgcacagtccctgtcgtgatcagactcaaacatgtcttcctcatcataatcatcatcatagtacacatcaccaatatcagaaggatcttctccatgcaagacgaaaccgggaattttgataggtgaagtcatcatcaaatccttccacaatctccttgatgccttcacaaaccaaagatccatcatcgcatttcttactcacataagcatctcttttagcagcttgaacaacaagttcctttgaagacttacgtaacttctcacataaatagtcaacttctctctgcccagtcacaaaaacaagtattcctccttgtggtaactttttgtgaattgacatcactttcttataagcttcacctatataatcaacaatctcagtcttcttggagaaatgtatagttactggatactgtcgagtgggaacctctataagaggaggtatattagggaataaccttttccccgatacaaaatcttccactcgcaaagtcgcactcatcaatataagtttaagtggcgtgatttggcattctgaggttactgtgcctccagattgaagactcttttgttgttcctcgtagtattcctgtcggattttgatgactcgagtgagcatcccaattaaaatgtctgtgttcaagcttctttcatgggcttcatcgagaataatcacagagtaacgcctcaataagaagtcattctgcagcagaagaacttatacaatcaagtaaccatgataaaaatggaaaagaatgtacaaaacaaaccaggcgaaaaaccgtcaattacctgtatctcacgaagtaaaatcccatcggtcataaacttgatagaggagttttcgccaatctttttgtcgtacctaacttgaaacccaacctctttaccaagacgaacaccaagctcaaatgccactctcttggcagtggcaagaacggcgacacggcgtggttgggtaatcccgataatcccacttcgagaactgaattgctttgaaccaaaaccagcttcataaaggaactgaaggattcagaaacaaaaacagggttagataaagaaaggactttctaactgagaccaaaactcagctatcagaaaaccgttacaaatgcagcaaactgacctgaggaacttgagtggttttaccacacccagtttgtcctgaaataataactgcagggtgacgattaatagcttccattatctcctgctccatcattactattggaagatccttcctcgtctcttcaacttcggctggtcttgaaacatgaactacaaacgcgggcacacgaggtccttgtacagttacatcttcattctcaatgagcccatcctgtttcataataaacccattagaaacaatcaaatcaaatatataaggcagcaataatagctcaatcaaaaaaaaaaaaaaacatcaaattttcagagttgacaaaccattgagtcttcatcatcatcacgacaagttgtcagtgggatcatatccacagtgtcgtctacctcaagcttgctactactttcttcagcagaaatcattagatcagcatgaaccagttgctgctcagaatcagttacaaaagttggagtttcaatttcaacatgttccggtgttgtaggttcatccatacaagaatcatcatcattgtcattttgctcgactgattcatcagaatgctcagtctcaacaccagctttagaaagttgcattgctctccttcttttttccagcttagtagctgactgagtaaaagattaaccaccaaagaagaatcagaacatctgtaagaaatcgtaatgtaagaacaaagaaagaaaatttcttactcttcctataacttttgatgattgtaatagcgacgatacatcctcagatattttgtacttgctgtaaaaattcaataccaaattcattcatataaagaaaacaaacaaacaaagaaaatcatatatttgaatgaagcgttgaacatactctaacaactcggcagtttttgaaaagaggatttctttctccttatcttcctccaatttcttcagcttccgtttctgagatttgcacgctaccgtgtttacatttgaattcagtttccgtttccgagatttcttcgatgccgtgttattatttgaattcagcttatcctgcatctgtccaccatgaaaacaaaatttccaaatctcatcagcgttaaaaaacctcaaaatcttattgaagaatggtttgattagagctaataccttattggatcctttattcttcttcttcctaggaggcattacatctaaattgcaatcatctcccaccacacttgccataatcgtaccaattatatcaactagaaaacaaaaactgtttgtctactcagggatcttcagacaacctgacacagaagagagataaacttaaaggggattctgattaacaacaaccactttgtttctacacacaaaaaaaaacactcaggtcttaaaatcaaacaaaactaattgattcaacaactggaaacactttacaatccctcaaagagatatagctttcaaattcataattagaatggagttttcactcaaaagctatgtaattctcgccgaaatcacaacaagggacatcaaatttttgcttcccacagattacactaaacccaaaaccgaaatccgtaataacgatgaaacaagcatgcatttactcaaatttaaagcgaactctaaacccaagttatgtcataagaaacgatcatgtgggttacaaagaagatcgagagagagactgggtaaaacctttgacaattcgattctacttgtcgagcttgtcgtgtctacgccgtttggctcggagaaggttgaaattcgtgtgttcgtctgtcgttttggaacttttttggttggagactaaaatatttgcccaaatcgtcgtcgttttgcaaaagtaaaaccttagtcccaaaaacttgttaaaaccctaagtcaaagaaagtacgtcgttcggacagggaaaaagaaaggcttaagagtgtacaaactaaaccggacacaaactaaaccggcctaatatttttgtattaacaaagctattatattatacaacagaaattcttgggttaagaagttgacaaattcacagctttggcagtttcttgcttaagacatgggagataagagaagagagtctcagcatgtgacccgtaatactttgagaatatctgagacgatctctttgtagtgtcccaagctccactggaatcacctgatgcaagctgaatcgacgcaagcttcaccatttcatttccaatcaccacgtgttcatcctcatacagcctcttcagaatctgccaccaaactcataatttatctcatatctcacccataccagttggggtaatgaaattacacgcatgaacgaaaagctttaacggttgtttaagggatttggtctgccagataccggtttgctcaaagcagttttcatattttgtcaatcaatgatacaagttgtggtctaaatcgaagcagtatcagtatttatcaagggcttttaccttaatggatgcttcacaatgctttcttgcatccaccagttccccagctaaatagcacgcctgagcaaccttatcctccgcctgaacaaacaaaatcttggaacgtgagtcatgtttgttttctctcaagagtggagaggacatgccttagtcaccaaatgtgatatagagtaacaacgctttaagatcctttagcatttataaaagaacttgactcacatcagcgatgtctttgttatacatgtgcaggaaagttctgagcacggcgatggaccttgaacaatctgataatacagaataattggcccgtcctgaattcatcaactcttccaccctgacagtttcgagtgatccaagtgttaaagagaaacttcacattaactattaacttgaagcttcaaggaaaaactacgtacctctc

SEQ ID NO: 38228 - DNA, 6380 bp, Arabidopsis thaliana landsberg
ccgccggctagagcagcgtaagcggaaccaatactcttcatagcatccggagcttcctcgtaaagggactccaatagccctactatgcagaaaacctctgcgattccgatgagacagtactggattaacaaccagtacgcggttagatcaggcatttgggtcaagaagttgaactcaaaaccattttgtatcgcgtaatgtctcctgtagttctcgaatagcccagcccaagctactgatatgattgaaactgctagccctatgcccactctttgaagctgggaagcaccatgaggattgccagtgattcttctggtgatagggacgaagacagagtaataaagggagagaatgaggaaaatgcttaggcctgggaagactggcatgcaggtcactggaagcttgaggtgttgaatgtgtgtgttgagtgtgtaagcttgttgcactgagagtgtaagatactcagtcaagaccagactcagcattatagtgcatgctgggattggaatcaatctgatcagaatcttcacttcctctacttgtgttactgtgcatagcttccatggagatggttccaatccatcttctttcaactcaagtgccgccttgtctagccatctgcatatgaattcattcgactgataaatactagtattaagttttattttccttataggaagatgtacacaaaagaagaagccttacatgaaatcattggaatgagggattttacgactgccattaatagcagatttcaagccaggaactttgtaaagaccgatgaactcactgcttgtgaaagctgcatttagtttgcggaaagcggcaactaagacctgagctaccctagtcaagggactaccaccaggcaacctatgccgataaagcggtgtaccagcaaagaacaaagcattagaaatccccatggctacggccaatgtgccaaaagccataccccaaccaagttccatttgaacatataccaccaaagtgaaggcaatgattgcgcctaaagtgaccgatagatagaagaagttgaagaaacggtctaaatgtgtcttgtagtctttgctcttctcatcaaactggtcagcaccaaatgaggaaacacatggccttataccagcagctccgaatccggttatgtagagaaccgtgtagagataaagcatttgccaagatttggcttcttcacaatttcctaagagcaatgataactggccacagttgctctggtctggtacgaacatcttcaaacttgcccccaatgttattcctatcaaacccttttcacatgcaaaacaaaagaaaagaaaagatttcaaagtatccatcacataacatatgttcggtcttgcgtatttagacgatgttcttcaaattgcaccatttgcacaagaccttaaccataagtcataaataaataaataaacaaaatacagagaacaaaacagtactacttacgacaagatacatggtagtgaagatggcaatagtccagtatcgacccaagtaagcgtcggctaagaagcctccaagaacagaggaggcttgagagatgccaaggaagttgttgactgcgtttgatgaactttcaaaaggcctatgcattacgtagaacatgaacgccaccatgttcaccgagagtccgaaatacgccattctctctgccatttcatttcctaaaacattgcaaccattccaccaaaactaagctgcactgcacgtagaactactgataatctagatgtaagtgaaaagaaagttaccaaaaatgaagaaagctgcgatccaaccaccggttttggaaagattggcgatgggtttgccatggatgttaacgggagtggttcctccggtatagccacggccaagagcaagacgtctgttatctgattctatgaagaacacactcaactgcttgtatgatgcacagaggagcttcccggagtctcggggacactcaccggggatttaatctcagaagcaaccataatcaatgatattttctcataaaaccatggaaactgaaagcatcagagtgaccaaaaacagcaagagagcttaagttaataaatgaaataattaatccagccaaacaaaatctgtaagcagaaaaggatgtatgaggattggttagagaaatgtataaatgcagtagcttaaaatgggaagatggaattaaatagacggagcttagctggtaagtggtagatataggactggcatttattgcacgtggactcccatgatgtccacagtttcaacgttcaagaaaggacttatttagagaaatgtggattcatttgatatgttttgtccttgaaagacataaactcattgaaggacttctacaatgcgtcactgcaacttgttcttttatttttgcagtctccattaatgatgactctgacattgaaccaacattggctactcaataaagtcaaaacaacagaagctgcttacactggtttttgtgttcacatttcattttattctaaactttctatgaaatgttataataacttacctcactataagggataatataactaaaaagaggaagcagaattaacatgatgaacagttagttggtgatgcatggctatttttttttttaacactcctaaaaagagctaacattatatgatataaactgagctcaatttacacaaatgtgccaatgtagtatacacatcataaataaatatatatgtacgtgagttaagactgtcgatgttacatcaattgggtacaattttgaggagttcaacatcaaagagaagtgtcttgtctatgagcccttggttcctcagcacaaaatctaatgcacgttgtccctgcgcaaacataaagagacaacatttaaaacttatgtctttcttatacatgtttacataaaacaaacatagggctcacagagaaaggcatcggacatgggccactcttgtggtagtcattattcgggtatcctagtcctggcggtccaatcatcctgcaataccaagctgattatttacactgagtcattctaccgtctaccatttgtgtgaagagcgagttctatatgaaaaacatatggaggatgtgtagagttagaaatattaggaagatgttgaaccttctgataccaccgagagccatcccagagacagcctcctcaaaagcaggtatcacctgtaacaccaaaatcatgctgcatccagaaagaaacaattgatacaatcagtgacggaatccattctttaaaccggaaaaacccatatagcatactgaaggacttggaatttcgcccacctcattggatcctaaggtaaatgtgaaaaattgcttattatcgccctacagattcgcaaaaagaaaacaaagattaaggactgtatcattgtagctaatgaaacaaaaaaaaaaaagagccaaaacgtgtttatacctcaaaagaacccccttttgttttattgcgagcttcaaatatgcgtccatagtaccctattgtgtaaccgtcccagtcaacctaacatacccagcttcaattatttataactactagcaaaacctatggtctttgaaacattaatttgctaacatagatacaagcaaagcaaactccaaactctctaaccagagcaaacttctagataaacttgagaccaaggatacaaaaccatagatatgcagaaatttccttaccacaactttgtctcccttttttgctataggcccagttcctactcgcaaatcctgcagcatctcaaatcttcaagttaatgatcaccgcatagtctaaactatattagatataagatatgggactaatgaggggtgaccttatactgaagaccagactgtgtttctgtataatctggatacttcatttttgttttgccataatccttccctttaagcgctggcactgtgaatgcaagtaatataccaagaaaagaatgtggctttagaaaaaaaagaggctatatcgatgatttcaacaatcacgcacggataaattaacttcacctaaagaacacatctttctctcacaaccaaactcttaacagtggacaatcaaacaatgttccaaattacaaatgccaataactttacttaataaggcacaaagcaacaacttaatcgaaatgtaaccctgagaaagatcctctgccctccaaaaagaaattgaaattcttactgtcagcaaattgagaagctgatgcaaagtctccatctttagaatcgtatgacaatgctccaatcaacaaaccaacagaagaaaccaacaaatttctgcgatcaaactctccagaattattaacacatccacaattcccacctgttttcaaaactgaagttataattcaattcactgttgaggaggaaacagaaaagtaaaactgtagaagcaagccaaccagaagaacgaagaggagcgaagtcatctgattggtcagctaatcgagcagccacagtcgtccggcatctctgagaatcaaaatgagagattcagtgaataaaaaggaagaagaagaagaaacagagagatggtgcggcgtcgtacggtggtggaggaagttccggcgagcgctgtggattgagggaagcagccaaaggacgaaattgacgccattagagtgaaacttaaaaaactgaattttttgtacgtctaaagagagatgagagataaagtctcagctttttatgtagagaggcttctaggcacaattgttcatataatccgaacaaagaagaagacaaggacacttttttactcgccaattgttttcagtgaaaatgtaaattacaaatacggtaaaaagtaacaaactcttctgaagcatcatcttacaagaacaaagaaaatagaataacccataatgtggaacatcaagcaaaatccatcataaccactttagaaagcatgcataaggattgaagaacaaaagccaaaggttcttctttttattttagcgtaaccaaaaacataatgatgactcatttcctcaatggctggctagtttgagagtgttggccttgtcttgcagtgtaccgagcagactctcgaaactcttcttgaaggaatctactccttcgtcttccaactgttctcctactttgttccagtctattcccagcttctctagtgcactgtaaatcccttctgcttctgacacattcgcatctattgtcctcttcactattccatgatctgcgaatgcttccagggcttgatccggcatggttgatacctaaatcacacccacaaaaactatgaatatactttcaaagcgttaatacagactattgatcttcaacacaaacaaaaaagatgacttacagtgtcaggtccgatgagaggagcgacatataaggtgtcagtgtaagctgggttctttacacttgttgatgcccagagaagtctctgtttcttggcacctttcttttccactgccagtcgtcatgggccagatattttgtgcaggaaggttttgagtgttaatgcagcttgatcccagccgcctgcaagagtaaacatatcatgtgtcataagctaatactctactcacagtggctggtgtaagatctcagcgatgaatagagctttaccttcccacggagatctaaggcttcaggggtaccaatttgctcaagcatcttgtccatgagagtatccactcgactgacaaagaaggaagcaacactggtaactcttgagaggtcatcaagtccagacgcctcgaggccatccaaatatgcatcgatcactgcttcatatctggcgattgagaatataagctgaaacagaacagaacatatgagaaacgatttagaaaaggtaacatcagtgcatccttggaacacccttgaactaatctagtttcaggtttaaaacgcccaagaaatccagtgatctagcacatcatcacacaatacatgaatttgaagtattatgacttattttattttgaagttctttaaaacttgcaataagaaacttgaataatgaaacatactaggataacttaccgtgacattgacacttattccagctgcaatgacatccctgatggaaggaatgcatggagcagtagcaggaatcttaatgtagacattacgacggttgacaaccttgctaagatatttagcagcttcaacagttccttgggtatcatcagcaagcctaggtgaaacttcaacagagacatagccatccgccccttctgtctggtcatagattggctcaaaaagtttgcaggcatcctgaatatccttcaccacaagttcccaatacgcactttcaatgtcctttcccgattccacaagtgtcctaatagtgcatgtcaggtataccattaacatatcagacaacttttcatataaagaagaac

SEQ ID NO: 38229 - DNA, 2287 bp, Arabidopsis thaliana landsberg
attagaaagagagaaatagctcgggtctgttggttcggttaagtaaagccaacaattaaataacccgtgcgtgaatctcaagaattcgtctcttcttcttcttctgtttcatttttgtggtcaacgacctcgggagagaggcaaaaaaagatgggagctttggggaagctgatcaacatctctctgtttttcttcttcgcactgatggctatcaatgtaccgcttctcaacggtcaaatactatttcgtggaatctacccgaagctcctcaccgatctgaaagactggtccagctgtgagttcaacgattacctcttcatagagaagcctcttttcttcgttggactcgtctggcatgagatcatattcctagtgcctctctccattgtcaacatctacgccattcttaccagcaagtcgtggtttggtaccacttctttgttgtatggagcttctttcctcacttccatggtacattttcttctttctcttcattttcgtttggctcagtctatgtatatttgtttttgatgttgttgatctgtaaatgttacaactttcttgatttggaaacgaaaattcttttggagttctatattttagtatatgtgattgctctgcttctctgagaaggctagattgtaccgctttgtttgtaagtttctttcacgttttgtttttgtgtgttttgtgaatctctaggctgctatacttggagacatgataggttcagagaaggtgactaacaaattgctattggcgtatttgcctttcgtgggtcttgcaattctggcaatgcttcgtggtcttctttctcaatccaacaaaagtggtggagctgttggcaagagacctgctattttggccaggagaaagcgtgcttgaggtacacttgatgatcagcaagtgtatcttttgactctgagaatttctgctataggtggatttggcttttcaaacagaaaattttgaacctttgtgatgtattcttcctgtttttttagcaatatcatgtcatctgtgttcttgtttgaaattaaatgaagttaaactgaaaatattttacagttcacttcaccaaaaggtctacattgttgggtcttgacaaatcacacgttgtgattcccattcccaaaaggtctacatgttcagcacagatttcttagtcttgttgggtttggtcaatctaaaaccataggcaacgcccaacagccaaaaactcgttaagctctcttgcaaaacagagagtcttgggaagaaaaggtgtgaagttttgataaaccaaactacagaaatagacaacaaaaacaatacaaaagaaatatccatactctagaagaagatctaaagtcaatagaaagaaaacaaaaaacaaatttgaaactcaaatagagaaaaagagtactcaataacttcataaaggtttccaagtccaacaatggcaaggaaacaaacagactcacctgaaacaccgaaaggttccatgtccaacaaaaacaaggaaacaaacagactcaactgaaataacaaaaggtttccaagttcaacagtgacaaggaaaccaaagactcgaatgaaataacaaaaagttccaagtccaacaatgacaaggaaaccaaagactcaactgaaatagcaaaaggttccaagtccaaacaatgacaaggaaacaaaagactcaaatgaaaggaaaagatagttgtttttttccatcttgaatgggtttattccagggctagtcaaatcccgaacctcgtaaaaaaccaatctccttgaggttcgttcttgactcctccccttttgaagctctccaatagattaccgaaatgggggtggttcaagcagtctgacaaggaaacaaatctttgatcctcctcacggttgtacgaatcagattctcagtagttgcaacagaactaacactcagctctagccttaggacctgactcaaccagcatttggaaggaaatggtcaaaagtgatccttcttcttttcctccaggcttacccgtaccatctggaaaaatcgcaaaacctgaatgtttgtatcaccacaaagtcaggatcaccacctccatggagagcaatacccattgatgtcatatcaacaggcgcatagagcacaaaagacgctgcagggtcaaaaaaagacactagaactatcatcaacaagctcttgctagtgcgtccatgctgtaacccaaccctaacaacagccacagaccaaaggatataacatacatcacaatttccaaaatacacgcaagggattatatacccggaacaa

SEQ ID NO: 38230 - DNA, 6935 bp, Arabidopsis thaliana landsberg
  unsure (1)..(6935): unsure at all n locations
tgacgtttctatgatattgtgggcattgtattcacactagagggtattagagtacaactagtggatgaagacattattgggctagctaatgaccttttgtgatacatggtttccaataatcccgtctattcatggcatccttagatggtgtttatgtccactcaagtaaaacaccacacaaaaatagtgtttctatgatattgagggcattgtattcgcacgagagggtattagagtacaactagtggatgaagacgttattgggctagctaatgaccttttgtgataacaggtttccaccatacagttgctaaaaagttggaatataaagaattcaaaacaatagatcaccttttaaacctcaaatgacggttctatgatattgtgggcattgtatcacactagagggtattagagtataactagtggatgaagacgtaattgggcagctaatgaccttttgtgataccaggtgtccaataatcccctctatcaaggcatacctaaatggttgttggggaccttcggcgtccgaagtcctcaaaaacaggatttaacagtatttctgtagtacaatgtgtgaacaggtaccctcggactcggatcagaaccacagtgtgaagaagcacaaagagtacgaaggttggcgcagagccgaagctatacgcaggaaagcttcggcgtaacagcaaagagtggaaccgacttaaagatgaaaaggctattcagatctcgatagactactatagagttattatcaaatgtaaagggcatgaatgtaattttgcaagggctgtgtcccgtgcctataaatagatgaacagtatccccgtactgttcacgcggacttgacatttgctttttgcgtcacactcgtattgtcatttccttccgattgaaggtacacttgtagttcaataatattttttgtttatgttcaataataataaatgattgttcatgtgttcttttacattcttcatattttatccttcgtcattgcttgatgaatttatgaagatatgtctttcatagccttcgtccgtaagccattatatccgaaaggacataatgtcttgaaggacgaaggaccttaatatttaacactttttatgttgccttgttcttaactcttagcatttgagaacaagtctccaacattggcgcccacctccggtgaactcacttccatttctgaagctttttgacatcttcggcaagcatagaccttcgtcatgccgccgaagaaagcttcagcactaggggctggcacgctgcagccgctggacacaaaccaggagactctctctcttagagaggcacgaagccagaagaggaaggccaccagtccaacacttcaggaggacgacttggactaggaaatcaggaacatgnnnnnnnnnnnnnnnnnnnnncaaaggaaaaaggagaagatggctcggttggccgaccttcaaaagaagatcgacaaagctactgaggaagtgcgtcatcttactcaagatgatcacgaccgaaggcctcaacaccgggagcttcgtcaagagggctcattcaacgaagatgaatggtacgatgattttaatcatggtacctttacttttgatgatgggtctcccttgacagcagaattgcaggctaccccatggcccccgtcatacaagccacctcagcttcccatgtatgatgggcactcagatccaaagctgtttctgatgagctacgaagcaactatatcctcgtatggaggcaatacagcagtcatggcgaagtccttcgtcatggcattccggaatgtaggccaaacatggtattcttctcttcggccagagacctattacgtcgtggcagaagcttaaggacatgctggttaccagtttccaaggctttcaaatgaagccagtcacagctcaggccctattccaatgcacgcaagatcacgaagaataccttcaggcgtatgtccgaaggttcttgcgtttgagggcacaagcaccaacagtgcccaatgaaattgtcattgaggccatgattaagggacttcggccaggacctactgcttagtactttgctagaaagcccccacagactctggagaagctgctccagaagatggacgagtatattcgtgccgacaatgattttcgtcaaagaagggaggaggctttcaggttttctgaaatgaccaggggcttcggaggaagattttatccgaagcatgttaggtcaattcacaactctactcaaaatgatgataagggaagtcagcagcaaaggccacagtactcctcacaggcttcggggcagcagcagagttatcctcggcctccagctccaaggggcagaggcgccaggggtttcagaggaagatttggggatcagccaaggaaaatttattgcttattctgtggtgaggacaagggccataccgccaggatgtgccatgttaccatccagaaacaaaaagaaatagcagaagctgcagcccaacagacccagccgaagcaggtcatgcatactgcttcgtaccactcgccttatatcccagagtatgtgggtaatcacactgcaacttatgttgcttcggcaagtcaatctcaggcatcttggcaacagcttccacctccaccaccaatgcaacgaggtcagcagccataagggagtcagcatattcaacaccaacgagacttcagagaagagtccgaagctcgcacagtcaatagtactgtgccagaatcgaagcacatttattaacaaatatcctacctcggcagcagtttttgcattcagtatcattttctttttaataaggaacaattattgaaagtctaagtgttttttgtcgttttcaatttcttgtaatagtttcgcctttgctatagtacaagtataccttttccacagaataacggagtccaaaagttgccgaagcataagaacttatggttacggggtgaatcttcgaaataacaaaaagtcgttcctaagggagcgcagcgtaagttttctgctcaaaagtcgttccgaagggaatgcagagcttacagcaaaaaataaatgctgattccgctgaaagtaaaaggcgaagaagctcctaagggaggttacagcgaaaaataaaccctgattccgctgaaagtaaaaggcgaagaagctcctaagggagcttacaacgaaaagtcagcgctgatgtatagtgtgtgctttattacagggatatgtatctgcggcataaaaaccattttgcataacataacaccatcacatcatttttgcataacataagcatcatacagcatgctgcatctggaacaagaaggggatacaatgttaatctttggaacatattttggaaaagagtaaatcatgctaaggcacaagacgaatcaaagtgaagagaggcttcggaggatagttcacgaagcttggatgtttttatcagaaaagtaaacaaattcttgtgatatagaaaagattttcttcacgaagcatgaaaagaagggaaggtgttttttcgccgaaggctcaaaagcggtacgtatgtaaagtttcatgcatcgtaaagaattgaataatgaaaagagacttgtatattacattcaaatgtaccaaatattacataaatcacacttcaactgtttttcctaataacacctagtcttctcttaatactacttcggcagcctcatttagaagctgttcaacaactttatccacgatagtttcggccatttgtttaatttcgtcatccccttttgtgtgaaggtcaacaaacgatccagcaggttctgagggaagagaatatttttgcattactattacaaaccgcgaacaaagtttgaaataaaaattacaacacgatacaaactattaattaatacctaattgaccttcgggctctgcgctcttttcagcagccttagccacttctctagcatcgtgaatgcccttttcacttctttgaataatttctcctgccatttctcggccaccatttatcccagacgtcggtgaaaaattttccaccaattatgttagcttgggccaagggatcttttatatcttcaaaggacaaagcagcttcggactgcgctaaaatttttacatgttcacagcccttcttctctaagatagtggcaatccctctggcgccagagaaggcacatatatctcctcggctatttaaaatttcttcgaaggcttcagcttcgtggtcaatccattcaatgacaccttcgggattgcctctcgaaaagttttcctcacttgagaatgcgccgaccttggcaaagctagtttttaatttcttaacacaatctatagatttgttatagcatctcttttttgacgaacgaagctcttcaacagtcacttctaggtgatctgcccattgatcgctgagttcacgctttgtttcttcaagaatgcgttcttccttagctctggccagttgttttcgaagatcttcaatttcacgcttttgagcttcagcttgaactttaaaagtagcctcatcttcctttattttatttatcaatgagtataatattttgtctttttcgagaccttcgttcctcagttcaattacttcggaacgaaggttgctcagggctatagtacatccttcgtcctcagcatctttctgtgctctgagggcattgctgagtatcaggccctgcagacaggaatatgtctgtgtcaatagtttttaacaaacgaaaaattttgaattcaacaaaaatataagaattccatttgtcgcacctttaagctattgtatgctaattgtcggctaattcatcttttgacagcaccgaaagtccgtcttctaaagttggaaatccgaagcttttgctcatctcccgacagacagaaatttccttgctgtcggggagacaatacaagaaatcttcttctccactgccattgaatattaacgcccccttcggatatttcagtttttgggcatagtgctgggcctcttgttcttcttcttctgataactttttccccgaagcatgtcgaacaatataatcaaggactttgggggatgcttcgggggtaacagcactgatttcttcaacaagaattggctccgtcattttttcttcctcggtttccaaggattttaccttcgtgggctctgaaggcccagcttcagtctcagcttgttgctttggagctttagtatcaaagatttcagtttccgcttcggaagtttcaacagtcttcttcggagtcgtgcttgaggacttaattgtctccagtacatctagcacattgaccattctttttcttttcggggtcactgctgggcccttttggttttttattgtctcaacacttgctgaaggacttaaaatttctgatgttattgtcccttcagctctcggttcttcaattttttcaaccttcggcgttgcagtcagctcttcagttttctgcagaggagttggctccttggcttcggtggccgaggaggtctcaccgacaaactcaggcactgtggccggttcaataaagcgtggccggtgcgtaagaactttcatcttttttctcttcggcgctggctcactaggagcggccgaagcaacttccttcatagaagtcgtaccttttcttttttgaccctgtaatgggtaacggtagtcaggataaacaaatccaatagcatcaaaaatgcggttgaaccttttcttcttccggcctccggaaggccgcagatagtgcattatcttccgccttcaaatatggcccaagcagttcatcgcttgtagcttcaacacatttcaaccaatcatcatctggttcgacaaactggtctccaaacctgaaggtatatttcaatcgaaccagaccaccttcgctagggttagtgattgtttcttttggaatttcccagttgtctatcagtggccatatcctgtaggctacatgttcttgaactaagtatcttgtnnnnnnnnnnnnnnnnnnnnngttgaaggccttctgacacgcttcggcagcttcatcaatttcaaccttcggctttcgaaggccaaagcgggaccatatggggcgcatgataacctccttgatgtcctccctcgctgtcaggtcattcttcacataaaaccattctgtcatccagtcgccgggccatctcttccgaaaggttggcacgggacagcttgacccagaacgagcaatgaatccataacaaccgaagttgttgtgatactgctctttaccccaaggttttgtctcgtatgataattcgtgcatattgcaaaaacactacgcgctcggttccagaccttggcttctcacggcccacacgaagatattcagccttataattgcctcgggggtaagttggtgaagatagacttcgaagattttcaacacctccacgacgaagttgctcaagggaaatcgtagcccagctttcaaaaaacttcggtacactacgacttcattctcttcagggtgtggacaagtcttctccccttcatcggccctcacaatggacaaatctcggaaatatcttcctctcatgttctcaagatgactctgtttgatagttgatttaccataaactgaatgacttggtcgccagggacgatcctcagaatcctcatccccactttccacatcataactgtcgctgtcaccagtatcttcagataaaccttccagtatctctttagtaattttctatgtgtttgtttttgccatcgactcaacaaatccagcaatataaggatccacaaccttcttctcctcaaatagcttctcctcttcagtcagcttcgtttccatgacaaccttcttttcctgagacatttttctccaaaaatggtgaaaacacatcttttaaaccgaagttcagagagcttgaaaatctagcaagcgctagtgagcaagagctacaagattgagaaaataatgca

SEQ ID NO: 38231 - DNA, 2509 bp, Arabidopsis thaliana landsberg
  unsure (1)..(2509): unsure at all n locations
gatgagctatctcaactccgacgaatccaaccaccgtatcaacaacatccaccggagcttccaagaaacgtctcagtacttccctaagagacgatatcgacgttcaagattcagcttcttcctccgcctcttcctccgaggctacttccgccgtcgactacagcatatccgccgtcacggtgccgcagagaccgtcgaagacgatggtgattggtacgatattcggtagaagaaaggacacgtgtggtcctgtgttcaacacgaccgtctctctgttaaaccaatccttctcctcgagctttcaatagctacgagccagttagttcacgagatgggttcgggtcatgttcgtgtcgctttagaatgcccgacccgacccgaattgaagtcttgcttgctgagatccgtacccgtttggacgatgttttgtaccggaaggaagctagggtttgctgtacggagaagtgctaatgaagagacgaggatgatgttaagagattggagtctatgactgttggagcgggtgtgttgccatctggatccgggttgggtgggtctgatgaatcggatactgatgaggttatgtatatgagagcgaattatgagcatgttgttggtagctctgactcggagtcgtttcatctcattaaccctgatgctaactctgctcaagaactcagtatcttcttgctcaggacctctagttgaattggccttttggggtaacttatgaatcattttcatcatgttcagagattgtgaagtcacatgagaaagattgagattttgagagttcttgatgagatatttctttgtgggtcgttagttctagatctttgtaaaacattattttgttagaaagattgatgatttttttcaagaatttcttgagtgctaatctttttttgatgtaacaaaaatgttctcattccaagactctgttttgaaatctcaacattgtgacaaataatgaagcaaacaaaaacttacataagtatcataggagtgtagaaacagagaaagaacaaancaaatgtgtcgtgtttgaagatatgctcacgtggtacagtgttaaatatgatgcctatgaatgtttttaacaccccaggtggaactaacctatacactgtaaaattttctctacggcagtaagaaaagtaaaatttactaccaaagtgtttgaaaagatgaccaagtgtgaaataaacatgttgtttctttcttctactaactctataagcagctaaaattcctctaagtatatgagtgggagttgtcaatcggggagagaagttaagagtctccgcaaagcatcgtatgtcatgaagacgatgccaacgccaggaactactttgtaatattcaggcaatattcctctgtatatccctttgaagccttctgacttgaatatgtgtttgaatgttccaaagagtccagtgttgtatactcttgctcttccaccagctccttccacttgcattcttcttctcacaagatccaatgggaatgtcgctacaaaagttatcagtataatataacaaactttcgtgtaattttctttgggctaaattatctatggtaactagagagaagggtcagatcagatcaaaaacctgtagaggaaacaattccggagagactgccacaaccaagactaaccacggcatttgaatcattaggcctgaacaagttcaaagacaaatgtattacgataggataagttaagactcttattggacagatgaactcactaggcaatattgatagtcaaatcccaaaataaagaggcatttacctatgagagagccaaaatgttttaaaagtctcatacgctgcgaagctgattgcaagacttggaccgacaccctgcaatacaaaagatgtaccaaaaagcttcaaggcaatactagttggatgataatcttacagctagaacctagagcatctaagacgattccaagtacactagttctatattactactagaaaatacaccaaagaaaaacacaaacttaaactatagatgatttagttaaacttttaatactttacataacacaacacttcttaagtttttttgactatagcgtgttattctttttaaaaccaacaacttcaatttcatcatctttgaacttaaagatagattccttaaattctcaagcctgtagtgtgtttttaagttgttttagagtggtcactaagtaattacagtctcacactcttttaaagttcttccgaaatttgatcctgagcatgaaatgtctcattgagaaatcatgtctatattcttaactgcttacacaacaattaaaattcctagggcatatgtcttcttatcaggtgctttaacacctaatcagctgtgtaaaccacctaattggacattaagaccacttaagacacctccaatctaccctagcagcctatggaaaaatgcactggaagggcatggctaaatggttacttataccgccctaatttatgactacccagagcgtgtcatttc

SEQ ID NO: 38232 - DNA, 6061 bp, Arabidopsis thaliana landsberg
  unsure (1)..(6061): unsure at all n locations
ttcaaactatataaagcagttatctattcctgaggacaagattcttgatctggcgcgtcttatacagaactggtcattgcctcctgagttatatttatcgacgaatgagcagaagcttcctagccgtgtgtgtgtcatgtctattctgattgtagctatacggatgctttataacataaatggtttaggtgtgtgggaacggagtttggggtttgtcaatgctagtgagggtgtttcagagacaaattcaggtacgccagaggaagcaactgaattcgataccctggagcttctgaagaaccttgaagctaaatatcatgaggtcgctgcagaaacccttgaatccgagaaggatctggtttcatatctatctctcgggaaaaacgagttctttgctggtttagaagaagattcacctgacgatacatacagaattgtcgataacttgtggaatggttatccaaaagacgaggtaagaacctgcttcaaattcttattaagataatctgaagaactaagttcttccaaggttcaatataaagtgtctcttttacatgtatgttgtaggatattgaacgtctacccaagagggggagagactgggacgatgatgtatcacttaaccaactttcattatacgatagcagatttagcgatggaaacaatccttgtagtagctcttcaaggagaaacgaaagtgtatcaataggtcttgatttatcttcttcagaacaccgagaatcatcatcaccagagaaattaaaggagatagcgataaaaagactaattacagacatgggagatgacttgttctgttacataccacctcgtgtgaaggtaaagagactagactatcttcagtacgtgaggaaaaaagaagatggagcattgatatacgcggctcacgcagattactacattcttttgcgggtttgtgctaaggtagctgagattgatgtgaggaatatgcatagaggtgtgttgagctttgagaggagattggcttggattgagaaaaggatagatcaggttttgcatctaactcgacctcttatgacatgtaaacactgttgtgatgatgggaatattggagaagatcaagatgattgataagttcataagaagcagaagaatacacgtgcaaactggtttgcagattttggggtttaaatctcattgtttagagattctttatgctgattgatgtagaagcttctgcgtgagaatggtagatgatgagctaaccaagatgatatgttaggcgtctcctttggtttgtacattgatcggcgataagttaatcagagtttggtggcttgatacttatcaccatgtatacgtcgaatagttttggaagatgatgaaaaagattaactcctgtgtattctgtaatcagcaagaacgaagaacagacctgtagttactatgatacataaaagtcaaatagcaatttattctactttgactttaaaaccattctgttggcaagtagtggtgacttaaaattttcataaccttgaatactttcaatgtttttgaactagcaattcgaaagaaactcgagattggttataatcttcagtgccatactcaataaaaaaaactagcaataatccataagaaagatgatttatggttatcatttgaccacatgaagacagctactcaaaaaagtgtttggctttaagtaaacatatggtttataagagaaagcatcatatcagattgggcattgatgattaggtataacacagaaaagtcgtcattccagcttgacacgatccatgtcgttgatcnnnnnnnnnnnnnnnnnnnggaggaaaaaaagaaaaagacccaaaaatcaaaacaagagttgatgtgcacgagtcttagtttcagtttatacaacataccttggcaatctgccgcaagaagaaatcaccataacgttttgcgggttttgattcgacaacgtagatcatgtcctgcagtgtcaccaggtttagagttgttacaaacgttgtaaaagcaccagagtatcgatatcagaaagacagagagagaagaaagaacatacgttgttgatgaagaaatcaatgtctgcattggagatgatcctaccatcggaatcaactgaatgggtcttgtgcttgtatgttaacaatatggtcctgcaaattaaaaccccgtacatgtcaaagaaaaagagagaagtagatttggtaataatagttataagaatgcccatagttagtccctgaccttagagtgggctcatcaacttccatgtagtttgcgagcttagcaagagaaatggaggagtagactttcaggaaagtccgcactcccgacaagagctgctgctgctttacctcgtaaaggaacatcttcagctgaagcctgtatgcatcctgattgtaattgacaagaggttcctcgaaagttggtggtgcggaaggggtgataaacttggggcatgcgtaagagaagagctcatcataaataccaaaggcctcgtcgtcagacctcagcatcctcatcatcttttcaccatacttgtctcgcagctgagagttgacagactcgtcaacgagtttagtttgagggcagagggagagggagagagcaagcaaagcgtacatctgctcattcttcttgagtaattgctcgtactgaggtgacttttgatggtactgcttagtcttgaaaatgtagaggagaatcttgttgaactcacgaacagcatcgacatacctccgcaacataagggtggcaaatccatagtggtagatagtagcgatatggcaaccaatgacactggtgtaaacacctggctgagtgatgtcaatgggctgcaaccatttgagagcagtgtggtagtcaccgaggaggcagtgaacacgcaagagaccgaccatgctgaagtaaccgaggaccttcaagacgttgctgccaccgctgaaatcgtagccatcagtctcagtgaactcaaggccatccttgtcatgctcaaggatctggatgatacaagacttctccacaagtgcttgcaagaagttgagcacgccatagacattccaggccttatcgtgctgtctgagcaatgcaatctcctcctctgttttgttcttgagctttgctctgaattgacagaaactttggaactggtagacaaactcatccaccatatcccacaaccactggttcggcaactgcatattcactacgccgtgcaacacaacctagaaagaacaaacggaagaaggtctacttacttgtatttattcccagccaatacatacacaaaagaaatcaaaatcaacaacatctctatctaacaaggaagaagaagtagaagaattccacaacagacctgaaagaggctgcaatagttgtcataagaatcaatcctctgcttcaacgtcggagacaacctcgcatacaaatgtcgaaaccacatctcacggtacagaagacagaacacatggtcgttgtctacgtaaggagcaatcgcttccacacttggccacggcgtgtccttgaacagacgctccgatatgctctggaacgatgtctcacacatctggtggatctcgtacacgttcttgtcccttatgtgtctgtacatgtgtgacacgaacgatttcaccgaatccggcaccatattcgggtcgtacccactctccctctcccctggaccttcctcgtactcattgctgctcgccattctcgccggatcaattcttagcggccgcaacaatgttaactcttcaactcacttccaccgcctagggtttccttattaccaccgggtctatcctccggtttgcttttactactaaatgaacgattaccaccggtttgtttatatctcgatttatttttcggttgtttatctattttaccgaattagaccaaaactgaatcgaaattaattttgtgtactctgactctctctcaaatctcaatgtctcagcttcttcaccttcaccgtctctctcttccacaatcatctcttcgtttcagattcccgcctttacatcgccgacgtgcagcttcgtcgccaactaactcaactcaaccccccctgcagtttcgtcctctcacagtctctagatctcaaataacttgcagattcagccaatccggtgagacttatcgttttttctttctttttttcgatctaatgaaacattccaagtgattgtattagattcttagcaacatcttcttcatcttcaacgaaatcattgtaagttttgcagatattacgccacaatttgaattggataaagcaaaagacaatcgaaaaccacaaaagcgagcaaatggcatattttggatcatacttatcaatctgggcatatatcttgctgatcacttctttcaggtatgaaagcttgtctttagatatcaatcatctacactgtaaaacgttattcgtgtaatcccatctctttgaattgtgacgtgcttatcttatcatacgttttatattgtttattcgatttaggttcgtgggatcaaatctttgtatttgtatcacaattttccggcatggtatcagtttgtgacggctacattctgtcatgctaactggtgagagagctctcttctttcttttttactttggcactgttcgtttcataatcgctagcggctgtggctgtggctgcgattgcgattgcgattttaaaatcgcaggatgttgttcgtttaccaatcgctgcgattaatcgccatttaaaaagccgcgtcgctcttttttcatgcgatcaaaaaattcagtcgcaagccgcagcgattgatcgcgcgattagttgcaggatcttgcgactgtcaaacgatcaactttcagtcgcagtcgcaggcatcctgtgactaccaaacgaacaacacttatgatagtttttttctctgtggcttatgttgatgtttctcctgattcttggttttttttttatgtatcatgtatgattctaggaaccatctctccagcaatctttttttcttgtacatatttggtgagagttcaagattttctcatagtttgaatttctagctagtttatcgattcagagagctaatggacacatttgggaatcaggaaagcttgttgaagaagaagaaggaaactttggtttgtggctctcctacttgttcactggtgttggagctaaccttgtttcttggttagttttaccgagaaatgctgtttctgttggtgcctcgggagctgtttttgggttatttgctatcagtgtcctcgtcaaggtactgtagttttcttctctccttgtaaatcaaactcctcagtaatatcttgctaatattcaacttcttttgattgtctagatgtcttgggattggaggaaaatccttgaagttcttatattgggtcagttcgttattgagagggtaagattttctcaaaatttactcacagcatcacgtccgctataaccgtattccggcttacagtcccatcttcttatgagtataatgagggtttttatacaatatatgagagaaaatgtctgatgatgtatgcaatatagaagctcttcgaattcagggccgataactgtttagttgattgttctgcctaggtaatggagtctgctcaggcgttggttggtttttcagtagctggttatggtggatactctttacaaactgttaatcacattgcgcatctctctgagagctcttgatggggtatgttttagtttggcttctcagcaaatttccttcggcatctatggatcaagacgttaaaaagtcctcgtaaaaatgacgagacaaaacttttcgtgtaaggaacatactagctgtccagtgaatgcaaggtagatgaaacgattgatagattgacaaaatatccttgtaaaaaaactgaagaacggtctctaaaccgagcctttgtcagtagtttttactatacaattctgtctgctagttcgtatatgttactatcattggtttccaagtgccaatcagcccgcgcccccagtgagtggatgtggttgttaagaaaaactaatatgatttagtattgtgtggtgagaacgttactttt

SEQ ID NO: 38233 - DNA, 2720 bp, Arabidopsis thaliana landsberg
aacctgttaacttataaacctgcaaggttctgatccctaattttgcatcaaaaaaaattaacattaagacgaggtatcaaaacgacgtcatttagagacacgtcatcatgcacatgtacgatgactcagcactgtaacggtgttgactaacatccgttaaattgactctgatttttgaataaattacggtatgaaaatccccttttccctcactcatcacattataaacataaaacacctacagttttttacaatgtgctctcgcaagtctctgaacgaagtagtctatgatcatatattttccatttagaccgcaagagaaaatggttaagcaaataaccaaaattaaaaacaagagaaggtaaaaaaaaaagaagaaaaaaaagttattatcaactcagagagctaaaaaaccgaccctttttcatcatttgtctaaactccatgtaattaaccctaccatcaccatcaacatccacttgcattatcatcttcctacattcctccaaggtcttaccttgcttgagtcccaaggaagataaaaccgccttcaattcatccaccgttataaacccatctccgttccgatcaaatacgttgaacgcttccttcatatcttcttctcctacctcgtcctcatcttctaccattatcgtcttgtagagctctccaaactcttcaatgtcaacacaaccgtcaccattaacatcgatcttttggataatttgtgttagttcgtcttcgggtattatgataccgaggttcttgaatgactcgttcagctccttcgtagtgatcttcccgtctccgtccttgtcgaacatttggaacacacggttcagctccgtggaatccatttgttttaataaatttagggttttttgaagggtgcgtatggaggaagaaaatgtgaaaaaagagaatgatgagactcctagaagccgagaaagaggcctttcttggcctcttggagacccgatgagggtagtttcagaaaccaaggagaatgttaacgagaattggcggaaattcttagccaaaagctcgaggtaataacatgtaaatgggacgaaaataggagagatagagagggatttgttttattgttggttgagagcaaatgttgggtcttttaaaggagacttgtggctttgtatcgaagtcttctaaaagttttatcggttctataaaattcaacccaaaaaacatatttgtatatttagcaattctttatgaaatatttactaatatttttcatagccgaacaaacaagattataaacatcaatctacttattttacttaatcatagttactttaccatttagccggcaagagaccaaatcatttcgagtggtgagccactatgtggtactgtcccaagtttgtgaagtctttgacttcatttttatgataagaaaatcaaaaacaaaatgtcaacgaaaataactagtttgttattccctcgggtttattgattgatgaaagctcatatggaaaaataattacagcaaacaacctgatgactggtgaatatatttgtaacatccttgaaaaaaataaatgataacgtaaaattaaagcaatggataaaaaggtgcccacacgcaggatcgaactacggaccttcagtttacaagactgacgctctaccactgagctatacgggcctttgatttaatctttcagtaatgtatttaaatacctgttttgattgcaaacacacctgatcttacatgtaccattgtcaacaaacaaaagctaattactcccaaagtgacccttgaaaacgggaaattaaaaaagaaacttgggaagtgaatgaacataatatttcatataagaggcaagaattcacagagtaattgcgatgaaatgtagcttatacattataagaacattcaaacaagtcttacacaaaaagaccaaatctttctctttttcttgttgaagagtcttaagaccaccatggagcatcaccagtcctgaagtcagtttccacccatggaacaaaaagaaccttcccagcttcatctatatccgcgtgagccaacgctagcgactgttccatgaaattaaggttactttagacggtccactttagagatacgcaaaaaagaaagaatgcaatgtatttgacttaccaatggggctggacctctaacgactcttccttgggcgttgtattgggatccatggcaaggacatagaaacttgttctcagctttgttccatggcacaacacatccaagatgagtgcacactgcgttgataccgtatgtcgctagagtcttgtcgttctctacaactaggtaagtcggatctccctataacaaataatccacacccattgagatgcaagaacctttattgagttcttaaagcagtgtttcaaggagagctaaataagttgttcatgatcttacctttaatccttgggtcaaggttcggtcaccgggaccatgagtcttaagccattccgctgcaactacatcgtttccaagggcatccttggctggagtaccaccacctccacctccggttctgcattttcaaaacaacgtagagattataaaccaagaccaactaacgaaaagaaactatatcaagtctcattaatctcacatctcagtaacaccaatgaagccatacacttattcataactacatattcgattgaatcaaaaccaaaagctaacaaagtaagtaacaacacacaag

SEQ ID NO: 38234 - DNA, 2717 bp, Arabidopsis thaliana landsberg
  unsure (1)..(2717): unsure at all n locations
aaaaagaagattatttacgaaatttgatttaaaatttcattattgtatggagtttttaattgaaccaacaggggacagtaattaaaaatgttaatcttcggacaaaaaatatttggttggaagttggaattgaggttccagagatgaatgatggctaatcccagagtttctcttcctctcttatttttgacttgtccttgttcttctacactgacatgaacaacttcaacgcctcgaatctttctcctcctcttgcttccttctctcaccacatttcctcgccaccagaggacggtttcagagcttccgggagatgttttcgtttgtgggtttcgtggtgttcctctctggatttttcctgggaattctcgccgtcttatccgctgaagctgcgggatttatgtatctcctgaagcgattgaatcgcaagagagatcgtattgagtcaaaacccgtctctgatccatctatcaaggattttaatcctcgcgaatccatcgatttctgtatcaacaaacaggtgatcgctcttaattcctctttttgagtttcttaagggttttgtttctgagagagagagaagaatgttccttagctaaagagattatctttttagaaaattcaattctgggtcttattctgaaatgtgtgcgagcatgctgcttccgttgtgagaattgaattcgtttcataggaaatttcgattgaggttgtagctaaagtggctcttagggtcgattgattattaaagtcaccaattttctttttagaccgtttgaattgtagttgaagttagggccatacaatatctgtttctgccattttgggtctctttctcaatgtctgtaatgaagttttgtttctatttccagggagtggtatggattttggagttggatgaaggtctgaagaactggatgaaggaaaagttaccaaaagagcagaagaggaagagaggcttgttggagattcatccacttcgaaagttcgcnnnnnnnnnnnnnnnnnnnnnnnnnnnnnnnnatgctgatagcactcagagtgagactaccgtttctttaataggttgcagtattgaggctgtttcaggctctgatctccctacaagaaaatggtaccacctctttctttatgaccctttttttaatgattaagtggaacttcttatgatcatgaagttttgttttcttttgtttcttagggccaaaaggtttccaataaaagttgaaagcaagatttctccagccttatacaagagaaaccaggtgttttacatctatctcgagacttcttgggaaaaggaatcatggtgtaaatcccttcgtcttgctgcttgtgaaaatcaggaaaggtttatttggtactccaccaaattgaaagaagatttccgtaattatgtgacttctcttaatgttgcatatccttcatttttgaaaccatcacttgggtttagttttgagacacttgacaaagggaacagaacggatggttcatcctcaaaggttcgcttgttcttgaagaaattttctagaaagcgatcaaatcgtgaagacaggaaaacctattcacatcatggaagtagctcaaggaagtgctttccaggaaagaataatatgacagatgatactgatgtgcctgttttttcacgttctgtgagccataacagtcatatttctggggtcagtcatctttctggggtttcagatggagactctgaagaaaaggttgacatggatgaaggaacattagcgttgaacttgctcatttctaggctatttttcgatctcaaacggaaaacaggagtgaagaattcagtgcaagcacgaattcaggtctgcactttttcatgattctgaacctttcatgaacttagacatttgaggtgatttgatttctataactaaacaaagatctaacattttggttttaaacagcggttgttatctaacatgaggactccgagctacataggcgaactaatctgctccgatgttgacactggaaatctcccacctcatatacatgctacacgggttcttccaatggagatgagtggtgtgtgggcattcgaactagatattgaatactctggtgacgtggtgattgacgttgaaacacgggttgacatccgtgaggtggatctgcaacaaggcataaccgagacaaggttgcagccaagttcttcaggggtagtcccgtcaaatttcgctgaaggtgttgaagattttgaaaagcaattagtcttccctgtggaaactgttaatgcaagagaagtgaaaaatggtgaagccaataaagcaggctagttcaatgtttacttaatgtggattaatgcagtcttttctagtttaacccacagagatcatgcgagcgtgattcctgttcaaaaccttttctcaaggtgataattacgattgatttcttaccatctttctgtggttgcagatgaatccaagagctcaagaggtacgaaggcagctccaaatggtgtatccaggtggaagtctattcttaaaacaattgctgaacaagtttctcaggttgattctccttttcctaaacatctacaagattattctttttttttgcttgttggcttgatataacctatccttagttccccgcataaccttttttgggttcttatgttttgcttttctagtcattcatgtctcaatttggttttctagagatctctgtttctcaaatgcaggtgc

SEQ ID NO: 38235 - DNA, 8722 bp, Arabidopsis thaliana landsberg
cgatttcccgtcaggttccaatgaaccgggtgacgtgtaacgtgttcccggattgccccggagatcagctttccagggagtctaaccatggttcaatcggatatctattctgagagttatcaccgtatttgtaaagccgatgctgtctgtttcaacacagatccgtctgaatagaccagtcaacctcaggaccgatttcccgatatgtcgcaacgactcttgcatcgaataatatgttcacggattgccccggttgttagctttccagggaatctaactacccttcgatccgatatctcatccgagaattatctccatgtttctgcagaggatgcaatctcgtttgacatagaatcctttcttaagaagactagtcatcttagggatcaattcccccacaagtctcaacgattctcgaaactagtagcacatctatggattttccagcgagtcaggtgtccctagaagctgacctcacttccatcggagctgtctatcgaatgttatccctgctatccagaagatgcgatctttagaactacgaatccgtctgaataatccagctcaccacggggccgaattcccgacaaatcacagggaatctcgtaagggttaatacatctacggatcgcccagagagtcgtcttttcggagaagttgacctcgccttaatcgaagatatatgctgagagatataaacgtttacctcaagcaagtgcaaccagtcatgagacccaactctataaaaccagtaagcttcgggatcgttttccttgaaaatcctgatgaactaggcagtgatatacctatctacaggtcggcttctttgcacttgacacaatttccctgacaaatccgcagctgtcggaacagccaactaacgaatcaaactccaagcgacctggaaagaaacaagatacaatctacgcgacagcggaaagctttgagttttatagagacctatctcatctctataggtgaattctttcgatgaatatcgctgattttctactgataagcctctaggtcagagattcagttgtcaaaacggttgacttggaagagagtttcccggcgagttaaagagagataggagtcaatctacgtgtcgatttgaagccctgagctttatctttccaacgaatctaatcttgatccaatcgaagcaatcttccaagcgatattggcgtttctttcaagcgcagattcgtctctatccgaccagccgaactcaggctcaatttcccagtgatcttgagagactcaggagacgatctacagatcaatttaaagccctgaggctcctctttttaacaagcccgatctcacttcgttagggtgtgttttctcggagatactgccgtttatctgcagaagacactgacaaaatacagatcgatctgtatccgatctgttgacctcggaatcaaatgcccggcgatctaaagggcatcacgaggcgatctaagtatcaactgaaagccccgaggcttatctttcaatagagaccgacctcatccaattccgagctgtttactaagcgttatcactgtttcaatgaaacatatgacacctgtcaaatcgcagattcaaactgtgggagcaactggattagaaagcaaactcccaacgattcagaaaacatcaagagcccatcttaatatcatcatgaagctctgaggcttatctttccaacaagatcgattttgctccatttggtgctgtcttccgagagttataggcgtttctctcgagcatgcgcttgtttatcgagacacagatccgtctacacccgatctatctgctttcagatcgatttcccgacgatctaaaaggaaccaggagccgatctgcacatcattttgaagctacaaggcttatctttctaacagattcgtccttgcctcaattgcctacgtctaacaagagttattactgtttttctgcgacaagcacgtcctgactgtaccccaaagatgcatgtctgcggctatcagatcagccacctttgtgaccaattttacgtccatcgcagagtagctcgtcagctcgtccgtctcacgaaggtcgacagctcgtccgtctcacgaaagtcgacagctcgtccgtctcaagtagctcgtcagttcgtccgtgtcaagtagctcgccattctcaagtagcacgtccgctcgtccgtctcaagaagctcgttagctcgctcctcttcgtcaaacttctcaactcgtttcccttcaccaagtccctcagctcgtcttcaagctattcagatcgcctttaagctcttcaagctccttagctcgttctcaagctcctctgctcgtcctctagctcctctgctcgtcctcaagcttctcagctcgtcctcaagctcctcagctcgtcctcaagttccccagctcgtcctcaagctcctgagctcgtcctcaagctcctcagctcgtctttaagctctccagctcgtcttcaagctccacatcactcaacgaccatctcctcgcctagctataaaactaataaactatgtttatcgtaagaacgacctaactcccgaccttcaacgcgatgagaatgtttttcccttatcaaagaacttagaaatatactttgttgaaattcgtgcatcaacagggcagtgactgaaacactctttttctctttcgtcgtcctctgaattgcgtcgatcgaataggagaaaatgaaatcaagggtttgcaattttaactgggttttcttaggtcatttcggttcataggttttttgactaaatcttggcccgataaacatcactaagtctatttggttctttggctcatgggctttttgaccaaatcgtggccccataaacattactaaatctatttcacgcataaaaaaaaatgtgaaggcgagtcaaaacatgtgggctccacattaaaaagatgtagtgacgtggacacttttagaagagagaaaactctgctattatatttttgatttgtttattttccatcaatatacgaatatctctacttccttttttaaagactctttaaatcttaatcaatcgttcataatatatctccagttgcattcattatccttctaaatcctctcttattagtctttaatcataaataaaaaataatacatcaatgagagttctttccaccgtccgatcaaactctggtatattgacgtcagcaatcggacgtaaacatgtcgaagttaacttgctacgcgaaacagaggattaatctctcagccaataagagacctgagaagacgagaagaaaaaagaagactttggtccttggacttgggtctttctttctctttttctttcgataattattgtacttggttctttgttctcagtgtaaatgaaagtgagaatccaaaggctatcatcggaaactgagggaacagagatcattcatcgccgcggtaagttatctgtcatcgtatatctttaagccctctgtttcttcttgtttgagtagtgatcttagattcttcaaaaaatattgtttaggttgatatagagaaagatggggaagacaattcaagtgtttggattccctaatggtgtgagcgcagaagaagttaagaagtttcttgaaagactcactggttcaggcactgtttacgcaatcaaagttagacaaccaaagaaaggtggtccaagagtctatgccattgttcaattcacatctgagagacatacgaggctgatcatcactgcggcagcagaacgtctttactatggaagatcttatctcaaggcttttgaagttgaacaagacattgttccaaagccaagagcttcattacacaccatctctggtttaaagatgttctttggatgtcaagtctcgactaaaaagtttttaactctatggagtgctcaagatgttgtgtcttgtttggaattgggatgagggaaactgcatttttcagttttcttggtatcaaaaggattatcgtcttgagctttcgtatgagaatatatggcagattgatttgcattctccgcaaggacgatcatcgaagtttcttgtgattcaggtgattggtgctcctaaaatatttgagaaagaggatcaacctatcaatcttttgtttggaataatggatttttacagtgatgggtctgatgagcaatggattagaactacagatttcacttcatcttcttgtattggtcaatcaacagcgttttgtttagagcttcctgttcatcttaatgttcctgatttcagagagaattttgccaactatgcagagcacagagccagctcttttctcattgaatctggttctagctattcatctaatgctaacacacttgttcctgttgttgatcctcctccagggtttagtttgccttttgagatcttgtttaaacttaacacattggtgcagaacgcgtgtctctccgggccagctcttgatcttgacttttatcggttgcttaatcagaaaaaatatgatagagctctcatagatcactgtcttgaaaaactctttcaccttggagaatgttgctatgagcctgctcattggcttcgcgatgagtacaagaagtggatatcgaaaggaaagcttccactgtctcctacaatatctcttgatgatggacttgtttatatgtatcgcgttcaagttacaccagcaagagtctatttctctggaccggaggtgaatgtttctaatcgtgtgcttcgacattactccaagtatatcaacaacttcctcagggtctcatttgttgatgaagatcttgaaaaggttcgttccatggatctatctccacgctcttctactcaaagaagaaccaagttatacgacaggatatattctgttcttcgcgatgggattgtcataggcgataagaagtttgagtttctcgccttttcttccagccagttgcgggagaactctgcttggatgtttgcaccaatagatcggattacagcagcacatatcagagcttggatgggtgattttgaccatataagaaatgtagctaaatatgctgcaaggcttggtcaatcttttagctcttcaagagagacacttaatgttaggagtgatgagattgaagtgattcaagatgttgagaatatatctttagggacacgctatgtgttttccgatggaataggaaagatatcagctgaatttgctagtaaggtagcgagacaatgtggtcgtcagagtgtctctccatctgcttttcaaatccgttatgccggttataaaccagtggtggctgttgatccaatctcatcaaagacactgtctttgagtaagagtatgatgcaaattcgaatcggagaacacccagcttaatgttctggcgtggagcaagtaccaaccttgttatatgagcagacaactgattacacttttgtctactcttggagttacggacagtgtgtttgagaagaaacaaagggaagttgtggatcgtctcgacgcaatcttgactcatcctttggaagctcacgaggctcttggtttaatggctccaggggaaaacacaaatattctcaaggcattgatcttgtgtggctataaacctgacgctgaacctttcctttcaatgatgcttcagaatttcagggcatctaagttgttggaactacggacaaaaacaaggattttcatttctggtggaagatctatgatgggatgcctagacgagaccagaacactggagtatggtcaggtagtagtgcagtattcagatcccatgaggccgggaaggcgattcatcatcaccggacctgttgttgttgccaaaaacccatgcctgcatcctggtgacgtgcgtgttcttcaagctgtcaatgtcccagctttaaatcatatggtggactgcgttgtgttcccgcaaaagggcttgaggtaaacatttttctatgcttgattcgtgtttttttcgagcttttattgttttaagtctcgaacttttcattggaatcttgtgttcttttgtgcataggccacacccaaatgaatgttctgggagtgatttagatggagatatttactttgtatgttgggatcaagaattggttccgccaagaacgtctgaaccaatggactacactcctgaaccaactcaaatcttggatcatgatgtcacaattgaggttataataaaatttgatcactttggttatatttttgtttttttggcgttaggagattgattggctaccttggtttccaggaagttgaagagtactttgcgaactacattgtgaatgatagtttagggatcatcgcgaatgctcataccgcctttgcggataaggaaccactcaaggcgtttagtgacccatgcattgagcttgcaaagaagttttcaactgcggtagatttcccaaaaactggtgttgcagctgtgataccgcaacatctttacgtgaaagagtatcctgatttcatggagaaaccggataagccaacatatgagtcgaagaacgtgattggtaagctttttagagaggtaaaagagcgagctccaccgttgatctcgatcaaatcattcacgcttgatgtggcctcaaagtcttatgataaagacatggaagttgacggatttgaggagtatgttgatgaagctttctaccagaaggcgaattatgatttcaagttaggtaatttgatggattactatgggattaagactgaggctgagattcttagtggtggtataatgaggatgtcaaagtcattcaccaagagacgagatgcagaatcgattggaagagcggttcgggcgttgaggaaagaaactttgtcgttgttttttgcttctgaagaagaagagagggagtcatgagaggcttcggcttggtatcatgtaacgtaccactcaagttactggggactttataatgagggtttgaatcgtgaccatttcttaagttttgcgtggtgcgtttatgataagcttgtgaggatcaagaagaccaatcttgggaggcgtcagcggcaggagacgctcgagcggttagaccatgttctgcgtttcggttgattttttttttttggttctgacttatgtcttatgatgtacataaatgtttggttttgtgtgcaatcagcaatttctataaatatggttggtttttagtgaaatcagaagtttctactttcttatttgatcgaattaactcaaatttgaagcttcattcattctttttttttacagtatctcgaaaacatttgtacaaaaatctctaaaattaattagtaccaaacagaaaaacttgctaccactaagagttctatgttcgacctctcaacatatgtatgtacataaacaatttctctgaatgggccaatcccattaaagcacatacacagctctatatattcacacactccaaaatcaagaaatcatcctttgtatgtcgcaattttggaggaaaacaaaaaaagaaacgtacttgtatataaaaaaataatgttatattttcttcaagaagagacaagaagacgttggcgatgtagcagagcaaacttgacgtgtaagcaaagtttgcccttgtccaagtaaagcctcactccagtgactaaccaatgaccaggactatgttgaggtcctcgacataactgcgaaagatcgacgaatttcactatcttgttattcgccggcacaggaggtccaccagggaagacacctgaatccaaaacgacctcgtttttgtctttttggatcatattatgatgaacactcccactagtcaacggcatgctcatggaagagaagattcccgatttctgagaagtcccaattggtccatgaacccaactattctgaacgacgtaatgatcagagactttagtgtaacggagtcggagatggagaacggattttgagccgtgttttttcacttcgagttgtgctccggtgacgatgaaagctacgtcgttttgggacttgtgattgcttgttgttttgatccagtttgggtcgtacttcactggaaccgtacacacgtgtgagaatttcttaccgtttaaaggttcgaagtagcgatcattgtcggtgatttgatcggagcctctccatatatgttcgtcagtgatcttttccccaaccgtagttcttgtgttgtctaggtgttgtaggtgtatagccagcctattgcatttcttgccttcaaggaaaaatcgcattccggttactggattcttctcgctagtcacctagcccgggaaataaaacgtcaccaattagtaactacaaatattcttacatgtgtaatttgggatgtataaaaatacacgtacgggagtggtattaacgtatagtttgggacccatgaagttgatgtgaagagctggataggccgaagccatatttggtgccgcgccaaatggaaggtcgttatggaccggagcccatgctcttggcccagagaagtccaagaagtattgtaggtccattaacggcggcttgtctgtacaaaataccacccatgaaatcatttatttaccaaaggtattactactcatttcagtagtcaaaatgaggcaagaagagtagttacatcttaggtagagagacatggcgtgagagagaagaccagagccagggacgtctttaaggagtgatgtgatcggaataaagttccaattgatcgcgtcaggcttgtccgggacaattataagccattcgctatggctctttgctcttccgtcgcctcctcttgggcgcgtc

SEQ ID NO: 38236 - DNA, 3563 bp, Arabidopsis thaliana landsberg
  unsure (1)..(3563): unsure at all n locations
tccacgttggagattctttgatcttcgaacacaatcacaacctcaacgacgttactcaagtctccttcgctttggaatacgagttctgcgactcttcttctcctaaagccgtctacaaccctggacacgatatcgtaaccctcacggaaccaggttttcactacttcatcagctcaaaccatgctcaatgcgcatcgggacagaagctcgacattcttgtcgttcatgactcgtcacgtcccattcctccaacaccaccgagcaagatccttcctccttgaaatatctacagagttggtgtggctccaagggatggagtgttccgcaagaaagtgacttttattacagatggagtgagaagacgcagtttccgatcggagacagtcttcttttcgaatacgtcaacgaagtcaacgacgtcttagagatcagcggggaccttgaattcatatcctgctacccggtttctcccgtagccgtgcacatgacaggccacgatctcgtcacgctcacagaaccaggagtccattatttcattagctctaagactccaggtcactgttacgctgggcttaagctacgagtcgtggtcggaccactcaccaaagccgtacctgtccccaatgttccgacgaagaagatagagttgtcacttatggaccgcttcaacagatggttacgcaccttcggacctcaaccccatcattaagataattagtggatgtaattagagttaagacttctctgtattttctttcgactaaaacgtaaggaaatttaaatacactctattgcaaaacacagctcaaaggttgttcttttctttttttccaatcttttaggatgttattcaaattacagacattatcaaacttatcagagatttgataacaaaagcagagcaaaacaaaacatagcattttgatgagtttccttttaaggatatatctctctctctctttctctcacactgagtcttgaggattgaacttgactgttttatggtatataagctccttaatgttctcttcgggcaaggtaggttgctcgaaatcaaaattgaacggcctcacacataccggttcttcgttgatatcatgcagcggcgccaaatatgggtggcacaacgcctcatcaactacacacacgaaaaacatgttcagaaactaaccgatgaaacagagaagaagcagttatataaaatataactcacctgtgatgcgtctgcttgggtcaaaaacaagcattttctccagcaaatcgactgcaccagccgacatgtttgggaatctaacagcaaagttctgtctcgggtactgtggaagctgtctaacgtatcttcttgcattgtcacttcttaagaatcccaagcttgagtcatcaggagatcctataagctgcttttccaagattcatcaataaatgcagcaataccttgaagaaacactaagtggcgattctttggatgaaacaaattaaagctagattacctcagtgatgagtctaagctgatgaacataatctttaccgggaaacaagggctctcgtgtcattgtttcaccgagtatacaaccgacagaccaaatatcaattgctgctgtgtattcagagcaattaagtagcagctctggagctcgataccaacgtgtaacaacatattcagtcatgaagtcagtctcggatttggtccttgcaagcccgaaatccccaagctttagatcacaatttgcattcaggagcaaattgctaggtttcaaatctcgatgcaatacattagctgaatgaacatatttgagcccacgcaacaactggtacagaaaaaactgcaaaacaaaatcgaaactaattactaaacacaacttcaaagcataaaaatagaaatccttattagctctcacttataaagtatcaagcaatactcatcagatgctctaacacaataacagctgcttctaaagtagaaacagaagattcagctgctagatataagcaagatggagattgatgcatacccgacaatgatcatcagttaagggttggttagagcgaataatttggtggagatcagtgtccataagctcataaacaatgtaaacatcattgaagttctctctctgcggtggttttattatatcctttacagcaatcacctgcacaataaaccaatataagattcacaaaaaaaaaacccagagatgctgatgattagtaacacgtacattttcatgatccatatgcttgagaagcttaatctctctcaaagtccttttagcatcgataatattgtcaaaagcattaccaatcttcttgatagctacctcctctccagtctctgagtttgtagcagcactgatcaacaattatcaacacaagttattataataacaacagattccaaaaccctaattcccaaatctaagaaccccagaagtgaacattacaagtttcaaaaacccaatctgattaattttggaactcaccagacaattccataagcgcctctaccgataggacgaagaggaggaacatactttctagaaacttcgaagagattgccatagacattatactgaacatagctaccaccatgagtagccactcctttgctgctgctttgatcacctgagcttccgaaacaactctccgccgacatcggagcaaaatttctcacaacaacgaaaatgaagaaccctagagaaattgaggaattgagaagatgggtgttgacatttcgttataaagtctctacctttaccctcttttttttattgaacggtaaagaggaagtctcctctcgggtcacccgtgacccttaaaccgggtttgcgtcttcttctttggtttttgttctttttctttgtaatgtcaattttcaattttgtttatggtatcgagttgggtatatccgatgattgtgtctctaagtaattgaggaacgggtaagtgtttttagtcaattggttaagttttttttattggagttcgcttctactaaatcgcgttatcccacgaagtagaaaatagatacgaaaatgcctttgccgaaaaaatgtaatttatgaattttgtagtatatgatatacaagtnnntaatgaccttagtaggaatgttcttgatatcatattataatgtttaaaagtatgacaacttttctccaatgagaatttaagtacgacttggtatattggtggtgtacaagtcaatgggcggccaaattgtttttgaccataaaactgacctttgattccaaaatcattagtgaaaaaaggtttatgtataagataaaatgacatcattttgttttttttttaaaaatcatggttaaacaacttatataaccatgttgaagttgcttaccaaaaaaaaccatgttgaagtttggtgcatttgttattattaatagctagaatatctggtttgcttttattgattgatcatgtaaccatgaaaataacactgattttttttggtctagtgatttacaatgggccttaagcaaacccatcacttatccattatcaactaagatgaacttaagcacaattctgactaacttgaaaat

SEQ ID NO: 38237 - DNA, 5127 bp, Arabidopsis thaliana landsberg
tttgcaagtaaaaacacagagtttgacattaagtcaattgctgagatagaccgatcgacttcaccaactcgggattcagcaaagtgactggctgcatccaaacagagctcgtagtttgatggtaacaagtgagctccttctgacattataaaccggagggcttcgaatccagcttcagaagcttctggatgccgagctgtgattgatagcagagatataatcgttcgccaaccagtacgggatctaacgtgagatgcgtttgcttttacaagacgaacaacttcttgtgcaatgcgttcacagtatgcatcagccacttttgctttcagcttgagaaccagttggagtgatttcagaagttcatctgttaggttttccttgtatggtaataatctctggcaaatcttcagtacaccaaaaacagccttttcaacaagcgtgcatggtgttaatgttaattgaactatacccaagatatgctcataaactgttggccaaatcagtaggattctgtctcggttgttcagcgttactgcaatcagaagctccaggcaaaagaccgaactagcttcatctttcccggatgctcttataagagagttaacaagctgctgcagagactcagcttggagaaacttgctatctgagaatatgctatcaatatgacaatctttcactatcccacgagcgtgtttataagctgccaattcttcctcgcttggtaatggctttgtttcctcagaatcaaaagacagaagaaaccgaccaataaaactagatgattttcgaggcatcgctgagggttgtgactgtgatacgactggcaggggatttgccgaaggtttttcttgctccaagttactagttgacagctctgggtcatccgctgcatcactagctatatgatctggtaaaatgtggagtttgttgaggctcaagacacattccagtatgtttttccagcccgcactaatatagtcaccatatttatttgcaatcaagaaaacagcttcagtagccattctggctctggcatcttctcctagaacaagaacagcttcatcagcagataatggggcgaagaagggtgtgaatttgcagagagacacgaccagatcatccaaaacactattcaaatgataatatgctgaaagttttgcaatggccaataacccatcaatacatctccgcaaaacatcttcttgctctgcttgctcaaaaaccactgatgtagcagcaatagtgggaccagacacgatataaaacatgtcacggtccagatgggatgctgcgtcacattggatatagggactcgtttctttggatttgtaaatcacactaatccaacgactggctgtcatcagttggaagccggttcctttatcttcgtccatctgaatctcactgtggcggattgagtgataaatctcagataggtactctctaggaaggtctgcgcctccatttattgtcctgttgttacggatgaaatcttcttcagtcatccttgttttcacctgggcgttgtgctgatctgtgttcagcaagataatcgagtaagctaacacgaaggcagcatctttatcaatcagtatgtgtggtgactgctcatagtatctctcagaaaacgcctccagtaccctgtgtatcttctgtgcctcgccagacaatttaaaggtacccacaaaaagacgcagggctgtagcaagattcatgttctggaagtcgaacgtcttggcaaactcatgaagcacctgaatacagaactggtcatgatttccaaggaaatctcccataacattcttatctaacccacatgtatacctgaagaaacatgccacactctttggatcaagtttctcgggcaacaagtgcaccccttgaagatactgtaagcctttattaggatcacggttaaaatgatcagccccaagcatcagctttttctttatatgcttgacctttcggacaaagggaacccaaaaattaggatctccgaaattctcacatttcactgtccagaattcttcatatcgttcttcatgtgtaggaacatctgaagccggcaattcttcacccactctctcagccattccctgaaccatagaaattaacccatccaatgcaagtatatgcatagcagataaaggcccattaactgggaaggcattctttgatagcaggtttgaaacatcttcaaacacattactgcaagttatatcacaatcgaaatttgcaaacacttcagctatgaaagtatgttgtctgcaaagatcaaccagagcctccatagcaacctcctgttgctgctaagaagagccatgtttgctctgtgcaatcctcagaagtacatatgaaaagaaagcttcaagctgtaccttaagctcagtacggagattcaggtagagattaagaacgatgctgcaaactgtagaaagaatcagagggctcatggacataccaaactgcatcaagttacagaataaatcatcctgaatcaaagtcaacagctttgggtgctcacggaaagaaggccctccaagttctatagcagaattaattaaacccagagcgaaaagaggaacatcttcatcaaacgctattgggttggatctggaattgacttcaccgttttctccaacattcaacagggtacacaagaaatgaaaaatctctaccatgcatggtataccataaggcgccatcattgcattttcaccatttgcagcagcattcaagtcatcgctgacctcggttttcttttcatcatttctaagatctgtctctggaataaccatttcagaacttggatcatctttttcagtgccgagagtatcagatatgctagcaatatttccattttcaacccttttttctccagaattcggatcccagtccactgttcccacctagataagaaagaatagcgttagaaatttgtgaagagcaaacagtcttgacaagatggtcaatacaatacactttacaacttagtcatcaacataagttttaagatgatcaatctttaatttttgcacgcttagtcattagaaagcttcaagatggtcaatacaatacaccttacaagttattcatcaacatgcttagcagagcacaaaacaattttgtgcatgttcaatcttctatctatagggcataaacatgtacaacaaacatttaaaaaagatggcaggaaagattaatttgatataccttattgtcgacatgtaattcacattcattagccaaggggctgataaaaggaagttgagagaagatacatctaatcaactcatgcattgtgtggcgagctatacgctgcaacaattcacttttggagcttgattgatgaacaacacgcaaacaagtgttgacgatggtgcaaatgtcttgattactcaatccattagacgccttactctttacacaagccagtagaacttgaagtatcttcatcaaaaccacttcctctgaggcagggtccgttacctcgaaacgacagctttttacagcatcaactattatatgcattgcctctcccacattcacagtttcaagagtaaaaacttcgagggttaagatcttgtaaacagatgacaaagcaacgccagtaatcggagcaccagtttcatcagacaatataacatccaaaaagggctgtatgtacaatctagggtcaacatattgccaattgctttgccatgaaaatatctgcttacgcaattctttcaaagaatggataagagaatgctctaactgatcatcatctgctatatatcgaacaccccaccgtacatttctcctcatcacagccaaaactgcaccaatttcagaattaatcatggacgccaccgcacctttagacggtttggagtgacatctcttgaactctccatggaacgagttacttcccgaaggatgattctgataccccatactcgccccaacttcttggctcaatcacaagaacacactccaagcatgcaagctgcaaatagtcaaagctttttcaataacaggattcagattagagattcctcttactttttcatttcaccaaattcggatatatacagtaacttatacgatctatgtaacatccatggttcagaattttcagtgactaaaactaaacttaagtaacacaaattcagatctaactaagttcattagaggaatagcaaaaaccacgaaaacttaagagctaatcacagttctagagggagattttgaaaacggaaagcgtaagaggaagtggatccagacaagttcagtgtaccttgctgcagatcacgagagaggtactacaaaaatggcggagttttgtagaagagatcgggatcgaaagagatccaaattttgctcagcttctactatgagagacaacagtaatagagaaatggtgaacgaagaataagctcttagtgtaagagacaatggtgaaggctcgagccgatgtggtagagtgatgagagcttgatttcaaaactcaattgagaatcagatctttgttgtcgtgaatcagaagaaacacatcaaacgtggatccttgttctctgcaattggctctgtgaatggcgatcggagaagcatcggatgtgttctctgagagagatgatcgaagttgtgaaagatgaaagcggaagctttgagatgggccgtgaattgggcttagattttgttgaaggttgtaagaatcatgggtctattgagtgtatacagatgggccgggttttttttgtttcttttctttttcaaccgtacgttaaaaatactccggtaaaggtagaattgggtgggtgggggcggagtgttttcaaataattttttgatgttgaaatcagtaaaatagatcagaagactttgttggtcagaaaaaaaagaaatatacttaggctgttgacgctattttaattcagcgttaaattgcgatcgacatagaaaatgaccagaatgtcctgaatatttttgaaaatcacaaaaaaacataaccctaaaacacttgcgtttgacgcagcttcttctctcgactttgttctccttctacgatctctcggcgatttgcccgacgagcttcctctgttcaacaccttcctctgttcatctagtttcctctgttggtcaagc

SEQ ID NO: 38238 - DNA, 4492 bp, Arabidopsis thaliana landsberg
catgaataacttcttgatcttgagtccgtttgacgaacagtcagctgtggtggactatcggatttatagtggtcacgttggagcctttgtatcgggttttcgaccttatctccggcgccggagagcttctcaacctaccatctccactctgcttttaaattccttcctttgctatatttgtttttggtttcggttgctccggtagcaacatacgatcctcagtgaatataggaggcagtatccagtgatgcttactctttggctgacttctggtgatctttcttctttacttctctttcctttgaattttcattacacgacatgattttgtgagatctgaacaacgtcttgtgattaaggaagataaagcagaagctctccaaggcgaggaagggacaatttttcttagatatatgttgcgttctatgcctccatgacacatggtccgtggtgatgaggcgtggcgatgacgtgaagctttttaaattgaagaccatcggtgacgaggtgaagacgtgaagcctaagatgggaatgttggtggaatcgtcctggaaacgacgatggacgtaaaatcggtcacaaaggtggctgatctgatagccgcagacatgcatctttgggctacagccaggacgtgcttgtcgcagaaaaacagtaataactcttgttaaacgtaatcaattgaggcaaggatgaatccgttagaaagataagccttgtagcttcaaaatgatgtgcagatcgactcctggttccttttagatcgccgggaaatcgatctgaaagcagacagatcgggtgtagacggatctgtgtctcgataaacaacgcatgcttgagagaaaaacctataactctcggaagacagcaccaaatggagcaaaatcgatcttgttggaaagataagcctcagagcttcatgatgatattaagatagcctcttgatgttttctgaatcgttgggagtttgctttctaatccggttgctcccacagttcgaatctgcgatttgacatgtgtcatatgtttcattgaaacagtgataacgcttagtaaacagctcggaattggatgaggtcggtctctattgaaagataagcctcggggctcagttgatgctttgattccgaggtcaacagatcggatatagatcgatctgtattttgtcagtcttctgcagataaacggcagtatctccgagaaaacagaccctaacgaagtgagctggggcttgttaaaaagaggagcctcagcctatgcaatgtgcttttcaagatcatcactaagacgatggtagagcgtctgaaacctttaatgacaaatctgattggtccggctcaagctagttttatccccgggagagtaagtacggataatatagtgttcgttcaagaagcagtccattccatgagaagaaaaaaaggggtaaagggctggatgcttttgaagttggatttggagaaggcttatgataggatccgatgggattatctggaggatacacttatttctgcggggttccccgaagtttgggtaagatggataatgtgctgtgtgtcgggcccggagatgagtttgttgtggaatggagagagaacagactccttcaagccgttacggggcctccgccagggtgatcccttatctccgtatttgtttgtgctatgtatggagaggctttgtcacttgattgagcgatcgattgataacaaacagtggaagcccattagtttgtctcaaggcggtcccaagttatctcatatctgttttgctgacgatctaattttatttgcggaggcttcagtaatgcagataagagtgattcggaaggtgctggagacattttgtatagcctctggtcaaaagattagcctggagaagtcaaaaatatttttttcagggaatgtctcacgcgatctgagcaaactgataagtgaggagagcgggattaaagcaacaaaagacttgggtaaatatcttgggatgccagtacttcataaacgcatcaataaggatactttcagtgaatttttggagaaggtctcttcccgtttgtcgggttggaaggagaactttgagttttgcgggacggatgacgcttaccaaagctgtattatcatctataccggtccatacaatgagttctattgcgccaccacaatcgactattactcgattggacaaagcttctcgttcctttctctggggaagcacggctgagaagagaaaacaacacttggtgtcttggaaaaaggtctgcttacctaagaaagatgggggtttgggcattcgcaatgcgaaattgatgaacaaggctcttattgctaaggttggttggcgtctgctgcaggaccagtcgagtctttgggctgaggtcttaagaaaaaagtataaaattggcgatctccgggattgtcagtggctgcgtaagtaggggacttggtcatctacttggagaagcattgcagcagggcttgtggatgtgatatcgcgggggatttgctgggttcctggtgatggacatcgtattcgtttttggcgtgatatctgggtatcagggaaacctttatgggaagatgggcagggcgtggttccggcgaacttggagacagagtcagtgcggagtttgtggaaggatgatagtggctgggatatcagtaggatcagtccgtatgtttcagagagccgatgtctagagctacgggcagtcgtattggatcatgtgacaagggcgagagacagaatctcctggaatgagagtcagaatggccaattcagtgtatcgtccgcttataatatgctgagttgggatgatagtccacgccctaatatggagaaattctttaatcggatatggagagttaaggtcccagaacgtgtgagagctttcttctggttagtggacaatcaagggattatgacagatgcagagcgttatcgaaggcatattggtgagtcggagatttgtcagatttgtaaagggggagtagagacaactttacacattctcagagattgtctagctatgtcagggatctagactagaattgtgcctcagaggaagcggcgtgcgttcttcgataagactttgtttgaatgggtgtttgataatctgcaagaagaaacccctttccaatagagctcttggtccacggtgtttgctatggcggtttggtggggatggaagtggagatgcggtaacatttttggtgagaaaaggaaatgcagggatagagttcagttcatcaaggatgtcgcgaaggaagtatttgtggcgaatgcaaggactacagttcttaacggggttccgacaagagtggagaggcagattggatgggtcgcacctagtacggattggtataaggtgaacacagacggtgcttctcgtggaaacccggggttagcgacggcgggtggtgtgatacgggatggagctggaaattggtgtggaggctttgcgcttaatatcgggagatgctcagcgcctttagcggagctgtggggggtttattatggcctttacctagcttggactaaggcgttgactcgtgtggagctcgaagtttattcggagttggtagttggctttctcaagacagggatcggtgatcaacatccgctgtcgttcctggtgcggttgtgccatggcttattatcgaaggactggattgtccgaattactcacgtgtatagggaagctaatcgtcttgccgatggataagcgaactatgctttctctttactcctatgtttgcatttgttggagtctaggcccgatgttgttagttctattttgttagatgatgtagcgggggtttcgtacccgagacatgtccaagtgtaattttttaattttcttttaataaaacgggagacgcagtctccctcattctaccaaaaaaaaataacagtaaaaatcctctaataattatgtctcaaataagataaattaaaattgcaagaaaattagtactgtatcttgtatttttagaaccatattaatttcaagaaaatcaattaattattcaaagatttggttcgtgacgtaaatcaatttattaccataatgatgaaagcgtgaaagaatttaaccagaaaaagccataaagacttctctcgctatcaatcacacacatgcaacagtacaagatttgtcagagtccacagaaatcgatcttttcgagtcaagattttcagctctgttcaggactccggcggagatgaagagtgtgttgcgtattgcggcggcgatattctggctttggctgtttatcgtgttaggtgtgattgggagtgggaatgtgagagatacagacgatgagatctcgttactcgaaagtcaattggtggtgacatctccgtcgcagcttcttatggtgcctctccctttgattcaggctgatgcctcccaaggagcccgttggtactctctttctctctctaaaagcttgcaaactgattccacagaagatgttgttggtgatacttga

SEQ ID NO: 38239 - DNA, 5355 bp, Arabidopsis thaliana landsberg
  unsure (1)..(5355): unsure at all n locations
tgccacaggcctataacgtttgtctaacacagcatatatataaccttcaaattttacaaaaaagatcgtttaatatatgggattttggtcactccatactagtttggcagaattaggatcactcaacagataagtaaatagcatcgagtagcgagaattaccattaatcagcggatactagttaggaacaaaaaaccaccacatatcataagtatacttctttcttcttacagaaatgaagtactctacgtcaaactctagaacacccaaacgacgtaaagactttttgcattgtctaaatttctaaatatactaaaatggttttatctagaattaatgcttgaattaatcttacaccatctatcacaaaaaatgttgtattttgtatgttttatgactggagctagtcaagctctccaaattattgagtcctaaagaaaattaatttcttcaaaattgacataatagtattggtttaaaattttaataatctaaattctaatttgataaaattattttgattatattaatccgatttaatgactgtctacgtttgagaaaagctctactttgattctaagattttagaccgtcatgatcctttggcttagcggatccgaccgttaaatagggttatatctatatgagtcaggccaactcagtgatcaactttttaaaagaataaaatcggtcctacaaaagctggcaccgaattggcatgagggttttgttccaccagaacatcttttattatacacgtatcggtcattcggttggcgagggggaacaacgactttagagggtttggttgcctgttactccatgataataatggtattgtaccaattttttaagtcgtaaccaactaaaatatagtattggattatctactctataatattctgattctcaaaactttctgaatagtaatcaccaatgtcaaggaattgtaatcataaccctcactcaaatgcttaactatgttagtcctgaaattatataatatctccagtacatatatcgattattttacgtaccggtgttattcacgttatcgctatacgttatcaatatcaattatttttgatgatgtcaactaaaatagattatcatcgattttattcaactgatgttggattacataataacttatagctagtatcaactttcttttcttttcaaattagtatcaaccatagttaaactaattataagcatcagtagtctttttacgctttaaaaccaaacactacatgctttcccttgttgtacttttttgtcagatcaattattttgtcaatttccgcctttttctctttaaccccactgtttttcatctattacaccaacatctatacaagtgtatctatacatatattttatgaatgatgatgacatacttagtgggtattatatttcagatcttaaccctacattattttccataatttaggttttgacccagatcttataatacgaatttttaattcctagcctcttaggataaatcaacggcgacaaaaaaggacaagtcacactatacaatatccttaattccttaccaaaaacataagatacatcatatacttaaatataaaaannnnnnnnnnnnnnnnnnnnnntctaagcaatattttcaatcttcaaacgcatttatacatagttaacataacctccaaaacaaaaatatcacagatccaaaagatcggattaacataatctctccaaataatcatgcgttactctcatactctccagcagttctcaattctatctttcttcgttacaatatggaccgttcaatcagtaccaccacaaccaccgattcgatgcgaccaaaccggctgcaccgtctccaacgcgtacggcacgtggcctgaccgcaaaacctgtcacgcggctaacgtcacatacccaacgacggaggaagaccttcgtaaagccgttgcnnnnnnnnnnnnnnnnnntctcaaagtcaaaaccgtcaccaaattctctcacaccataccgaaactcgcttgtccttcaggttcagacgcattgctaattagtacgtcgaaatataattcggttatcgagattgaaccggaactgttaacggtcacggctgattctggagtttcgatgagagagctgatcgagaaagttgaaggagctgggtttagcatcggaacgtcaccgtactgggaaggagtcaataatcgggggctgattaatactggctcccacgggagttcgtggtctgcacgaggtggttcggttcatgaccatgttgtcggaatcagccttgtggttccggcgagccaatcagaaggtttcgcgaaggttgttagactcgaagaagggagagatgatacgcttcttaacgccgttaaagtgtcgttgggtgttttaggagtcatttcaaaggtacaataacttaacgccgttaacagtcttacagtgctttttattttattgattcaattgtatataactatatatttgacgtaacgccgttaaccatattatctgtaggttaagctttcgatagagaaagcatttaagagaagtgtgacgtacaacttcacatctgacgtagcacttgaagacatttttatggagcatgggaaaaaatacgaattcggagacataacttggtatccttctagaaaaactgctgtttaccgttacgatatccgagcaccggtcaatgtctccggcaacggagtcaacgactttcttggttttcagtctaatcctatcttgatctctaaaggggtacgagcattaggttagttcctctttccttatagtagctagacgactccacattaccaatattcccggtttaattagtccggtttggatgtttaaaatcaaagttttggctttgaaaatgttgcagagaaggggtttgaatctagcaagaatgagaatggaaaatgcaccactgcagatactacgttggcatacaagaaattaatcgggaacggtttaaagaatagtggtttaatctttactggatatccggttatcggaagacaaggcaagatccagacttctgggtcttgtctttactcatcttcaattagaattgatgtcgcttgcgcatgggacccgagatataacggtcttttcttttatgaaacgactgcaatattcccagtttctaggtttagagattttcttctcgacgtgaagaagctacgagacatgaaacccgaaagattgtgcgggatcgatatctataacggtatcttcatacgtttcataaagggctcaaaggcttatcttggccagacagaggattcagtggtcattgactttaattattaccgagcggatgatgagttgaccccgaggttgaaccaagatgtgatggaggagatggagcagatggcgtttgtcaaacacggcgcaaagccgcattgggggaagaataggaaagtgggtttcttcggcgtgaagcaaaagattggacctaactttgataaattcttggaagtaaagaacaagttagatcctaagaagatgttctctagtgaatggtctgatgagattctcttaggaacagaagcttccaagtatgacggatgtgccttggaaggaaattgtgtgtgttcagaagaaagacattgtaacccttccaaaggttacttttgtaaggaaggccttgtttatacacaagctagggtttgcagattctcgccagctcaagttatagtgatgtaactcgagttttgatgttcaaactatgtcatccggtgaagaaatgatatagagactgaagttactattctttcatcatgagttttccaaggatataaatgttttattaggatctcgtcttgtacggaaatgatctgttttatccatatttaactctttcaaaagtatttgcaaatttttagtttattccgtggattattacccgtttacaccgttgtctgaacaaaaaagaaaaataatccctaccctgcatacgtttacccgataaaatagaaaggttttcataaccgcaatagaagaaaaacagtccttctcatgtacgattaatacaatatttaacccatcgattaaattttaccagttaatatatgactaatctgaaaataaaaagggattcaaccatcattccagtttccaagtagtcatgttataaatcccatgtcgaatgagatatgactttattatatctcataaaaaaaaaaaaaagaggaataacttatacttcgatcacttctttttttgtgtggtacacaatcacttcattcaaaacaagtgttagggaacaatcaatattttccaatgtgacaatggtgaatacaagcgagcttcgtttttcatatcttaacacgtcccaacaaaatggattatatataatatgaacgtaccgaaaatttttcttcaaactcctatacaacattgtttactctctcctctttcaagctgaactacgcgtaacggctattgggttgaagcacttcctatgaatgtccacttattcctttcctcttcctcaactggcaatgaaatatattttctctcgtctccccatctcatataatcgtcctaggattttattactctctagttttccgatccactaaatgtgtttatcctacaaaccacagtggttatgtttgcttatattaagaatctgccacattttcttttcccgttaggtcacatttgatgaccgttctcctaaccctcggttatgaaccatcttctcactcttacttaacccaaatattaccctttttttgttctccccgatccgccaacttttcaatctttgagccttgtatctgctcacattcccatcgatcattccttgttctcctataatcttaattcaaaatgatcctctactccaccctcacctagtcagccaaatgaaaactcggagttgcatggaatcaacaacatacccaacttaatttcaatgtattcttaagtaaattaagaagttgaaaagtaaccttaagcgtttctgtagcactgtaagctttttaattgatgtaaaagttgttttgcagatttttcttcagactagagatttaatttacggaatcttcagttagagtcttttttggattaaaaatgtgttaagacttaagagggtttctcttaggtttggagaagttggctggcctgacagagacatttaaacacaacagtataaataaagactaaatatatatataacgccagctgaaaggtatctagtatttcccaaaaaaacaaacaaaaaacaacaaggcctatcaggggtactacagtcatttaaatatatacacaagctgaatggttcccaagtatgcttgaacaaacaataagcaaagatatgtttttaagaccagagaccaa

SEQ ID NO: 38240 - DNA, 2592 bp, Arabidopsis thaliana landsberg
cactatagtatataaaaggctcacgtgactcacgtgacgctcccttattaacctatatcgttcgccaacttcgaaaccctaaattcccaaattgcggaggctgagagatctcaaatcgacgaccaacaggtgaattttcgcttcctctgcttcagacattcttgataaagtttgaatcttgactttggacttgtgtttttggatttgataaaggaagaatgagcagtcgttcgagtagaaccgtgtacgtcggaaaccttcctggcgatatccgtgagagagaggtcgaagatttgttcagtaaggtaaaggattcgtctttatgctatgaaaaccttgttttcgcttacactcgataataacaagtctccgtaacatttatttcttccttttgtttcagtatggacctgttgttcaaattgatttgaaggttcctccaaggcctcctggttatgcattcgttgaggtcagcttaccacctcttattcttgcagtgacatgtgttatgattcttgatgttattacagtttggctctctgttgttatgattcgagaatttgaacttgttctgacttttcttcctatttgtgtttcgttaatctgtttagtttgatgatgctcgggatgctgaagatgctattcatggtcgtgatggctatgactttgatgggcatcgtttgagggttagttattattactcgaatttcagatatttaattacaactcttgagtgttttcggattggttttcaatctaatttaacgaatgtttgccttttgtaggtggaattggcgcatggtgggaggcgttcatcagatgatactcggggtagtttcaatggtggtggccgtggtggtggtcgcggccgtggtgatggccgtggtgatggtggtagtcgtgggccatctaggagatcagagtttcgtggtatgtagtcatataatttgcattattctgtccaaagttgtaggaattgttcctaattttacttgtttttcttttgtccaccacagttctagtcacaggcttgccttcatctgcttcttggcaagatctcaaggtgacttcacactggtcaacaaaactccttacttccccttgtatctttaaagttttctgaattctaacatgaatcacttttacattaggatcacatgcgtaaaggaggcgatgtctgtttctcgcaagtgtaccgtgatgctagaggtaataagtgtgcccatataatcttgtccatctaaaaccaagttgaatggttttaatcttggacaatcttactgtagggacaactggagttgttgattacacctgctatgaggacatgaagtatgcggtaagctattttccctgtttctcttctgtggttgagagtttgttctactcatccttaatcactgattagctctcactcttgaatttccccagctgaaaaagctcgacgacacagagtttcgaaatgcgttttcgaatggatatgtccgggttagttgaagctgactttcctgtgaattgtgatcttttcattgttgtgtttaatattttgtttcatatctctttaggttagagaatatgattcaaggaaggattctaggagtcctagccggggaagatcctattctaagagccgcagccgcagccgtggacgaagcgtgagccgaagcaggagcagaagcaggagcaggagcagaagtcccaaggcaaagtcttcacgtaggtcccctgcaaaatctacatcaagatctcctggcccccgctcgaagtcaaggtcaccgtctccaagaaggtatgcttcatgtcttctataatgtttatgctaaaatatccaacataaaacataacataggctctatttagctcttcccttgaagtttggtgacatcacattaaaagatgtcactgagatgactcgagttgttgattgagaatgatgattgcttctagttaagggtacacgatttatttcctttgaaagtctggtcttttataattatattgttgagaatggttttgtttcttagatatggatatacatacaatcaactaaaatatgggaaatagtatctggatcatggatgtcttggttggttgtacacaactgtttcgtctcagaggtatatgctctttcttagatgggcaagttcgttttctgataatatccattgctgctagatgggtaacagtggagagacattggatcgcattgatatagtgtcatcaaaatagacccatcgagcttggacagatattttcattacctgctaatcgacaagcgatctggattctcatggaaccgatgctgttctggacacagggtttgatagaattagatttgctttgatattctccatctctaccatctgttttaacgaaaagcaggcttgtgttggtttgattttctgctagaaatagtctgaagatatgtttttttcttttttgcttcttgtgattgtgttttgatgtctgacatggaatgaggcatcaagggtcttggtgaaacagctattaaacacggaaatattggatttttacaactggatttgtttctcggacttttgcagatctcgttcaaggtcaagatctcctctaccctct

SEQ ID NO: 38241 - DNA, 3859 bp, Arabidopsis thaliana landsberg
aattcctctgggacagtggctaccgaaggtagctgtagatgcttacgtggcacctaacgttgtgttggctggtcaggtcaccgtctgggacggctcgtctgtatggaacggtgccgttttgagaggagatcttaataagatcaccgttggattctgctcaaatgtccaggaacggtgtgttgttcatgctgcgtggtcgtcgcctacaggttcttgttctttgtcattttttcggaatttgagtctctgtatggttccattgtagcttctagtttgagttctggatatccaattgctgtagttactgcttgctagctaatggaatcattgatattggaatttagggttttcattttcatcttccattttgattatggaaaatgtagagtctcacctttaaggagattttacacttttatctgaagtagtgaagtgtaagtaagcatatttgtttggagtgaagatgtccccagatcaagaatcatgaatgatatttgttcagtaaagttaatcttcagagcattttgcgtttagctagacaaggatgcatagaattgcgtagttctttaggtgattagtgatattggaagcaagaaacccattgatgatatgtgcttgattttaaaatttaggttattcaggggttgaatagattagcatggtggagaccatcttgtttagttgtagaaagttgcctagcagctctggagaagtttcaggaactatgtcatagtaaagatttttagttatgcggagagaattttgcagaaagttgatattatattcagtggttggaaccgagattctgaagctgcgtcaagctgaatgatcataagcgtcttttagtcttaccaaggtggattccgtgtcaaagtctttagttcaacagcctcctggtttgattaagctgtagtttacaactagtacttaattacttgattcaccattttttcgggttaatagctctgtattatcaaccagtcttcatgctttttctatactaacatcttgaaggatagagcatactgtggtgctgcttttgaattttgatatgatagataaaaatctgatcttagaagatactttctactttgatttttttcaggattaccagcacaaacattgatcgataggtacgtgacagttggtgcatacagtcttttaagatcatgcactatcgaaccagaatgcatcatcgggcaacactcaatcctaatggaaggttcactggtcgaaacccgctcaatcctagaagctggttctgttttaccacctggcagaagaatcccatctggtgaactatggggaggcaatccagcaaggtttattcgaacactcaccaatgaagaaaccttagagatcccgaaacttgctgttgccattaaccacctaagtggagattacttctcagagttcttaccttactcaactatctatctagaggttgagaagttcaagaaatcccttggaatctccgtctagaatgcttcttccaggtttctggctacttccctcattaagaaagcttcttcgtttttggaatttgatctgaataagtagctgcggaacaagaaaaagagcagagctgtgtttcaaatgttgtcttctctgtttgttttgtttaaattcatatccttgtgttcaaactttctatgaagatgataatggtgaaaactgaaaagtgtaaaacttctttcgtctcctctcacaattggaaaagctaataatctcgtagtgttaaaatgtgatagaattaaaaatctcgtactaaaatattttaatcttcaatttttattgtgttgctttgggcgaaaagccaatcactgaaacattacagaaactgagagacgcaactaaaatatgtagtaccaaattattccaatatctctagagagcacaaagctagttccctcccttaataaaccctgcgaatttatgcacgagttcatgagccttttcagaatcaggatccctcaaatgaaaaacatgaccttcttccttagtctccaccactttcactttcttctttccatccactcttctccagctccgccacgtaactccaaccttgcctagccaacacatcatttctcagccaccattaccaaaaccttaccacaacccaacccagacaaatccaccgactctgattgcactacgttgagcaacggatcatctgttccatctttgctattaggactagccaacgtccagaccgactcgatccacgtccttattgctacatccgtcgtctccttgtcgtcgactggggtttttgaccagaaataaggatgaactaagatgattccagagattcctgactcgttcaaagactcgggactgagtttatctttcgcagctttcatcgtcatgtgatgcgttatgttcgctccggcgctatctccggcgaggaacactttgctgaagtcggcgtgtttgctcaaccaatcttctgagccagatccggcgatgtgggagaaaacccatttgagagctgtccaagaatcatcgtaagaagtaggaatcggatgctccggtgcacgtcggtaatccacggagaccgctacacagtctgacgctgagacagccgccgtgaggaaagtgtggtaagtcggggagaaagcggtttcaacgaggaatcctccgccgtggaagtagacgaggagagggagttttacagaggcttcggtctcggcggtggcggctttctccgggaggtaaatgcggagggagaggttgttgtcaggagaataaacgacgtccttggaaacgactccgttttgtgggttggaagaaggtggcacggtggtttcacccacgagtcgctcaatgcggccactcttgtagattatgagcattggagagtagtcggcggcgatctcggaatccatcgttggttgagattgagagagtatgattgtgtgtgggagagatatattatagtattgagaatggtgtccaaaatgtcattgtttacactgaagatatatgccacacaattcaaagtacatgtcagttattctacggtgcaccttttttccttctttttaattttctctacttgtcctacttatatagttcaataaaatatttaatttttaatattaaactagttaggaagagacaagtgtaaggaattgacttctaattagtatacaaaaattataattaggtgagtatctcagcgagatatctccaaagaaaatgccctcagtaagcgttaataaataataactacaagactatttccagtaacatgccaacatgtcacgagtctagacgcttagatgagaatctgagataaagcctcaagaagaacaaaggttatccgctagagtctccgactccgatgaaagttatcgtcggaaacatcatccaaccaatgatttcaataacagaaacgagatatattacaatgttctattagagaaaatgaatatagctttgttttgttttagtgaaatcttttgaaatggaagtaaaatcttcttgtactgagcgttcttgaggttggtgcgctatgtaaatcctagcttacttacctaatgaaacacttctatcagtaaaagaagagaaacatagttaagtgaaatggatagatagaatattctttcttaattaaaaaaaagggatgtatatttcaaacgacttatcttagattgcgtaagacactttttactggatgaaatctatcttaaccaggattattaatgatcgtcgcgttatttttggcctagtcaacggttatatatgtgtaaaatatccggtcaacgtttttatcatgttttatttagcctcatataaagttcacgtattaaataactatttttataaagttcgggtattaaacgacattttt

SEQ ID NO: 38242 - DNA, 3900 bp, Arabidopsis thaliana landsberg
  unsure (1)..(3900): unsure at all n locations
tgcacccagacacccgttttcggaatgggtgacgtgcggcaatgaaattgcgcaaacccactccaaacatgaggtttagacctaaagtagtggattgggcatgttcgttgcgaaaaacgaagaattggttccggcggcaaaaactcatgctttgtatgcacccgacacccgttttcggaatgggtgacgtgcggcaacgagattgcgcgaaaccacaacaaacatgagtttttaacctaaagtagtggattgggcatgttcgttgcgaaaaacgaagaaatggttatggtggcaaaaacttgtgctttgtatgaacccgacacccgttttcggaatgggtgacgtgcggcaacgaaattgcgtgaaaccacccaaacatgagttttgggcctaaagtagtggattgggcatgttcgttgcgaaaaacgaagaaatggttccggtggcgaaaactcatgctttgtatgcaccccgacacccgttttcggaatgggtgacgtgcggcaacgaaattgcgcgaaaccaccccaaacatgagttttggacctaaagtagtggattgggcatgttcgttgcgaaaaacgaagaaatggttccggtggcaaaaactcgtgctttgtatgcactccgacacccgttttcggaatgggtgacgtgcgacaacgaaattgcgagaaatcaccccaaacatgagttttggacctaaagtagtggattgggcatgttcgttgcgacaaacgaagaaacggttccggtggcaaaaactcgtgctttgtatgcacccccacacccgattttagaatgggtgacgtgcggcaacgaaattgcgcgaaaccacccgaaacatgagttttggacctaaagtagtggattgggcatgttcgttgcgaaaaacgacgaaatggttccgctggcaaaaacttgtgctttgtatgcacccgacacccgttttcagaatgtgtgacgtgcgacaacgaaattgcgcgaaaccaccccaaacatgagttttggacctaaagtagtggattgggcatgttcgttacgaaaaacgaagaaatggttccggtggcaaaaactcgtgctttgtatatgcaccccgacacccgttttcggaatgggtgacgtgcgacaacgaaattgcgcgaaaccaccccaaacatgagttttgtacctaaagtagtggattgggcatgttcgttgcgaaaaacgaagaaatggttccggtggcaaaaactcgtgctttgtatgcacccccgacacccgttttcggaatgggtgacgtgcgacaacgaaattgttcgaaaccaccccaaacatgagttttggacctaaagtagtggattgggcatgttcgttgcgaaaaacgaagaaatggctccagtggcaaaaactcgtgctttgtatgcaccccgacacccgttttcggaatcgttttcggaataggtgacgtgtgacaacgaaattgtgcgaaaccaccccaaacatgagttttggacctaaagtagtggattgggcatgttcgttgcgaaaaacgaagaaatggttccggtggcaaaaactcgtgctttgtatgcacccccgacacccgttttcggaatgggtgacgtgcgacaacgaaattgcacgaaaccaccccaaacatgagttttggacctaaagtagtggattgggcatgttcgttgcgaaaaacgaagaaatggttccggtggcaaaaactcgtgctttgtatgcaccccaacacccgttttcggaatgggtgacgtgcggcaaaaaattgcgcgaaaccaccccaaacatgagttttggacctaaagtagtggattgggcatgttcgttgcgaaaaacgaagaaatggttccggtggcacaaactcgtgctttgtatgcaccccgacacccgttttcggaatgggtgacatgcggcaacgaaattgcgcgaaacaaccccaaacatgagttttggacctaaagtagtggattgggcatgttcgttgcgnnnnnnnnnnnnnnnnnnnnnnnnnnnnnaactcgtgctttgtatgcaccccgacaaccgttttcggaatgggtgacgtgcggcaacaaaattgcgtgaaaccaccccaaacatgagttttggaccttaagtagtggattgggcatgttcgttgcgaaaaaagaagaaatggttctggtggcaaaactcgtgctttgtatgcaccgacacccgttttcggaatgggtgacgtgcgacaacgaaattgcgtgaaacaccccaaacatgagttttggacctaaagtagtggcttgggcatgttcgttgcaaaaaacgaagaaatggttccggtggcaaaaactcgtgttttgtatgcacccgacacccgttttcggaatgggtgacgtgcgacaacgaaattgcgcgaaaccaccccaaacatgagttttggacctaaagtagtggattgggcatgttcgttgcgaaaaacgaagaaatggttccggtggcaaaaactcgtgctctatatgcacccgacacccgttttcggaatgggtgacgagcaacaacgaaattgtgcgaaaccaccccaaacatgagttttggacctaaagtagtggattggacatgttcgttacgaaaaacgaagaaatggttccggtggcaaaaacttgtgcttttatgcacccgacactcgttttcggaatgagtgacgtgcggcaacgaaattgcgcgaaaccaccccaaacatgagttttgtcctaaagtagtggattgggcatgttcgttgcgaaaaacgaagaaatggttccagtggcaaaaactcgtgctttgtatgcaccccggtacccgttttcggaatgggtgacgtgcgacaacgaaattgcgcgaacgatccaaacatgtgttttggacctaaagtaatggattaggcatgttcgttgtgaaaaacgaagaaatggttctggtggcaaaaactgagtttatatgcacccgatatttgttttcggaatgggtgacatgcggcaacgaaattgcgtgaaaccaacccaaacatgagttttggacctaaagtagtggattggcatgtttgttgcgaaaaacgaagaaatggttccggtgacaaaaactgagtttgtatgcacccgatacctattttcggaatgggtgacgtgcggcaacgaaatttcgcgaaaccaccccaaacatgagttttggacctaaagtagtggattgggcatgttcgttgcgaaaaaagaagaaatggttccggtggcgaaaactcatgctttgtatgcacccgacacccgttttcggaatgggtgacgtgcggcaacgaaattgcgcgaaaccaccccaaacatgagtttggacctatagtagtggattgggcatgttcgttgcgaaaaacaaagaaatggttccggtggcgaaaactcgtgctttgtatgcaccccgacacccgttttcggaacgagtacgtgcgcaacaaaattgcgcgaaccaccccaaacatgagttttggatctaaaattagtggtttgggcatgttcgttgcgtaaaacaaataaatggttccggtggcaaaaactcatgatttgtatgcaccccgacacccgttttcggaatgggtgacgtgcggcaacgaaattgcgcgaaaccacacaaacatgagttttggacctaaagtaatggtttgggcatgttcgttgcgaaaaacgaagaaatagttccggtggcaaaaactcgtgctttgtatgcaccccaacacccgttttcggaatgggtgacgtgcggcaacgaaattgcgcgaaaccaccccaaacatgagtttgggacctaaagtagtggattgggcatgttcgttgcaagaaacgaagaaatggttccgatggccaaaactcgtgcttcgtgtgcaccccgaca

SEQ ID NO: 38243 - DNA, 8320 bp, Arabidopsis thaliana landsberg
tgatgcgttggatagaaaaattgatcatcctcataaataaaaattatatgaatgagatctatatgtatatagttaattttgcttaagattaacaactttaaaatgtatatatttagtaattttatgatcatttcaaaggcattgtgtatttgaaattcattagtattattttgtagttagtgagagatccctataattatgtcaacgaaataaatagattgaaaaatcagatttgccttgcattcctaacgacctccacatgttggttagaaccttctagaatcagaaacagtagctagggtgttgacgtgtcacctaactagataccgtcactaataaaaatatcaccgcaccgtcaccgaaaacttatatccaatctctcaccttcgtggaagattttaaaaccttactcgctgcgtaatttctttcttttgctttaaatcctttttctttttttctcttttatctttttttcttttccacggttgcttaattccaatgccatcgtgatcgattcatctctctctctctctcttccaattttcccaattcttttttaaaaccctaatttttcagatatctgattatctcttgtatttcttctactcgatttgctcccataaaaacccttactttcttcaagttctggttttcaccgattgatgggtcgtggctcagtgacgtcgcttgctcctgggttccgttttcacccgacggatgaggaacttgttcgctactaccttaagcgtaaggtctgcaacaaaccctttaagttcgatgctatttccgtcaccgacatatacaagtctgagccttgggatctaccaggttacaacttttttctctcaatctctcttttttgttgtctagttagatcgaattatggagcttgattatgaatgatctagaattctgattgattcgattgattttgtgtgtgtatagataagtcgaagctgaaaagtagagacttggaatggtacttctttagtatgctggataagaagtacagtaatggttccaagacgaatcgtgctacggagaaagggtattggaagacgactgggaaagatcgggagattcgtaatggttcaagagtcgttgggatgaagaagacacttgtttatcacaagggtcgagctcctcgtggtgaaaggaccaattgggttatgcacgagtatcggctttctgatgaggacttgaagaaagctggtgtgccacaagtaagttttgagcaattgggtttgttttgttttccatttttgatctgaaagttgttttcttttgtgtctatggagagttattgactttgttgagtctttttggtggttggtggagaaggaagcatatgtgttatgtaggatattccagaaaagtggtacgggtcctaagaatggggagcagtatggtgctccttatcttgaggaggagtgggaagaagatggaatgacttatgtacctgctcaagatgctttcagtgaaggattggctttgaatgatgatgtttatgtcgatattgatgacattgacgaggtagcctacctttttcttcaaccgttccagaaattatttctctttgtgattagtgtgtagtgtaaaagtgattagttatatggttagaaagatggcgtggaatatcgcaaatgcgaaagagtgataaatgcagtgttttcgtgttagcaagccttgggtgccttttgcttatgtgctggaatagtatacctgtttaggtttaagatgagtgatggatgttagttagctttaggtcttggcatattgatgatgatatagatctttacatcttctgatggtttggattcattcatgacatgtcttttatgttagcgtctgaatatgatttccttttgcagaagcccgaaaatctggtggtctatgatgccgttcctattctacctaactattgtcatggggaatcaagtaacaatgttgaatcacgcaattactcagactctggaaattacattcaaccaggaaacaatgttgtcgactctggtgggtactttgaacaaccaattgaaacttttgaggaagatcggaagcctattatacgggagggtagcattcagccttgttctctgtttccagaggaacaaattggctgtggtgtgcaagacgaaaatgtggtgaatctggaatcttccaacaataatgtgtttgtagctgatacatgctacagtgacattcctattgatcataactatttacccgatgagccattcatggatcctaataacaatcttccactcaacgatggtctgtacctggaaacgaatgatctcagctgtgctcaacaagatgattttaacttcgaagattatctcagcttctttgatgatgagggtttgacttttgacgattctctattaatgggacctgaagattttcttcccgaccaagaagcccttgaccagaaagtaagacccgttcttccaacgtgcttagtttatatatatgtgaaaaacttctgtttaactcacctttacatcaacagcctgcccctaaagaattggagaaggaggtcgcaggaggcaaagaggcagtggaggaaaaggaaagtggcgaaggatcttcttcaaaacaagatacagatttcaaggactttgattcaggtaacactcagatgttcatggaattccttttaaaacaagtcatatgatgactgattctgactcttttgaatctaaatcatgtagctccgaagtacccatttctcaaaaagacgagccacatgcttggagccattcctactccatcttcatttgcttcacagttccaaacaaaggacgcaatgcgtctacacgcagcacaatcttctggttcagttcacgtgactgcaggtatgatgagaatatcaaacatgactctagcagcggacagcggtatgggctggtcatatgacaagaacggtaacctcaacgtagtcctttcattcggggtagtccaacaagatgatgcgatgactgcctccggaagcaagacaggaattacggcgacaagagctatgttagtcttcatgtgtttatgggttctcctactctctgttagcttcaaaatagtaaccatggtgtctgctcggtaataggatcaaagttgaatcgtctcaaagactttttttggtgtttgtacctctccaatcatatagcctttaactttggcagtgctttgctgctcaatatttaaatttttattcgaagggtttggtgtagcttgaattctctatatggtttctagtttgagtttctagaaataagaacataaacaactttcttatgacaattattatttgatcccgttattgttggaatcattggtctaaacatgttacattgtgaaatgatatttcgttgtaaaatctctagtaaatgagggaaaaaagcattcataacaaattgattttgaatctttgagaacaaataaagaagaacatgtttcccccactctatctctcattctcaaaaaaatggaattataaaccaatgtttgtttcgtcagagcttataggtatttgtgtcgccaaactgtttgggatttaccttccaaacaaaccccacacaccagcagagccttgcctttgcacagtcccgtcttcttcttcatcagacgctgacctctgtcttctaagcatctcaacttcagcttcgatggattgccctgactccagtgctttctgcaattctgctatttgtgcctgagacatgccattagataaaatcgcacttgagtttgagattttagaaaaagagaaggctattgaaaggttagaggaggcttataaacctcgagtttaaagcatctagaccgttctgaaataagttgaccttctacagattggagttcctgcgataatgtttatggaatgtgaaacatgttcatagaacgcaaatagggataacctgacagatagagattacgtacttgagatagctcagtgtggctactattgacttcatctatcttttccctgagcttcgcgttttctacttgagtttccgcaatagatgactccaatgctcttttttcttctttaatggtatcgattctgttcctaatatctctctcaggaagactgtttccatttccattgagagttggatttgcaggtggaggataatctgacttatctgacttggctatggcataagcagcagtgacagaggctgcagctgcagcggctgctggtgacttaaagattttgggatgtgaggattctcctggctttagcctcatgacaaatatctggatgaaaagaagacaacagcccaaataagcatatcaataagatttgacttgttgaaatctattgctatgtgcttacatcattgttatacttcccgttatagccgacaaaagctactaagatgttctctccaaatactgatgctgaacatacactgagaccctgcagttgaaccatacaacacataagaaaactcggaaaagaaacatgtacgattgggttctagttttggaagtatcaacctcactagcaagtggatgtcttgcttctacatgggttgatgtagaccaaaccagctttgacatatttagaacaagggtctctaaacaacctgcacggaaagaaaagagttaccgaggagagatgaatgcaaagtgttaactggaatcgcatgttgagcgagtaagacgtaattctaaaagcagagactgcatttaccagtactgttatcaccgcccccaactatataccagttttcgtcaatggtgattccagcgtgtcctgcccgaggagttacaacatctccctgaacatgaggctgtgaccactccatctgccatgagtaaagtaaattcatcagaatatgactaaattggcaaaaaaaataacaataaaatgtgcttacttactgtttgcaagtcaaggatatgaagatcactgtagaaaatcgaatgagaacaaccaccaaaaatcaagaggtagcgatcagaatgtgtggcagctgtgtgatcaaatctgggaactgggcgtgtctgcctatcatccaaaaaaaaacaatacagagcatttacttgtaagacgaggtagacagaagtgcagtaaacataagcatggcctagatctagctgcctgcacttttacataaacttactttgtctctacaacatcccaagtcattgtctcaagatgaagaacatgcagatcattcagcagtctcctgttcttatcttccccaccaaaaacaagaactcgggatccaaccagtgtaatggaatgtccaccacgtgaagcctagaaaacatggaaggtaatataacttaactatccaaaacagctacgtatggagtgagcaacaatttagataacagttttcttaccggaacattcccaaacacatcaatgactccacatgaatgtgtttccaaatcaatgaaccgcactgtaagaaaaaactcaaacacataaataagaaattgaaagagcatccaatcagaaggaaagctggatacggctaacctaacatgttatctgatgacttcttggagtgtcccccgatcaaaagaagcttgtttccccacttaatctgccaaaatgcttcaaatttaacattttttttgagtattgattacaaaattcttcttcatgttaagaaaggacttaccatgcgatggtctgaaatagcaggaaaagcttcccgtaagctgctaccatcatcctcttgaatgttatcagcacttgatgattcagttttcagtttcaaactagaccaagtcaaacttctaagatcaaacacctgataagttgagtttttttcaaatcaccacagattcatgaaaacaaaaggaagatacagacacaaagaagaaacacacaatttacctggacatcagataagtatcggccattccggcttccaccaacaatgtagagcttctcatcaacaaccactgccgcatgctgcgtcatccagacaacacacgaaaagatttcagagaaattatctccaatttaatcaaatgcttaaccacagacaaagatataatcagtgaccttgtaacgagctgatgctcgagagccagaaacagggagtggtgtccattcatcgtgagctagatttgaatgccaatcaccgacatctatttctttcctgatctcttccattaccagagagactacgtcacagcttcactctgccatttttgagaacaaaagagtttcgatctaacaattggatacaataaactccataatcaagtagaaacgacttctaaaatccagaattgagcttatcacgatccttcattttccaacaatgagatcctagtctttctcggagacgatcacgaaattaaagttggggacattgcaatcatagggagatctgaacactaaatttgaaagtgatttcacgaaagctaattaagtgataactgagaaataaagggaaggagaaacaccaacataaagttagaaaccgaaatggcggcgatgaccagagctgccggagaacgtgaatggttcggagccggagagggagaaggattgtgagaagcgagatcgtatctccaagtgtatatactaattaaaaagtttgggtcaattacgtacactagcaaaggatatgggtgcttctgtgtttagtacccaaatattaggggtacttcagaaaatagaaaactgttcctcgtcatatatataattatcagaagatacaagtcttacttgtaaatagtaaaagatccgagcacttgtagttaaataaaagtttcaggatccataacttgatatttagggcatctcgaatggttaaaaaatggagctctctccatggtttctcagattaaaagtgtgaaaaaataaattaaaataatatatttatgagagagctgtatctcttgagagagattttggaaggcaagagagacgtcgacgtgtcacctttttttttgccgcagttttctcttgcttcctcggtttcttaaaggcagaggaaccgattttgacttgttttgtttcagaaactgtgatgaaggtttgagagatttcttcatttgttgactctcctctacggtttgtttctttggagtttcgatctcccttggggtttcgactacagtttctgctgtcggaattgggttgatctgttgctgactcttctgatgtaaaaatcccctttcttctctccttcttccttagcttcttctctcgttcctacaaaatagacagagttgttcaacagatccatggcatagtatttaaaataatttttgtcccaacagaaacatactagctagagagactgatcgaaatccaatttggataacagaatgagaaaaatatgcttttaccttctccctttcttcggcttccttctgagccttgagaacagctcttgcttttgccttctcctctctcttcttcttcctctccattgcctctttcgcttttgctatttcctctaaccgatgttgctccttcatctttgcagcttccttttgttttctcttctcttcttctttcttaattaactcctcttcctcttttgttaacttaggcggctcttcttcttccggtgttgctgacttctctatctcctcttttccagaaaccaattctgtgacaattgatggaggctggtctggcttgacggcctttttagatttagtggtctgactcttttgctcggtgggtttagcaacctccttaccgttgttttcaacttttgaaccttcaaatttaacgactttctctttctgtgctggaactgcctcatgtttctctgctctgtcactagaagttctaagtttgtccgttcttggagcataagtgatccgaggtggctcctcatcagggccaagagatcgtccatctagggttccctagtcttctaaaggacagagcagagaaacatgagactgttccagccagtttcagcactggattcagtcttatatttgccccttcatcaaaatcatcttcgggatcaaattttggaacagtctatgaggcgcacgagaactgctagtcgcagtagcgctacgttttgccttgacaaccgcagtagtttgactagaacgccataaccaattgatacgaccgaatgctagcatcttagcttaaagatgacacaataccctaacttctttttaacctcctatgactcgtattatccttttttaatctgacatgaactctttgttttgacagttagagttcagagtttaaaattttgatagaataactaacggtaattggtgaagtaacatgaacggccaaatggggactcaacaatgatccgaaatgttgactcagcgactaaatttaatcccttcacatgaccca

SEQ ID NO: 38244 - DNA, 5588 bp, Arabidopsis thaliana landsberg
ggaatggaatttgaattcggatgttgaagctctggagcatttcctgctaagattgatctcctaatcgatggtcttgtctgaaacctcagaactaattgcatactctgtgtttgtccatgcgatttaggtgatatccatatgtttccttgcatcatctgcaaaacaaatttcaaatcaaatacactgtttataattagaatctctatataccaaacagaaacagagacatgatgagatcactaacctgtgcaagttttctacacatgcctaagctcaagccttccttaatcccattgctatgatatcttctgttcggaatatgtctcatagccatagccgaaccatccaatggaggattctgaatctcattaatctcaacttcaaatttcacaccgagggaatcatcggacatatgggacttccacattccagtttctcttttgctcttgtcctgacttgttccagtaccttcacagataactcggaacgtaacggttttgcctccatcagtcatatccaagatatacccaagcatatacatcacaagctgaaacgttctcttttcatctcctactactaaattaggcaaccgcgtttgaacatccatctcaaaaccgtaacctttgtaaacgcttaagcatttagcaacacaagcggcttctcttatcaaggaatgtagctggaaccgtttaacctctaatgcagatttcgcgttatctttaggcgaaatgtcaatcacgtcgttgattaaagctgagagaactgtgcttgttttcatgagcgcatcaacgatgattttctgttcaagactcatactttcggactgaaacatggagagtagaccaagaattgtgtgcattggtctcctcattccatgactcatcactttctggcaagtgttcctcgcttgacttgccatcatcgcgttctgttttgctcgaagtaaagctcggttttgaataccgagtttttctctcattaactgtgattcttcaagaactgaggcatgagagatagcaaccgctacttgatcagcaacaacttccgctatctcgatctctttatcggtccaaacccgtgaattcgcactcggaagtaccaaaaccattatagcataaggagtatccacaaactcgggagtgcctcctttgaaattcaatccgtgaagcatcggcatccgaattgcagcaaccggtccaaactcttccgaaccgccacaaccactgctctcaaccgcaagaacagagtttttcctcaaaattgtcactactttggtctccctaacctgaacaacatcgggatcattaatcgggattaccctgaaactcctcatcggattcgctctaagctcatgagtcaaatgcatctcggttctgttctcgttaggcatccaaacagcagagttctgtaaatcaagaatcttggatagctcaacgagagtagtccgcagaatcatatgcttatcgagcgatttcctgatctcccgagtaagcattctcacctgcacactcatttccttctgcctcttcatcaatccaacctcttcattaagctccaacacattctgcttcaagtaaagctctcttactttccatttcaacagcaacggaatcaaagtcaagagcgtgatagccgtggcacacgagacaagcgccgtgaggaatttaaagatggtaagccaaagcataagctggaaagagtgtggtccgtaatacgtccaagcgttaagcaaatgagtcattccacataggacaataaaggcaatgaattgaacaagaacccatttgaaaggaacattggagaagctaatgaagtagagaagctcgagaggtattgagaaataggcaatggctattaagagatcactcactctttgacattctaagatggtgtggacacttaagaaaccttcgtcgtcacaattacagctcacgtaatcgttatcaccagaaaccagagcaagaagagcaaacagaagcaatccaagacctaaagatcttaacatcttctgatccaatctttaatctctctatctaaaaccctaatcaaatccagccacaatcttgaggctctctacaagttgagatccaatgaaccaattaaacataactgacttggtattcatagatttccacaacgcgtagagaccaatgagattaaacaactccaaacacgcatacccagaagaaggcaaaggaatcaagatctatgttcctcgatattcgtagtactgagaaaagaaaccgcctttgagttttttttttttaaattccaggggaaggtaatcagagaaaaacgaaagctaagattcaagccaatagaatagagaaagaacacacctttcgaatctagtaagataaataagaaagacccatctccatttgtagcaacgaaatcgagtcaatctgacatctttttcacagaagttggagaaacagaagaagtgattagaaaagagaagaaaccgagttggtccggtggtggcagatcttttccgggagtttcagttgcggattttcagacttgagtcaacaatattcaaagtttttttaagacaaaagcagcagacttttcgcttaagcaatttccggagagttgctcaagtccataaaaatggtggtgtttcactttaagcttagatgtcaacaaaaaattcccattaaagataagaatttttaacagtaatttttggcttcacataagttatagcattccaacattatcaatcaagaaatttacaagttgacaacttgacataaagttaccaagaattttaaactaaatcaatattaatatgaataaataaacagaattctcaaatgagtttttttgttcttcgtcaaatgagttaatgttttggtccaagtaacggctcataggaaccgtttactaaattaagataggttatgaataattaacataagtagaaaccgaacaaacgaagtgtatatatttcacaaaaagagcatttccttttttagtaacaaacgaaagaaaaaccaaaaaaaatattataagaaaagaaaaagagtataaaaaaaaggaatgaaattgaaagtgaaggagaatcgttactgaaagtataaaaaaaggttgtggagttaatataatacaccgtaccaagaagaagaacaaaagcaatcactcagcaacttctttctatgattaaagacccttcagacgagtctctgtctaataagtcctctctcagttcagattctttgctcgccttctgtttctctacttgggatctaaactctacacacttctcctggaagctctgctaatccggtatttgctgctcgtaatctccattctccgacgactcatgtcctatccttcctgcacaagattacatccatcagcgtttcaagccattgccacaacggagaagagctttagcctgtaatcttctagaactctacaaaatactaatttccaccaatctccatagcaattctaatctgtccttgtttggatttaagggtttgaactttgatgaagaaagatgacatctttcgagaagttttgagcttttttgttacctgacaaatcatacccgccaccgcctctgccatcatgaccgctgttgcctcctccgcgccattcagatggcctggaatgtgtcatgtgtatcccctgcggcgcttgcatcatgaaatgatgaggtccacccaaaccggcttgatgatgatgatgatcatgttgctcgtcgtttcccctcattggatttcttcccgtagattccataccaggagggaaacccatgccaagcaactgtccagagcttacaggagaagttaaccgacttccactgtttgaagcatcccctttcccaccactcccggcggcatccttctttctatcaagctgaaacgtaccaagaatcacctgcatttgcacaaatctaaggcgatcaatcaaagccagacctcctatcttaggaaatgatcagttttgtgtaagatggttggaaacaataacaatgtttcaatatatgcaagttgaaactatgatacaacagaattgtacctgaaccgggccagcagctgtgagatggctaccaatcgctccaccgatgatctgaccatctgaagcagataaagaaacgctaaggccgccggatttaccaccttgttcagttcggatataggatccagatagtgagagaatctcgtattgaccctgaataaattttttgaaatttgaggcaagtttaacaatgatatgcaaacttcaaagaaagtatctgaattaagaatctctttgctttatcaacatgctaactgtattgtgtatcaattttcctctatcacacagaatagagagaaaggatcagaaagaaaaaaccctcctctcccctttggaaagaaacaacaaagaagcaagctgagtactattttactgcaagagaaaatcacctcatatggtaagttgcctcctgatggagccggttggcgcaaggatgcattagagatagtgcctgatgcagaaagaacgcatagttcatgcttgctttgttgagtgaaaagaacaatcttctccgccacatcctatcaaattaatccgcaaaacacataagaaggcaacaaaatcaaatgcattatgaatacattccaagttttaaccaaatcataatctcaaaagaaggcctttagaatagtatcaaagaaaaatactcacctcactaggagttagattaacaatgtgtggagtaaaacattgccaagtttttcctggaaaaaaaaatgtttatgtgaagctcacaaaatgacaacagcaagacgagtacaatgttgatcaattgatcttataacctaattgaatctttaacatgaactcagctgccacaagttttacaaaacaaatcaatcagcactagaaacaagaatctacgcattcttcaatgtgttcaaaacaaagtttctactccaatacattacgcatttgtaagcacagatagtgtctatagaaactcaaatactatgaaagttacatagaaagaccaaagattgaaacttaacacaattcacatagaactcaaacagcaagaaagagtacaatggtgatcaaatgagctttaacatgaactcagctgccacaagttttaacaaaacaaatcaatcagcaaaatgaagcaacactagacacacgaatctacgcattcttcaatgtgtttaaaacaaactttcaactcaaattacacatttataaacacatatgagtgtctctagaaactcaaatactatgaaagttacatagaaagatcaaagattgaaactttaatacaattcacatagaactcaaacaatttacgattcacatagtttattaattgaatctagaacatgaattcattaaactattggtactactgccacaagttttaaacaaaacaaagaccataaatcagcaaaatgaagcaatactagaaacattcttcaatgtgttcaaaacaaagtttctgctccaatagattacacatttgtaagcacaaatagtgtctatagaaactcaaatactatgaaagttacatcaaaagatcaaagattgaaattcaattttttttttttctgatcccttttggt

SEQ ID NO: 38245 - DNA, 3146 bp, Arabidopsis thaliana landsberg
accccagtatgtagtctatccattggtagaatctgcatatatccttgctttcctgctttcaatatcatctatgttgataatttgaattcttaactttaacatgaacataatgtgaacttttaaaatagctaataaccggaaaatgtccatttcccattggaggactaattccatccggagatgtaaaagtatttcctccaaatcgcaccaaagaagctcctttgtttaagtgtgtaaatagttctttgggccaataaccaatgacttcatcaaacattttaagtgcccaatttccgctgaagccatcctaatacatataaaacaaaagaaaaaatgaaaactaaatactccaacaagtatggtgtaatatgataagttcatctaaagtctaaactaattatataaatctttttcttaaaaaggataaacagaaatttacctgaaaaacttgcaatttaaacgtaagacttgttttaccatagacagatgttccccaaaatccgcttccaattcttgaatttcgacttacaaccacaaagccagggcattgtgtattatagcacccagttttctgataaccatctccctacatataataatatttgttacacatgtaaaataatgaaagacgttttgatctcttattttatttttttactctaagctgattaataatgttcttaaaagaataagagtagctaaaaattactcacagtccaatatattgtaaatcgtgtgacactatcaccgtacaatcttggatgtacctaaacagaaataaatataaaaaagattatgtatgttaaaaaaaaaacagattatggaacgcaaaatctttagcaagtttgatagaactgacttactgccaaaccagcttgtatactattgagttgacctgaggtccattctctaaccatatttgacttttactgtattggttattttgcagtttcaaatcatgaatacttatatcagcttctgctccccgatatatacttccatctaacatattttcgagtactgcacactgtttaccacgtgaaaaataaggagtgtaatgtttcattacacaacactagaaataaggagaaaaacgctattttttgtgatgtgacatttatacatgttggccaggatattcgactgtgccaggatgaaagctctcaggtccatttctctgtcttaaaattggtacagttccttttggacaatattttgcatgtgggtgatattcatcttctcttctaagcttttcatttgaagtgaatttttcctaaaaccatagcacaagaataacaagattaaggaatattatatatagaaccgcaagattaactatgctatattacagaaactgtaattcactatacctgaatcttgtggtttttcaacaatggatgttggaaagcgggttgtttgtatatttcaacacaatcaaattcctgtaaaattgactacaaaacaatatttatttgagaaatttaaatgatcaaatcttaaggaatgtaaaaattacaaagtaaaagttatagaagctcacatcaacgtttccttcaaccatttgcgtaaaaagcaaataagaagatagaacaaacactagatttaaacccattgtttgattttacttatttttctccattgatattttgatctctatatatataaattttgagtcaacaaacatttaacatgttgccaaaaaattatactttagtcaaaaactaattaatttaggaaccatgaatttatacctttttttttttttttttttaacaaaatacagaaaactaccatacaaacaacaatatgaaaagagcacatatagaaataacatcaatgaaaggaatacactttgactaaaaagtcacgcggccaaccgtgtcgccacgagttaacagcgatatgtgacctcttataaacttaacaaaagtatcaaacacaaagttgaactaaaaacttgaaagtcttgtactcttctatacatataaagtcactgttatttttcatatgactatttaatacagttgactaaaaacatacttttaattcagttgacaaaaactctaagaggaaatgaaacttgttcatataataaacgtgaaagtaaatttgctaacaaaaaatttagaaaattttggtccgtaacataaaatgcaatggtttaaaacacctaaatttggtccatgtaataaaatgaaacttgtccacaaaaactagagttggtcaatgacattacttaagctagtgaacccgtaaataccaaaactctaatattaaaacttttgagcccattaataaactaatatttttgagcccattaatagcttaaagtgcatcaacgaatgctaatataggtcaatctacccgaaaaaatctcatatattattattttttgactttcctactaggctctattgtttcaccttctatgaacactccaatctttgtgtacttagccatcctatgcttcaggagctcctgctccccactcattttcccaaattcctacaagtcccaagaaaaagttagaaaccttttagatcacattctacgtttagaagaataactatgcctacattcatgttttcattgatagcaatctttatctgctgcgacgtccatgaaggatcagcatgggccccaccaaacggttcctgcacagcatgtaagagagtaactcaatgatccaaactgacaaaagaggtctaagaggcaaacacacaaatagattagaggtaggatcagttacaggaatgattccatcggctacattaagcttgaccagctccttggaggtaattctatgcttttcagcagcctgagtacacgagtttcattcaagtgtaaaattagagtctacatgatcacttaattaatagtagagcagtgtacatacctcaggagcagccttggaagtctttcacaagagcgctgcacaggcatctggactgtgaaaagcaaaacaacagatgggataaattcaacctatagaaatatcatatcatcgtaatctacattggggaaattttacctggcaacatagaaaactgcattttcgagcatcagcatttcattatcacagccaatggctagggcaccaccaaaaccaccttccccaacgacaatagaaagaattggcactttta

SEQ ID NO: 38246 - DNA, 3052 bp, Arabidopsis thaliana landsberg
ttgcccctcgttcctgtataccggtcgctacctgtgcctcataatttatagtgtttcatatacatggttgatgcttgttaacttgttggtgaatcacgtaagagagaggttagtgtgagtgtgagtgtacgtgtatattttgcctaacttccaacaatcttggaacattctcatgtttctatttcttaatttttctaataattaaaccatttagtgctttttttatatatttaacgtgatgaacgagggttttaaaaaatatatataagaaactcagaatctttatagtgagggaaaaaaaagaactaaagcaaaacacattcattaaaaatttaaaatcattactatgaaaaaataaaaaaaatcattactatgaaaaagccacattcccactatctgtccatcacatccctacctctgaaagtctcaattaagctcttaaccattcaaagttagccacgtgtaattattgtcattactaatacgtagatgtatacaaaaaaaaaacgactatatgttattgaatgggtgtgtttataaaagtaaagctgtgttgtagttcgtcattaatattagttaattcacaaccaaattcgcgtctctctgttttcaacataattggcagtaaattatttactaggtaatggccatactattgtgtgagcaatctttaccttttacaattttagaagtaaagtttagatatggagttaaatccaaagttatacattaaaaatataatctaatatatatatatatatacatacatatatataaaactaagattcaaaatgataaaacaaaatctttataaatttgactataaatactaaaatttaatatatttcaaattttaatataaattttatctttatttttggaattaaatctggcatattactagaaatcagatagtcaaaaattgtttattattctgtttatttatttactataagatagatacaactactattttaagcattactattatactttttcactcattttcatcctagttaattatttttttagctaaggtaaggaaaacttgatttttctggaaagtgaatcattttatcataaataatttgtttgtgtcaatgacttgcacagaactgagaaggatgggaaacgaatcatatgaagacgccatcgaagctctcaagaagcttctcatgtaagtaaaatattgaagatattggaaacttatagaagacttttgtaaactgagagactgattacatatactagtaattgaaaattaataggatttttaaaaattgaattttatatcacaaaaatatacgagcagtgagaaaggatgatctgaaggaagtagcttcggccaaggtaaaaagatcacggcggagcttcaggcagcctcgtcatcggacagcaaatcttttgatcccgtcgaacgaattaaggaaggcttcgtcaccttcaagaaggagaaatacgagtaatataaatattgtgcttttaatttttgttatagttaacatacatccactataataacataaaatcaagtcatcatttgaaacttaatgatatatattataatttctttgcaggaccaatcctgctttgtatggtgagctcgccaaaggtcaaagcccaaaggtaaaacaaaaataagaagaaaaatatataaagcagttgatgaaaaatatagttatctctatatgaatatgttagatttttcttttggactcatattatatggtcatatactatgaattgtgcagtacatggtgtttgcttgttcggactcacgagtgtgcccatcacacgtactagacttccatcctggagatgccttcgtggttcgtaatatcgccaatatggttcctccttttgacaaggtaaacactttatacactacattaatttacatcgctaatttattcttgaacattctgactcaaacagagtgtttgactttgattttgacttatgaagtcataacatggcttttctgttttttttttcctttataaaaataattacaggtcaaatacggtggcgttggagcagccattgaatacgctgtcttgcaccttaaggtgaaaaaaaaacaaattaacacctgaaccaatttttatttatttataaaagtacatgtaattaatttttgaatgaaattattactgtaggtggagaacattgtggtgataggacacagtgcatgtggtgggatcaaagggcttatgtctttccccttagatggaaacaactccacgtaaaatatctctatatccattttattaaaatttaatcaattttaataacaggatttattaaatgagattagtaaaaaatatatactttaattgcagtgacttcatagaggattgggtcaaaatctgtttaccagcaaagtcaaaagttttggcagaaagtgaaagttcagcatttgaagaccaatgtggccgatgcgaaagggtacgtaatactccatttattttttcagttaacactttatttattcattagaatcatagatagtcatcaaccttaacaaaaatataaatattggataattaaattatctttatcggaaatgttttctaatatgaatgtatgaatattgcaggaggcagtgaatgtgtcactagcaaacctattgacatatccatttgtgagagaaggagttgtgaaaggaacacttgctttgaagggaggctactatgactttgttaatggctcctttgagctttgggagctccagtttggaatttcccccgttcattctatatgaactaacacatcaccatcaccatcgctaccaccaccatcacaaacatcatcatcgtcgtcatcatcatgatcagcatcttcatatataaatgttttactcttatttaattgctatttgtaatggtatacattttacttgcgatgagcttcttttccttcattatccagttataaaataaataaataaatcatgtttactttcacagatatcgttttgctgaagttgctttgatttacaacacgagagaataacaaaatcgtataaattttatttatttgtcaaacgaat

SEQ ID NO: 38247 - DNA, 4567 bp, Arabidopsis thaliana landsberg
  unsure (1)..(4567): unsure at all n locations
ataagtgagagtgttgtaataaagcttctcatctcaacctccaccactttaattacgtatctctcttttactacaaagccatcaacgtacgcttactcacactatccgcgtgcgactacgtcctttacttttttctctattttaattgatcgattcaaattcataaccatctcttttaattctacaaagactatgattttttatacatcatttaaatttatttggacgcattatatgttgtcaatgacgatcacgcgtttactgcgtgtcaatttgctttataaaaatggtcgagaagattggaaacactttgtgaaagcattaagagttgttgttttgaggttagttctaataatggagttaatgtttttttctttctaagttgataattacaggagttaatgtttgccggtgtttttagttagctggtcatttcattttataagtttgacttttcttaagattatccaaataaaccaaaattttcgattcgattggtagcaaatggagagatgacactggttcacaatcatttacgtgtgaatgcattattaatcaaatgtctctttcattgtggcttagtgattaagtgtccttgtatattgtttgttttctttataatgataaacggcattcaagttacgtgtccgtgtgttaaaaacatttctttcaaaccctagatcgttggccaaatgtatattggttaatttgttgcaagacagagagatatgtgatggtaatattttttatgcaggcaaaatatggacaaaaagaagtagtatgttgagatgttaaccttttttttcaatagaatttgaagttaacattgcatgttgccactgaaaaatttaaggaaatggcagatacatcgtgggaaaactggtatacgtctcctacgtttgcatacagaatactaaaataaatccatcatcattaaagacttgctcatctaactacttaactgccaaccacaattctttttattttcctgcgacgaatcatggccttttttagcaacgagccatattattttgtcggtcatctatcatatgatttatctatttaattttataaaaaaagtcaatggagtactttttttgctttcatttttgtaaaaatatgtttgtttcaacaaatatatactcaattcaaatccgcctgcatgcataggccatagctaaccataataacgttatcaaagtaacgaaaaatatcaaacaagtcatttgctttactattgtgcatgacttttctccattcgattgccaaacaaaatttaaaactattagtcacaaaaacgcataaatccgaaccaaactgaatcctaaaataaactaaaaactacaaggaaactaaaccctacacgttatgggtttgagaagaaaaggttaaacaaaaagatttataaagaagaatgtgattcaggcgtgagtgtgaacaacacacgtacaagaagatcagatcaatagagaacaaaagcaagcacaagtacacactgattctgaatatggcaaatgaaatgtggacttttatatctatggtctataatttgaagcctaaaattgatatatgggcttttagcctaggaccggcctatgattcgttgatttcacagagttacacgtatgagggctttttacatggagctattacttcaaatccgtcgtatggcttgggctaaccatatacttcttagttttggatacgggcacggatcttcctaaaccaacatataggtcggttatgtaattatttagatcttcaggggtaaatctgacaatattgcatgacccgaccgggtgtttcttatagaaacccgtatacccgggcattagttttctcgctatggacgcttggatctcgtctctcaggttcgggtcgggtacgacccatgtcttgtgcttcttgtaagcctcttcgaacgcctcgttgaaccgtctcagagactcctccgcctccgtccccgccgttgaatcaacggggagcgacgctatcacatccccccaggccattttttcgtatttctcgaggtattgattcactttaacctcgtgattcgctacccaatcgtctccgagtacgactctgagattcgatgtacggaccttggtcacaacgtaatggaggttgttcgctaggaagagatacgatagagccgagtcgttgtagagccgagatttggcgtcgattttacagagcaagacgagaatcaaccacgcgagtctcgccgccatcagagaacgatcaccggatcctggattctcttcgccgctgctactgaagtaatcctccggtaaaggtaacgatgactccttgagaatggtggcgagagaatcgctgtagtctgcgaggaagacgatgaagttcatcacatacctcgcgagctgatgaactccgccgccagaaatcgccgatttcgacgattccttcgtaatcgacgattgaaactccgtcatcattgcattcaccgattccgatagcttctctagagattcattcgcctgtaatctaacggcagcggttgaatcgtagctaaaaatctgatcgattttgggagtcagttgcaagatcgtctggtaaacgtcaagcgtagggaagatcttctctgcagtttttctggatttcgctacggttagtgagaagatgaagaggtttaacgcgctctgtagcgttatctcaacgaagcaagattcagcgacggaggaggagaaaatgtgatcggaaaggattcgttctccgttgaacagagtggtgattgctactctcgcaacaatcacccatattttgatcttcttctccagaatctcccattccagtttctgcatctgtgtagaggttagcttctcgaaccctagatgagacaatgtgtcgacgatgatctttttgcgaaacttcttgtagattttaacacaatccttctcgtaaccagaggagatcatgcgatttgctatcatcttcaaatcaacaatagcatcagaattccctcctcctcctatgtctttacctaattccgatgaggattcagagtaaagctctccatctaatgaagaatccgaagcggttccacttgatctcgaaggtatgttggattcagaagaccaaccagagacggattctggactcagaaagcggcgattcgatttcaaaacccggtaaaactccttctccaaatgcttcatagctttccgcatcaaatcctgtcctttagcaagcttagcggagtccggannnnnnnnnnnnnnnnnnnnnnnngcgtattgtaacttgccgagaacctcgaggaagcgtctgccttctaggcggttttgagcggagaagagggaagagaggctgcatgaagaagaagaagagtcgcagaggtgtggagtaacccattggcatatgaaggcgtcagctgcctccacactatcgccgattagagactcggagaagccctgttgctgttgcggcccgaccttagaggattttgataaggtggtgggtttcaagagcaccattgtttcttgggtttgaagaaatgggtcttaaggtgttggggtatttatttaccatcttcggtttcttgtttcggcgactgttttttttgttggagccgttccaagttcgtcaaaatgtacacgctggtcatccgtttatgtctctcattttgttttctaagtctttgattttgggacaacaaattgtttgtgttaaatttagactgaaatttacaggttgtatggataaaacacatgcatgtatacatcattgtctttcttaatttagaggtatagtttgttaaatgatcagtcacagtggtaactaaattttttctctgtttttgttcttaagagtaaaagttggaataacaagggattggttgtcaaattaataggttttcacgttttcttggtagacaaaaaagataagagaagagggaaaagaaactagtaagaaagataaacggtgcactccagaacagtctcgagcccatctgtgaactggtgcggctgctgctgctgggtcccggaggaacccgtaaaagtcttgacaattgcgaaagcctctcgcattcacatacttaccagtaccgcccattaccccaagatgagattccgatgcagctgttctatgcacaccgaagaaactgatgctatcttcatatccaccgctctcaaacatagccgtgaaagccatagtctggctggtcccatcaagggcacttgccacgtagaagccttgggctttacccagcagaccagacccgagttcgtgtccttcggttagttcgttgtccatcaccgtcaatgtcccaaacatgagcatctgaagagacgaacccgatgggagctggccgccgttagccacgggaagaccgttcaacatgttgtttccattgttctgtagaatgttggaagtggttccgccaagcccgacgagaagtgggacgttgttattgttcaggattccattgttgttattgtctgatggaacgccgttactaacagggaggtttgcaccattgggcttagcgaatggaatttggccactgagggctgcgtttgcgacgactccagtgacagccctc

SEQ ID NO: 38248 - DNA, 4114 bp, Arabidopsis thaliana landsberg
attgctgttatgttttggctatggtttttctatactatggcttatatttattattatttctttttcttatttggttatttaaacaatgatgatttggtcaaaggggttgttattaatttatgctcaggttcatgattatgattaaatagttttgttgaccaccattttatctgaaggggttataatttgtttttcctgtttagataaatagttaagctgactacaattgtataagacttgcttctaaacgttgatagaatctactttaattgtttcgcaaaccggccggtttaaattgagtggccgatctaaatccgaacacttaaaccaaaacctaaatccggtttaagttgactgtacatttgtcacctcttcttcttcaccaactaaccccatttctgcttcttcttctgcttagagacagagaaatagagagagatcgcgtcggcacaatctgcaatttccaacatcgacatgtttaactctacagcgttggtgattttcgccattcttttcctctcaatctccgccgatgcgttcccgattccgtctcccaacggagagatcgacgcaatgttgatccgaaacagtatcatcggagaagatgaagatctaatgccaactgagatcagccggagagtactgatggcgcagaaacggtacatcggctacgaaacgctaaggagagacatggttccttgtcagaaaccaggagcttcttactacgattgtcgctctggacaagctaattcttacagcagaggctgtgacaccattaccagatgcgctagagacacaaacgacatcaacacatgaaggtaagatccaagaaattgccaaaattggaagctttttggccgaggcaagtaaattatatgattaagcttttgcattgctgttgttatatatgtgtttttgacataagaattgttataatatatgtaactctgccactagttggttatcaatgttcaattattgagatctataaattatattaagttgttttggtagattgattgataaatttgggtgtttgtttgcttgtttttgggtgcttttggaccaaattagaatcttttcacttaggattctgagatttttgctaattacacgagcaaaggaaaaatcgtgagaaagcaaattaaacttgcaataagtcctggaaattctcagcgatgtgtttcacattggcatgaaagaaagggaagcagtattaaagttatcactaataacaccaaatcatctatagtttatttttagtaagtatagaaaatcctctaaatcatgaaagtagtcttaacatgtaaatgaaccaccaaatctataaactccaaagaaatgaacattggaggtcctcaattcatctctataacgtatgggttttggtgatatgacgtagaaatttgtcgaattcaacaccgtggatttctagattaattcctctcaagtactacactcaaagttgtacaagcccaagtttgcatcgagaaccagaagaaccttcttggtcgaacgtactggtttcatgcgtttcgtaggaaacgctaattcgaatcttacgccataaactctcgaggccgtactcgttcaccactttgaattttaacctgccccctacgtagttccgccactggtttcgggtaaacagttcatgtttcagttcggatcagatattatcatgtatccgaataccaagccttaagacccattttggtatttatctagaacgggcttggactcttgagtattttcagtcgggtttgggttcctacttcgagtccagtttttattttctacccctctctttgtaggaacgttcacattcttcttgcaaaagtaataaattttgaaattttcaaagcagattttaccagtgatgacatagaattgaagaaaatgaaaacgaatcttatagctaaatgctatcaaaaatttatattggaaaagcctttttgaatacttaagagaactttgaaacgtgtacgataataactacaaccataaaatcccccacgaatcgaaccatgtgttgttcgtgtcctaacacacattattaaagatgagcatttgagacattcattcaacaaaagtcgctaaaactgggatgccgaaaacaagtttcccctttttttttggtttctcatttgtttgaagagtacaacgctaaacagaacacacaaaataaaatcaagagggaaactaaaccaaaaactaatttaagtttcatgaaaaatggagaaaacaagcacaaccttcaaaagccaataacccttattaatactgatatttggtcaacttcatcagaagatcaatatctcaaactgttccactcttccaccacaacccaacacaaaaccacaagtagaaccgaacctgaaccgctttgtcgactctctctctctctcagtacctgtagtgaacaggcttgtaaggaccttcaacgggtatgctgacatagtcagattggtccttggtaagcttggtgagtcttgcaccaagcttgcctaagtgaagtgcagctaccttctcatccaagtgtttaggcaaaacatagaccttcttctcatacttcccgcttgacttctcgttccagagctcaagctgtgcaatcacctggttggtgaatgagcacgacatcacgaaactcgggtgtccagtggcgcatcccaagttcatcaaacgaccttcagctagaacaatgatgccagagttggtatcaggaaacacccacctatcggtctgtggcttgatggtaatacgtttcacaccagggtaggtctcaagtccaagcatgtcgatttcattgtcaaaatgaccaatgttacagacaatggcattgttcttcatcttcctcatgtgatcaaccataataatatctttgttaccagtagtggtacagaagatatcagcttctgagacaacatcctcaagggtcagaacttgaagaccttccataagagcctgaagagcacagattggatcaatctcagtcactatgacacgagcacccgcggttttcattgctgcagcacaaccttttcctacatcaccataaccacagataacagcaacctttccagcaatcataacatcagtagccctcatgagaccatcgggaagcgagtgtcggcatccgtacaagttgtcaaactataaagcaaacaaatcatcagtgaaacagagaaatgcagagcagaaacagagcaaaaaacagagttcttgcttccacctaaatggatccattaacaatatcattcacattttggtgatttcaaaacattgtattatccacaaattaggcaaaacaatatcagatctagtgtcttctaaagctataatgtgccacattaccttgctcttggtgacagagtcattgacgttaatggcagggaacaagagagctccagtctcctgcatctgataaagcctcttaacaccagtagtagtctcctcagagacaccaaccaatctctccttcatcttatggtacttcttgggatcaacttgaagaccgtctttgataatagacaggacgatctgaaactcgggattatcagtagaggtcgggtcagggaacgtaccattcttggcaaagatctcttcagctttaactccttcatggatcaacagtgtagcgtcaccaccgtcatcaacgatgagatcaggaccacctccaggaccccagtcaagagctctctccgtacaccaccaatattcttgaagagtctcacctttccaagcgaacaccgcggcggaatcacgagcaatagcggccgcggcgtggtcttgagtggagaagatgttgcaagaacaccatctgacttcagcacagagagcggttaacgtttcgattaaatccacgatttggatcgtcatgtggagagaaccggtgattcttgctcctttgagtggctaagatggtccgaattcggtaacgcaacattcaagtccaggcatttcgacttcggctagctcgatttcgagacgacagaagtcggcttgggacatgtccttgacattgtattcgcggccacttgaggttttctctgcaagcaaaacaaaatttgaataactttcttgatgtgtggatctgtgtgatgaaggaggagga

SEQ ID NO: 38249 - DNA, 1196 bp, Arabidopsis thaliana landsberg
aattccctaactattcttttttttttaacgaggggctgatacggtctaataggcctaaaatcaccaattcgtttgatcaaatgggttatttagaaaattttgtgtttgagaagagaatcgatctctggtgtaggcctaaagagcgactcgtgcttatacatagttgtgcatgtgtcaccaattgaacttctatgtatgctctagaaacaagtgatgatacatatgaacataagtattttccttaaattgggtatgaggaaatacatgtgctaaagggaacaccaaagacgatctcagtatacatcaaaacatgtcaaaagacaaattaaacattgaggatattagataagaccgggtaggagataaagaggccaatttagaggcatagatgatgtaaagtggtgtactttttgggaactgatgtcgtaaaaaccaaggccatatccaatgtaatatatatagttagggtttagaccaggatatttgcttgcctcaagacataatgtctcattgttgccaaagaaaatgcagagatcgccaatgtcttcagtgtaacccttttgtcaatgcaccaggtaaagaggacgaacttcttcggaagaagtcataggaaaggtgactctaccaattatttgcttctaaaccaaagcagatacatcgttagtttgatgctcattttagttttagatcctaattcttgaaaactagagattgctaacacaataaacctggaaaacctcgtcactctcggcttcataatcattgcctaatctgcgttctttttttaattctaactgaaattctattccttgattaaatcagtgttttaaatgttttagttgatgtaaaataaattgaagtatcaagaccaaaaaactattagcaaatagtacatagccacgaaaacaaagaataacacgaaaccaacataaaagttagcataaaatcataaattttatattgatccaactgaaaattatggccaaccaacactgctaaaatcgtttcgggatatatctaaaaaaactacgagtacatgggaaacaaacttagatttgaattcaaattttatatacctttttcccctataattacagcattgccaaattatgttccttagtttccgttaactaaaaaagtgcccttgaaacacaaggtatcttatattcttatctcaaaccccaatggcgcctgaa

SEQ ID NO: 38250 - DNA, 2542 bp, Arabidopsis thaliana landsberg
gaattacgctaatacctccaaattcccttagtaaattttagtttgtagtcacgttctctattcacatggccacgatctcttaaacttcaaagcatgcacatgagttaggtaatgtgtactgtacatatgataatgtagatgctgctgagtaatatcatcatcagtaaatgattaaaaataaggtaagtgactcaaaatctgattattatagcagcagtcaaagtaagatcacgttattagatcccaataactatttcttcaaacacacacaaatcttggtctataaagcaacacgctttagaagtctctagttatctaactcatatctctatccaagattgtctcagttactgtcacaagaacaagatacgagctttcaagaatcctaacggatttacaagaagagaaatcacaatgaagagatactgttcagtggctctggttctgttacttgtagctttctttagcagcaagtatagtgtagagggccgttctttgttaacgatgacacattcgagtcaagctgcgagagatttgcatgtaagcaaggagatgaagaaagagccacttaagggagaaaaagatagcttaagaagaatcccaaggggtggctcaaaccctatacagattgacaaggatcaggagaaagcatcagttagaggagaaaaagatagcttccgaagagtccctactcctactcctgcttcttcatcgcgtcacttgtctgcttctacttcggagatgtctgcttctgattccacttcttctcttcccgttactcttgactccatcaatcccaaggtcggtttctaattctctagctggtttattgcgtttttgaattgtgggtttcagggttgatctggatatgtttctaatttagtaaataagtttcaaatttttactgtggttgtctgatttaacgccaaaggtttatcctttgcttctcgttgtgattcccaacgatgaaatcgactagctttgcataacttctttgtactttatattacagagaagttggttttattgttaactaagagttttttttcttttccggggaacaggttatcaaatgtgagtatgctgttcgaggagaaattgtcaacattgctcaggtcagagatgcatgtgctttgtcttgtaaaaccaagaacaaaatctgtaaaattgtttttaatgctaattgatttttgtttgctttttgcttccatcttacagaagttacaagaagacttgaagactaataaggatgcttatccctttgatgaggtaaaatctctttctttatcggcagttttgacggatttatgattagtttagtgttgatgttacctgttctcaaactctttgtgcaaggaacttagaattcttcattacttttggcagataatctattgcaacattgggaatcctcaatctcttggtcagctgcctataaagttcttccgtgaggtaagtgaatgtttttggtactagtttggttgtcatatcagccacagagatataacgtctatcatctatatgcctcaggttctcgcattgtgtgaccacgcaagtcttttggatgagtctgaaacccatggtttgttcaggtgaggttttccttgctatatttcagctttaggacatgtatgctcacggtttaagattgcttaacatttgatttctactctgctatcagtaccgattcaattgaccgagcatggaggattttggaccatattcccggaagagcaactggggcttacagtcatagccaggtttgttattagagtctagttaaaagtcctaaaccctttcttgagatggatcttatgttgctgaatgtttcattttttgttctgcctcagggtatcaaggggttacgtgatgtaattgcagctggaatctgagcacgtgatggtttccctgctgatccaaaagatattttcttgactgatgggcgagtccagcggtacaatcaaacgaaaaacgttatctcatagagttaaagtagttcttttaaaggattcatgctaagtgtttttggtgttttttactctataggttcacatgatgatgcaacttctcttgagctcagagaaagatggtattctttgcccgattcctcagtatccattgtactcggcttcaattgcccttcatggtggatctttggtatgttcatataatcatcatggagtaatgttgttttttggtacaagtttttgaaatttgtacttcttaggttccgtactatcttgatgaagcaacaggatggggactggaaatatctgaccttaagaagcaactagaggaagctaggtccaagggcatctctgtaagggccttggttgtcataaaccccggtaacccaactgggcaggtacaaacagattttcaagactagcctaacaaaatgtaacattcttctaatcttgcgttcttattctggttaggttcttgcggaagaaaaccagcgtgacattgttaatttctgcaagcaagagggtttggttcttttagctgatgaagtctaccaagaaaatgtttacgtccctga

SEQ ID NO: 38251 - DNA, 2609 bp, Arabidopsis thaliana landsberg
  unsure (1)..(2609): unsure at all n locations
tatgttcttgagacaacaccctgtgccactgttgaggggaaaaaacatttgcagagttgatatactacatttttgaacattttgatttaagaagtttcacttacaagaagagggtttaaagaaacgagatatagttaaaaggacttacatttcacatcagagagttccttccatgtgaaatcaacagaaaacctttctttgtaatgtgggtcaattcttatgacgttagaaccattgtcaagcttcagatttggaaagcagattccaacaccatcctttgttagttgaagatcacaccatagcattacgtctggtgaagttgttatattcaccaactgatatgcttgaatactggaatctggaaacataccagagaatccgcctcgagcaatcacagccggaggtttccctaaagaaaacacatcaagaaactgtaaggaacatttatgaaaaattcacgtacataaaaagtgagagaactctgtctctaaccactcaatgtttgccaagaacttgagaaagcagtctgtaaaatgaagaacgtgatcagaatcagaaaaatcactctaggacacgccatggtagtggagagctttcagtgtttcttcttacttttttttttttttgctgaagatggagtgaagaataagtgaattattgaactcatgaactgtttagcaataatctacacaatctaccacgtcctaaaaatggaacaattagcttaaaacgtaatcagactctccagtagcattaattgtagtttttctatatttgtaagaagaatgtcactattctgaaaatggaataaaaagaacttatnttagctgtcacctcgttaagtagagcctagctactagcatgagaattttttccgaaaagcattttggggtctccataacatttctagcatgagaaaagcacattttctaaaactatgtgtcacctccattgatggaccttttagcttaagtttccctttacatcagagcacaaatccaacttctccaaaagaatcaccatcgcacagcttgagtctggtttctatactcttgcaaaagagtcttgcctttgttactgcatgaatcaagatatactttaaggagagaacaaacacattgaagattttttgttgtgatgacacaaggttacaaagaagttttgaggatcaacttctattttgttttacgatgtgctcatccccagatcccaagtgtgtatcgaaacggcagatatatctcaatatatatagtagtattgctcaaaacagtttgtggttacaaaaacacgatgacaagaaaacacaagaccatatgcagttctttgactaatacaagctattaaggcgttatgacaaccgcattgtgtacaccaaaaagaattctaatcgacaaattcaacaacggatagtatcatctgcatgtagcagaaccatcattcagcttttgctgggaatttattgccaccagtagcgatcttgtatacgtaaaaacaggtcatgagagcactgcaatacagatatggttctagagttaagtcaatggtgtaaaaacttaaaaataccaaatcttgatgcaaacaaagatactagccagccagtgttgaaggatttttacctgatcccagcaaccaaaccacccggcataatctttccagtcagcaagtaacgctgtcccatgactagtgtgagagcagctgcgatgactgtatcgaaaaaaaaaagaaacattcagatgagtttcagtcaccatagataatgaaaatcgattttgcaagcttgttatatctttgaggttggttctattgtcaatcaatggcaagaacactaattaaaaacagctactcaactacaacatctaacaactcaaattgaatgttcatctgcagtaaaacagcatcttgtccaagagagacactattacattagtggaaaaaattagcaaaccaattcaaatactgctgcaattgaagatccaaacacaaccaaaatattaattttttttatctttgaatagcaagtttagcatcatcacacaaatcacttattcagatccagatcgttagtggtccaataagatccttaaccttataacataacctatcatcaactctcaagctaagttcatgatccaacacattgaaccataacaaattgaaaacaaaatgaaacaattccttggctcaagtgataagtcactaaaagctattcacatcttgtaattgaaagtcttccctatggacatctaacggaatcatacgaataaatcttcctaaacataaatatctgttaaagacatataaacccagatcgctaaaaaggaaagaaatttgcaagaaaaaaacctgtctgaagaaccatagcaatagtggaattcttcttcttctcaaaagctttgagactgatataaccagcgagaatgagtaataatccagtgcctgcacctccggcgaaagatgttatacttcctttcttcatgtacccgataaatcctccgtcgatgagaagcatcccgtacgggatagtgaagctaaatcatgcattcttctcgtctggggttcgatatttttaccggtgatgaagaaaattgtaagagcgatcgcaatcgatg

SEQ ID NO: 38252 - DNA, 3274 bp, Arabidopsis thaliana landsberg
  unsure (1)..(3274): unsure at all n locations
atctcacgtgtttgctattacattgcagcctttgtgactttacctgtggatccaaatcatgctccagatcactttgtgatttctcagttcagtttgtttcctttgggttctgctctatatagtctcataatgttgtacaaaagttctcttgattccctgaataaacttctcaaggagcctttaccagtcaaccgatttagaccaagtaagttccaatgaaagtcgtagttagtctcttcaaagctattattgctttcaaacaacaatttataaattctgttactgggaaatgtgatcattattagtggacattgagataaattaaccaagaaaaaaaaatcgaatcagacagatttagagccaaagaggaaaccaaagggaaggatgatgtaatcataaccaatgaattattcgactattgattaggcgttctgatcttatatatgtgacaattttagctaaaccaatagagtcatagagctaaaaatacaaaataaattagacaagaatacaaaatagttaggccaatagagtgatggagcctgttagctaggaattcatacttgttctgatgcttgttcttcaaagacttggagagatcactagatgtatgccagcattgttatggttacgatatttcagtcttgttgtaaagggattgagttgagttgcagcattgcatcgttaacactaagatcctctacataatctacaaaggcgttgcaagctatgcgatcaggattagctccaagaccttggatttcaacactttggacttggatgagagttcctttccggattgaagtagaaaacataaaacggattagacgcaaatttcatgaacaaaacaatgtcaccggtagcaatcatcccaacaacggaaagattatgcgtaaccttaaccttaacatatgtcgaccattcatctttctcaacatcctctagaactcgcatacataacttaacgggaaatccaacacgataagcatacttcaacttaaccccacataatttccccttatagtttatcaatccattaaattcagaacgacattttgtgtcaacgagcttaaatttctcatatctaacatcaaaacaaactatcacataatttccatcagaattcatagctgagtaatacaaaactccattgatacaaatccttgtccacaaaggctcatgggtaaaaggacattggatcgtcctccatttaaattccccagttcccaatgtcagaatataatgatctagatccttggaagctatataatcaggagtagtcatgaacaataccttgaattccttatcaactggatcaaaccctaaatagctatacgaatcacctactctaagttcaggtaagatcacatactttcctgtgagagggtcacataacacatgctttgcatcctcatcctcctttcggatgcacataccatcaaaataaatcaaaccagaggcataactacaagaataattgcttatgcctttagaaaacttcatatggaaatcggcaggggacatcctattctcacatggattctgagactgaggcgttgagtaaaacctccactcaccgtcttgttgtacaccaattaagagacgtggacgagccttggaccttgctagaaacaactcggtgaaaacttgatggcgaaggatggatctccgtagctttgacacgcaactacacctcgcaactgattttgctggcagtctcaagagtatctcgtaaacgagatcatcattcggaaacgaattcatcattaccagtatgtgaaaactcctaaacagttcgacctaagtagatgctgttaggggaggtgggtttttaaattaaacctagttaagcccaagaagcatacgggctttttaccatcaacatttatattaactttttactttttattcagttttgatcgaaaacgtgatggacttaatattaccaaaaagaaggtcatgaagtacctatgaattagtttcttgaaaaggttttagagaaaacaaattaaagaatcagaagtgtccaattctttcgcatcatgattttgatgtgtttctttagttttaagtaaagcataaatgtttcattgttagttagtgaagtggattgttcatcaaatcttaagagaaaatgaagtacaaacttctaatcaatctccatgtttcactgatatcttcattcatctattcatatatgactctcgttagtacttaataagtgttcttttagaacatacaaaaatctggaattcgaatttcgttacttaaccacctaagctaaagtgttttattgtaatttttcacaaacgcatatacttatttggaaaaacagctaattatcccacaaacttagagtatatataatttaactaaattgaacccaaaaaaaaaaaacagtataactacatgagcttttaattaagatttcaatttcctacacgaacagtttagatcgcgttaaaaccatcaattcggcaaacaaagttactgttccattaacagatactaactgtgccgcatttacaactgaagaatgccacaaccacaaaataatgtcgtttatgaaaaaactgttgattcctccacgaacttagttgttttagcatatttaaacataaaactttctcttgtacctataactacctgaacttaactaaaatttaaatttaaatttcttacataaacaattcgaatcttgctaaaaccaaaatattcggcaaacagtgttaacagattctgactaaaatgtcgcgtttacaatctaaaatgtcacgtggaaccactaaattatgagttagtaaagcagtaatttatatttaaaaatcttacataaaaaaaacaatgttggagattgagtcttaattttatgattaactcaccaaattgttgactttttttcttcactaactgaacaagctaacaaaaatactattggttagaactactaatcattgtcgttttccccattcaagaaacactaattatttatttttttgtttcgttgtttaaggataaccattttaatttggccattataaggtaccaacgattaatcaagaaaggaactgggattggaggttaagagccgattgaaactcttgagaaattttcaaagatttacaaactgttaggcattttcacgaatgtgtccacacgtgacaaaaatagctaggtcaaccgaatgatatagctagaaaaaaagaaatgtnacaaaaaaaaacaaacaaaagaagacaaaataactaagccaccagagtagtagatgttagag

SEQ ID NO: 38253 - DNA, 5202 bp, Arabidopsis thaliana landsberg
gcgtcacttcaaagagaggaaatttacacttagtagcccttaatgtttcttatgtaacatgttaccccagtagtatatgtttgttactttactttaaccgagggtgatagtcaagttatgaaatatctgagggcttaaaatggaaataagtaagaagttttggggtgttcttaaaatgaaaaatctaaagaacaaaatcattggttaaattcctctgaaaatccaaaagaattaaagatgacagttcttcttcctcaactaaaccatatccacaagccaccagtagtactaaaccgacgcctccgaaaaccatacagattaacagtgatctcagccgtgtctggtaaggagctgatactttccggtaaggtccgggcggtggagccgaaagaagccaagactgttgtggcgtcggaaggatacatgctcttagacgtgaggccggcttgggaaagagaaaaggcacgtgtgaaaggttccttacacgtgccactgttcatggaagatccagacaatgggccgatcacgttgctgaagaaatggattcatttgggatatattgggctttggacgggccagagattcaccatgatcaatgacgaattcgccctccgtgttgtggaggctgtcccggacaaagagagtaaagtgctcgtcgtgtgcggtgaaggactcaggtaccagctttagatgttgcatattggttaatcattgccagttttagtccagaatttagagaaacttatcaaactaaataaatattaatcaatcgattggatcaaagaatcttttggtttggatagtataaattaaactgaactctttggttcggtttggttgttataaatggtgtttctcttcaatctcattctcaggtcgttggcggctgtatcaaagctccacggagaagggtacaaaagcttagggtggttaaccggagggtttaaccgagtatccgagggagattttccagagatcgaagggaccgaagagcttcggttcgccacgataggaggtgtatcattttatttactcaaactacttgtactgttaccgtcttttggccagaagagtcgttaaattggttttttggagccaagtgtgaagacatttttgtttttaaaattcgtgtccggtttacacaattgatcactggtttattacttacagatgtctttcattagttgaaatattttgtccggaatcatttgcttcggacagctaatctccaaacctagtaacaatttacgtttacacccaaagccattatgcacgagagcaattgatgagggtagcttcgtaatttacaagaacgttcattccatcccagtcctctttcttcttccctcgtctggttttcgagagggaaaaaaagaaagaaatccagatctactaaaatccccaaattcaattttcaaatttgaactccgagaaaccctagcttttctattgggttgccacatcttccaaatcgttacgggatcgaaacctctcgaattggggaccttgtacattgcacacgatgggcgatttcaacctcgctctcgtgattgtcgcgatcgttgtttgcgtcatcgtcttcatctccagcatctatcttctcgtcaactatcagcatccagatgatgcaaaccaggcttatttccccaaatttgtcgttgtttttggcctttctattgctatgatctcgattctcatgttaccggcggatgtcgccaatcggcatgcttgtcgacatgctatatacaatggagcttgcaatctcaccttgcccatgaaggatctttggcttgctatttatatcgtggacgctattctcgtgttctttgttatccccttcgcaatgtttttctatgaaggcgaccaggacaagttcgtaacttgatgaaattttagtatctctatgttgtacgttttgagttaatcgaatactggtgacagtttgtggactttttttctttcgttttttcacaggactcttagaaaaaggataaaaagtgccttaatttgggtagttaccacggctgttgtttgtgctctggtgcttggaattttatatggttagttgttcctctgttttcaattcttttgtcgagttgaaattcagcgtctttctgtattgacgaatgacgatagtctggaggttatacttgtttagctggagtggttattgaatccatcagtgagcatgtggcaaggatgaatctgatgttggtctctatgatttgactgcattcttatgttaattttggcttttaaattacccaatcagggcttgggttgagatatctatcttatccatttatatgctaggaataccttaacattattggtaacatcttcatcatgtaggtgtcattggaaaggtggacttctcggtcaggcatttggcttctgccacatccactttccctacttcctggcagttttcaaatactcaaccatgcataggtaacaccgctcgccaggtatgtttgcctcttgaatgtagcattagcattagtttttatatcatgagtcatttatgccgtagagagtttcagcatttaacatattcctgtctctggctaatcaatgcagtgctcagcatttacagctaatcccacatctgagaaaacatggactatgcgtactacttttccagaatatgttgttgctcttgcgacaattgttgggtcagttcttttcacggtatgaccattgttctatcatgttgggaagtgcattgtttgctttgaaaggatttaatctgtcttatatagttgattcttcattgactaacacaaactctcaacaaatgagatgcatggcaagatataattctgtatccattgaagtaaatagatgtttgatttatacatttcagtaaaaaaaatctgataactaattgttctctcaaatatttctagatatttggtggtgttggtattgcatgtctaccattaggacttatcactgcattcatcaggcgaccaaaggctgttatcactcgatcacaatatataaaggtctggttattgttatcctctggaagcatctctctagatcttgagtcaatcccactgtctcttgcatggttaactccataaatattttacaggaagccaccgaactaggtaaaaaggcaagagaactaaagaaagcagctgatggacttcatcaggaagaaagaagtggtgctaagggcaggaaatggcggaaaaatgtgaaagcagttgaaaaggtacctcatatatctcaaggttcagtatcttatttaaattttgtttcataagtagcaacttggaaagtttgcctattcatactggtcccttgtgtgtaaagaggctttggtcgtctgtggagttatgagaatgacaacttgtagtgaaaagctagtgagatagtagaattggttattgactttattggtagcttttctttgcttggttgtggatttaagctgtgtcccctcaatcctataattgaatgtggtaaccctgcaggagttgctccaattggaggaagatgtgaacctcttagaagagatgtatcctcaaggagagcaggtaagacgagtgtatcttagaacttaatctataatctttttcttgttcaactattttattccctggtacctttttccaggcagaaactgcatgggctttcactgtgcttggatacttggccaagtttattcttggaatcttagggttagtacatctaagcagaaaacctcctttgcattttttttgttacatgttgtataaattatgcatgatgcatacagttcttgcatatttaggtttgcactcttaagctcccgagctaagcgtctttttaaatggcaaagttttaatgtctttgtagattgatcgtttccattgcttgggttgcacacatcatcatatatctactcgtcgaccctcctctctccccttttcttaacgaggttttcattaagcttgatgatgtttggggtaagttcatacttttgttcttgttatcctgtataaggattcttctttgcttctaactgactccatgctggtacgtgtggaaatctccacgtcttttaggcactgctgcctatgctttcttctgtttctaccttctacttgctgttatcgctggggcaatgatgctgcgtctgaagctggtcttcattaccattcatccaatgaagtaatccatctaaccggtttcaacattatttggctactttccaaggtcattcattaccttttcttgattgctgattggccatatcaccttatttcagatggggagctactctaatgaactctttcctctttaatgcagggctcattcttctttgttcaatcaggtaagtctctatggtctcttcttctgcatttgtatttgttgggatcaagtgcactctgatagacggatctagatcaagcatgtttatgtgcatacattaacttatcaatgttttcatgccatcactaaagctactttcctttccggtgaatgcctgaatcgaagtttatagtctctagactcacgcccttcggtatcctttgtactctattggatgtcaaaccaagacttgtaatataaagctgcgaccctcacaattacatgttaatccacacagtctgagtaatgtggttcatttaaaatgcagtgtgattcaattttgtgccactgcatttggatattacgctcaagccactgctgcccaggagatatttggtcacacattgcagtcccttagaggaattaagtacctttacaagtaagtataaatggtataacatatagcagtcgtatgctatatccgtgatgcgtcttattgaggttttatatttcaggtacaatgtgttccaaatcgggtttgttatcctggctggactgactttcctatattacattgcctttgtaagtcctggttgatgttactcctcgggttttctcttctgtattaagtatttgtagaatcatatggtctttggtgttttggcagggatggagaagaaaaaaacctagtggccgtttccagctctcttcttaatgtaaaacgttttcacggggatctgattgagtgctgtcgacaaagtttctacttgtttctggatcatcatcgattccagaagtatctagagactctgcttctgaggtttattttcctgaatgtattattaaatttcttgtgagtgtgctgtttggttgcgcaacagttagctgtcctgtctt

SEQ ID NO: 38254 - DNA, 5770 bp, Arabidopsis thaliana landsberg
cgagaaccctaatctgtcatttctgaatcctaatcttctccttctataaccctaacttcctagccattttctccaattctaaccctaatggcgccgagaacaatgcctcctctaaagaagaggaagagaggagtagccggaggaacaaagccaatagatgctgtcacgaaggcaacgaaggagcctccgacaacgacggagaagccatcagcgacggagcaaaatctggtcgcaattgagggaggaagagttgaagaagaaccaattccgaccataatcccgaccgtagtggaagaaggagagcagtctgacaacaatgagaaagaaaattctaagaaggatgagaaagaagagagtgatgaagaagagaaagaagaagaagagaaagaagaagaggagaaagaagaagaggtttaccggaggatagtcctccgatgatagtagtaaaccttgggcgaagaaacctcgtccgatgagaatatggatgatgagactacagtggaaaatcaagtagaaattccggcagcaatgataagtatttctcaagtatttgaatggtatgaaactagtagaacaggataatactatgatttctggagaatactgtcattactaggatataactatgtgtatgaattttgggtaacattggtagtactaagatagaactatgtgtatgatttttggataatactatcattactaggatataactatgcgtttctgggtaatactgtcattacttgaaaacaactacgtgtatgattcaaggtaatactgtcagtactaggatataactatgtgtatgattctaggtaacatcggtagtaatatgaatgaatatctgttgaaggagatcgacgaggaaatagaagcaatactgataagtgtgtattttgcatgttttgagcatccatttgtcatcactttagcatcatatcatcactgttttataccatttctcatcatttgtcatcactttacatgtttaggataggtttgcatgcattttgcatatttgtgttgatttcaggtgatttggagctgttaacgagctaactggaagaagcggacctaatcatgacaaaccactcgacctagaggtcgagtaggagcttcaagatctcaagagaccactcgacccccaggtcgaggagaagacatcaccacttcacttcaccactcgaccacgaggtcgagtgccctcatctccatcaccagaccatcactcgatcacatcactcgaccacgaggtcgagtgccctcatctccatcatcagaccaccactcgacctcatcactccacctggaagtcgagtatcactttcaccaccactcgactacaccctcgatggcaagcttgagagtcttcttcattccgcactcaaccagacactcgagcacaaggaagaaaagaagactccagctattcactcgacctctcactcgaccacctgggtcgagtacagtttttaatccgtctcaatactgcgtcgttttgagtattagggtttcggtatattttggctataagtagcatgtacttcacattttcgcaaaaaaggtttcatctagttttattccgcagacactgtgttctagaccttttgtaatccggatttctctttatctattcagtattcagcatttgcttttgatttcgtttactgttgttcatcctgttatcatcttgctattactctgttgtcatcatgttttcattctattcaacgtttatgctttctgtggatgggttagagtagtgtagaattctcagtatgctaggtggttgagtttgattgatagatcccttctggattagttgttcttaatgcctattgctttctaatcaactgaaatttgagcccagacatttccgcgcccaaaaggtgttcgatgaaatgtctgaaccactaattccagagattcttggccctgtaccaaggtattggttgtaggaagcgttttggctttaacttgttgattcgtaatgcttgttaggttaggtctcgtcatggtgactgagtctgggattaggttaacttgagggtctctgttgcggtgacccttagatttggttaatgaacttgttgtctagggataattattgagcatgtcaatcacctgtaaattgaggaaacaaaactactcaattacccatcctcgggaattctttatctgattgaatttattgtttactctactattgttactgcatcttgtcatctgttgcttagtttctgcaattctttcttgttactcgacatgatactcgaccacccagttgtctggcaacaaactgtgcagtcgagtatccctgttttgtttactgcctgttactcgaccaagtcactcgaccacacccaatgttctgcaatgagctgtgttggtcgagtgttttattatttctgttttttgcatgttcacttaggacagctagaacacaccaaaaccaattattgcttggcttgacttagtgacttctgatcacatcttgattgttagcatcacacccatttggattgacaacctaaaatactacaacgacatgattggtgttttaggataattgactaaaaacctattatcaatatttgataaatatttcatttccttttataaagattcactttctatatctaggaattctaaataatttagaaataaaattctaaattggtttagaatatgaatcctaaaagagagttaacgttttctactgttttcagaaactatagaaattcgtagaatacaatttcacacataaattagaacatgaaggtaattgataataggtttttaggatcaattatcctaaaacaccaatcatatcgttgtagtattttaggttgtcaatccaaatgggtgtgatgctaacaatcaagatgtgatcagaagtcactaagtcaagccaagcaataacaggttttggtgtgttctagcagtcctaagtgaacatgcagaaaacataaattcaagcaaaaacaaataaacactcgaccaacacaactcgttgcagagcactgggtgaggtactcgactgcacagtctgttgccagacaactgggtggtcgagtatcaggtcgagtaacaggaaagaattgcagaaactaagcgacagatgacaagatgcagtaaacaacagtagagtaaacaaagaattcaatcagataaagaattcccgaggatggggtaattgagtagtttcgtttcctcagtttacaggtgattgacatgctcaataaattaaccctagacaacaagttcattaacctaatctaagtgccaccgcaacagagactctcaagttaacctagtcccagactcaatcaccattgacgagagctaacctaacaggcattacgaatcaacaagttaaaggcaaaacgctccctgcaaccaataccttggtacaaggtcacgaaactctgtaattagtggttcagacatttcatcgaacaccttttgggcgcggaaatgtcttggctcaaattccagttgattggaaagcaataggcattaagaacaactaatccagaagggatctatcaatcaatactcaatcacctagcatactgagaattctacactactctaacccatcctcagaaacctattcactactcagacataataacagaaagcataaacgttgaacaagttgaaaacatgataacaacagtataacagcaggatgataacagaatgaacaagaataaacgaaatcaagaacaaaagctgaatactgaatgctgaatagataaagagaaatccggattacaaaaaggtttagaacacaaggtctgcggaaataaaactagataaaaaacttctttgcgaaaatgtgaagtacatgctacttatagccaaaatattctgaaaccctaatacttaaaacgacacagtattgggacagattaagaactgtactcgacccaggtggtcgagtgggaggtcgagtgacgagccaaagtcttcatctcttccttatgctcgagtgtcttgttgagtgcagaatgaagaaaactctgaagcttgccatcgagtatgtagtcgagtggtggtgatggtgatactcgacatccaggtggagtgatgaggtcgagtgagtgatgatgaggggactcgaccacgaggtcgagtgtgcgatcgagtgattgatgatggtgatgctcgacaactggatcgagtgatggtgagaaatggtgatggctgctactcgacctcggggtcgagtggttgtgagaagtggtgagtcttctactcgacctaagggtcgagtggtggatagagtgtcgtggtcaagtgatcagctgtagaggttgtggcgagtacttcaaaaagtccatgatgacactactcgagctcatggtcgagtatgttgattggttcaggtccacttcttccaattagttcaccatcagctccaattcacctgaaaacaacacaaatatgcaatatgcatgcaaaactatcctaaacatgcaatgtgatgacaaatgttgcgaaatggtatgaaacagtggtgataggatgctaaagtgatgagaaatggatgcctaagacaagtaaaatgcagacttatcaatgtcaaactcctttatacccaagttgtgcaaaccatagcaagctttctacaattgtgtcactgtataaaataaagacacaaaatgggtggtcagacaaaagcttcaatgatcttcagaagactttaccaaacattttactagaagataatgttctatatacatcaatgtatgatgtgaagaagttcctgaaatcttttgatataggttattaaaagatattcatgcttgtattaataattattatctattcatgaaaaggctgaagaagcttgacgcatgtcctaaatgcatagcttctagatggaagatggaagataaacatgcacactggtcaaaaaaagaaaaatgtttcaccgaaaaattctaaggtactttccaattatacccatctaaagagaatgtttaggtctgagcaacaagccaatgacctaaggtgccatttcagtaataagacggaaatgtttttcaccctgtagattatgtgactcggaagcaagtaaatgccaaataccctacttttgctgcattaaaaaagaacatataactagttaattataatattactcgagacctgtgtatgaaagaagaaaacataatgctgctaatgcttaccttgttgatttctggctgcattaacctggtaatatcattgatgtttagttataacccgtgaaagaggatcttatccagttgtggagcaacggaaagttaacatatgatgcctacagtaagagtactttcaaccctaaagcaatgctcctatggactatcaatgatttccctctatatggaaatcttgtagtatgcaaagtaaaaggtaagatgggttgtcctttacgtagaaaaaattgacaatatgtggttatgtaaaggtagaaagcatgttgatatgtgtcatcgcaatggtctaccaccaaatcacagttatcaggggaagaaaacatggtttgattgaaaatttgaacatgagagtaaggttaaaatattaactagtcataatatatatgtcctcttaaaaaaaattcaaaattgattttgggaataggaaagagacagagaagaagagagctaggactgaaactgtaattgagacagcctcatgtgatgaaaaagaagaaagtgaatgagatgaagaggaagaggaagaggaagaaaacgacgaggaagtccatcaaggttga

SEQ ID NO: 38255 - DNA, 1760 bp, Arabidopsis thaliana landsberg
cgcagatggatttaaaagatttggggtccaaagcccatgtttcatttgtttcggcccataaattgtcctaaaaaataacaaattggttatttatcgaatgcacagttgttttgaatttaaaaatttgtagttgacgaaccggaccaaaccaaaacaaaccatgtagtttgaataaataaaaagaaagcaattttccggttaacaaaaaatctcaaactcagtgagtgagtcaccgaaaacctcttgtagtagattcgtgacgggtttgatcatctcttcgaggtcggttctagggtttcactacgagaatggacggagatgagctcaccgagcaggaaactgctctttatgaccgtcaaattagggtatggggagctggtgctcaaagaaggtacttcacattgaatctaacttctatggcttcaagcaacaacaagttattgattttccgtttgagtactaataaactcttcttgttgggctatactcggtgaaagtttatctctttctgggttttaagcttttttagctgtttaaattttgattagggcttctatgaattttggtttgtgtttttgcttgcagattgagtaaatctcatgttttggtatctggaattaagggcactgttgctgaggtacctcttactttatgattttttcgttatttagtgattctctattagctatgttgcagtagagtgttggcatcttacttggtttcctccatttggtgttgcagttttgtaagaacattgtgttggcaggagtaggtagtgtgactctgttggatgatcgattggttacaacggaagtcttcaacgcaaacttcttgattcttcctgatgaaaatgcttatgtaggcaaaaccgtagctgagatttgttgtgattcacttaaggattttaaccctatggttcatgtttcaatagagaaaggttactcctcctttcttcatttctctctaattttagtagaaacaaatgattttagtaacatcgagtctatgtcttcaatttcaggtgatttgtcaacacttggtgttgattttttcgagaagtttgatgttgtggttatcggctacagttctcgtgctactaaggtactgttgatacctccttcttttagttgttccagttgtttttgtcttttgttgccatgtagattgatcacttgaaataatgtgctttgttatgcagaaagcagttaatgaaaagtgtaggaacctagcaaaacgtgtagcgttctatacagttgattgtagaggctcatgtggcgaaatatttgtcgaccttcagaattataagtacacaaaggtactcatctcgtttttttcttttgacggttgtatatcacatgcctttcttttggcatataatgtgttaactttctttctctattgtcaattttggcttcatagaaaaagcttgatgaaacagtggaatgtaaactaacatttccaagttttgaggtacaacaaacttaacttcttactttcctggaacatactttcgcatgaaaagtaatagaaattcaatctattaactggtcttatttctccaggagaacagtttcagtaccgtggaaaccgatgccaaggagaacagcaaagctctactttgcaatgagaggtctggctaacactaacagctaaccttttgaaagcttggtttcttcctacgtaactaatccggttttgtgatattcttgcagtgatagaactatttgaggaaactgaaggacgtaaacatggggaatgtt

SEQ ID NO: 38256 - DNA, 2551 bp, Arabidopsis thaliana landsberg
agaaatagtttctgcaaaagtttagggagtgcaaagttctagtcttgggttacatttctggggacttgttggtatcttttgaatcgcgaatcttctgagtgaaatttcctcattctttgaatagaaagaagaacatcttcaaattggcgcagggggagtacatagctccagagaaaattgaaaacgtctatgccaaatgcaaatttgtgggccagtgcttcatatatggtatagtaaacaatttagcattttgctttttcctttccccatctcacctgttaccaattttcaggtgatagctttaattcatcattggtagctgttgtatcggttgatccagatgtgctgaaaagctgggctgcttcagaaggcattaaggtgatataacttacttcaccaaattctctaaatgtaacattagaaaactaactttataccactttgctgaatgtagggaggagatctgagagaattgtgtaataatccgagagtgaaagcagcagtactatctgacatggacactgttggaagagaagctcaggcaatacatctcagaaaacaaatttctttatatcatcagttagttactattctcaaaaacatgatgattgatttggatgataaaaatgtttggtgcagttgagaggctttgagtttgcaaaggctgtgacattggtgctggaaccatttactctggaaaatggcttgttgactccgacgttcaaggtaaatttcttatatgaatatacttcattcaaactagctttaaaaggtaaattctatcttagtcagtggaaaggtttgttcgacatggttatatgttcagatcgatttactcaaattgaaaacgcctagttccactcctataattagtgtggtttagtaaagatcatgctgtctctcttttaaaatcggtaaaaaaaaaaagcatatctggattggatgtgggataattagcaaaaccaattgtgaaaatggattgaggcaaaaggatttgattgaatattgcagattaagagaccacaagcaaaggaatatttcgcagaagcaataacaaacatgtacaaggagcttggtgcttctgatccctctgctaatagaggtttgtgatgatggtataatcgtgtgattaataaaaagcctacgcaaaagttgtttctcccacaaattgtattcttttttgttttcttgctacatatttattgaatagtaaaggtaataaaggtgctacattacattaatgaaactttcttacagtacagtacaatgttttccctgtgtaataaaaaggcaaaaacattcccaattctgttttattgcggattcttcggcctaccacgaaacgacgatctctgtccttacgctgatgcctgatatctatatgacaatctctttatgttcgtatccaaaacccgaaactacacatgcaaatagattatgtgctttggataaaaagccaatcgtaaatggttaaatgtattcgatttcggagttttttcgggtttaggtattggaacaatcaactttaaaggaactatagtctgcgtagctttagttcagtaatattttagcttggtcttgattttacatatgtattaacgtataattaggtaaatccgacttttgttcaaaaaaaaaaacctaaatccgaccatgtctggattaaaaaataatacgaaaaggttaaaagaaaggcaaaatgtcaaatttcatagagaaatataaaaagatgtgatatgattgaatcattttctgaaatatatcttccgtaaaatctgcttttataatacagaaattaattttatatctctaagcactcacaacttggttaagtttttggttgaatcgatttgaataaccaggttaaatacccttgagccagatgtgttggtgggacttggtacagaaagatttgactgtgtaaccaacaataataggaaagtgaaagatgaagaaagagatttgagatccaaaaacatttcacagagcatacaaaacccgtgtatcttgccgatgctatttcgaaaaacaatcccatttttagacaagtctgaatctcacagtttggtcatgtgattctgacatgtcttttatcacttataaatacgtgatctccttcatcttattatccaacagggtctgtcattttcaagcagggtctctgtctccttcagcttccttcatgtttcatctttagcttacacagacacacactcacacacatatacaaacacttatatatttgacatatatatactgagttaatttgcgtggtggtgtctgctcgagatttagttaaacatggctgttgttgtgtctaatgccaatgctccggcctttgaggccaagatgactgtctatgtattcatctgcgttatgattgccgctgtaggcggtttgatcttcggttacgacatcggaatttccggttacttctctttctctgtaccagatttcattttacttgcatttcaagaaaaggtcttaacttgtatctcaagttaactgttttggtttgctttgagctaatgttactgatctgtgaattaaa

SEQ ID NO: 38257 - DNA, 4590 bp, Arabidopsis thaliana landsberg
actgttctgcagttattatgcttctagtctctaatctgtacacaaggtttcccctctcaagattgttcacaaggtatgtaaagacagtatctaaaacatcttgttcgcgaaaggacgacactttgcgggtaattgattagttaattttcccaattctatcttatgtcagaagctactatataatcctagctattattgatgttgacataacataggataacgcgccacaccgtcaatctgggagacagctccttttcctggtcacaacttttaggcagattatggctataaagaggtaatttctatgcactactactactggtttcttgatttttatacagtaatgcttataaacatatgacatggtgatttgagaaatgaaaaccttttcggagaaaaaattatccactagcagcaaagaaatggcaaaatgaaagagtcaacggatcaattttttaatacctttgattcttaatcagtaaatacatcactaatgtttttaaaacttacataaaacaccctttgtcaactcaactatctgtttgtataagttcttattaaagcttctcttgatatcatgagcaacttccaattccacaagataattatatcatacaaaaacctgtcactacatactatatttctgaacaagtcaagatggttccgagtttttcctgattttctctgaataagtcaagatggttcatttctatacaaattctcctcattagtaaaaaactcttatctttaaagataaattaaagaagaaaatgttgtagtctctgtgtccctatgtataaagatatgttttgacgtttactccccaaaagagtaaaaaaattggcaacttggttataagaattaaactaatggtaacggttggaggtggatatggttgaagttatgtcaattgtgttctctgttttatatgtaagtttagaatttttcataagaagagaaaaagtaagcagtaacttgcaggaacagagaataagtcagctattctgattttattcctccaatccaatgggggaagagagttgaacaaaccgttagttgccttttaaccgcgtccacactcatttaaatatggccacaaaaccaccaactaggggttattgatagttacattatgagtttttttcaagtcattgttgcttcaacttcatttatagagtgctccttcaactatgtaatttacagactttttctcagcgtttcaaggtcatctctaggctagataaatagtgatctttattgaaaccaaagcagaaactaagatgaaagagatgatgggtgtagttggaatcattctggtgttgtcttcttgttgcttgtctttgctggatgcccaagagattactcatcccactgatggtacggtcctttagatttctctgagcaccatctatgtatgaacagtgataagtgatgctaatgagggttttttgttgttgcagttagtgctctgcagtatgttcaccgcaaactaaaggaccctctgaatcatcttcaagactggaaaaagacggatccatgcgcctctaattggaccggagtcatctgcatccctgatccttctgatggctttcttcatgttaaagaattgtatgttcggactttaaaactttcttctattgttactcaaaagcaaaccttaaggatgtcatatggtttgatgaaatgatgcaggcggttgctaaacatgaacctgactggacaactggcacctgaactcggcttactatcaaatctcaccatattgtatgttctgtgttttggtctgtactatggtttttttaaatcaaactatatatatcaacgtctctcctttttatattttctgatcacaggaacttcatgtggaacgatctcaccggtcagattccaccagaactaggaaacttgactcatctcatcttcttgtaagtagtcttgatcattgtttcatcaatatttcctcttcatggatgcataacttaacagatttatgttcttctcttttgtcaggctattaagtggaaatcaactgacaggatctttgcctcaagaactcggttctctttccaatctcttgatccttcagatagactacaatgaaattagcggaaaacttccaacgtccttggcaaatttgaaaaaactgaagcatttgtgagatctccttctctcatacgtctcttatctcttccttactcaaacccttctgacataacttttacattctttgctagtcacatgaacaataactcaatcacgggtcagattccgcccgagtactctacattaaccaatgttctgcacttgtaagtttcttggttacctttaagtctgtttatcttattcaaatctgatcatcaaggctcaacttgtgaagcttgatggacaataacaagctaactggtaatcttccaccggagctcgctcagatgccaagctggagaattctgtaagtgtcttcaacttcttatcgaagacgactaactttcttccacattcaaattagtttgcttcatcatttacagacaattggacggtagcaactttgatggcacagagatcccatcttcttacggatcgataccaaatctcgtcaaattgtaagaaactgaacatagtaaaatcttatgttttccctgtgccgtactgattttgtgtctcacgcattaacaggagtctcagaaactgcaatctagaaggaccaattcctgatttgagcaaatcaccggttctctattacttgtgagtcactataacaagaaaacccccttaacaatccatgttacattagtctctgaggcttttttttactcttcatgcttcagagatatttcttccaacaaactcacaggagaaattcccaagaacaagttctctgcaaacatcacaactatgtaagtgccatggccaagaaatggaatacaattgatatgtcgttacatttttgttgacaaacatgtctgcatttgtttattgtatgcagaaacttgtacaacaatttgctcaccggatccattccttcaaatttttcaggccttccacggttacagagactgtaattatactctcttttgctcttctttttttttcttagttaaacaaaggagaaatgctgttttagagaaagaaaacaaatttgtcttaaattttcaggcaagtgcagaacaacaaattaagtggggagattcctgtgatatgggaaaataggatcttgaaggcagaggaaaagcttatcttgtaagacacgtcatatctacaaaacactagagaaacacttagtaattgtttattgacttttggttggaacaacttgcagggacttgaggaacaacatgttttcaaatgtgtcaagtgttcttctaaaccctccctccaatgtcacagtcaagtaagattatgttttgaaaaagaacaaaagattaataatttggaatgttggatagagaaatgagcgaactctgttttgatgagcaggctttacggaaacccggtttgtgcaaatgttaatgcgggaaagttagctgatctctgtggtatctcaacgttagaagtggaatctcccgcaacttcttcggaaaccatctcgacgggagactgcaaacgtcagtcgtgccccgtaagcgaaaactatgactacgtgattgggtctccagttgcatgtttctgcgctgcaccacttggcattgatcttcggcttaggagtccaagtttctcggactttcgaccttacaaagtctcctacatgctcgatgtagcatccccgaaaaatctcgggataaacccgtatcagatatctattgatacatttgcatggcagtcgggtccaaggctattcatgaacatgaagattttccctgagtacagtgaattaaacagtaaattcaacagcacagaggttcaacgtattgtggacttctttgcaactttcactctgaatactgatgattctcttggcccttatgagattattagtatcaacactggtgcttacaaagacggtaatacacatatcttctactcatctttgtgcatcaaaagagtatttatttatgttactcctgtatatgcagttactatcatattcccgaaaaagtcggggatgagcataggcgtctcggttggaatcattataggagccattgctttcttccttgtattgtcctctctagcattggtcttcttcatcaagagaagcaaacgaaagagaaaaactagggaagtcgacatggaacaagaacacccacgtaagtggaaacttagtcaatttctctgttttccttaaacgtatatctaatgctaatctccatcatgtttctccttggcctagttccaaaacctccaatgaacatggagagcgtgaagggttacaatttcacggaacttgattcagcaacaagcagtttcagtgatctctctcagattggtagaggtggctatgggaaggtctacaaaggccatttaccaggtggtctggttgtagctgtcatacgtgcagagcaagggtctctgcagggccaaatagagttcttcaccgagatcgagttgcttttcaggctacatcaccgtaaccttgtttctttgctcgctact

SEQ ID NO: 38258 - DNA, 5056 bp, Arabidopsis thaliana landsberg
caaaatctccactctccagttgtgaattgatgataagtttcgcagcacggtgaagaggaatcggatctctctctgcctgttgtgtaaagcactggtcatatatagtactgattcattaattaattgtattttcgtcgatcaatattgaatgattaaaacctgtccagagtgaatgagacccattaaagcccaagcagtttgcaccacgtttgatatctcccctacttgtgctatgtatatctgcatagatcaagaggattgtagtgactgaatgatcctacatcaagttgatttcatcaaaatgtgcaagtgtgtacctttttggagcaagagaggtagctttctccccagcctccgttgtctttctgagctgcaagaagaaactgaacgcctttgcgtattgcctcacagtcgttaaaagtcttacccgcagctgctaagcctgcaagagcaaaccatgtaccgtacgtgaagcaaatgccccagttcccatacctgtagattcaaagaacaatggttcatttcttgttagtttggatttccgtgaacaatttcagataaatcgtaatcgctagtgtaccatgaaccatcacgtgtttgcatgttttctaggtattccgcagctttcttgatgaaagcggtgatctctgttgtcctgtgatcagggtagagttgcttgaaaagactcaatgcttggattgcagacgatgtacattcactgtactcatgctcaatcacaatgtcggaaaacatttctgtgggattgagcaactgagacaaatacatgaagaaggttacatgaccgcaaatgttttaaaaagtatcttttggttgtttgaaaataattatggggtttggttcttacttccaaccacttgggagcaccagcaggctcccaggcagtcatacctccgtttttgctctgcaaacaagtgaaactgtcacgacctgaaaatgggtgtttctttgatgatgttggttctattctatgtctgataatgctcacctgtaaagagagcaagatattaacagaatcatgtagtctctcggggtcttgttttgggccaacaatatccggcgccaacatcgagaacagcaggcagcactatgagaccagaaaacagcaaggatgtagtactcatgccactgaagaacatgtcaatgtgtttagttttaacggctggttacctttaagccatgagctgtgcagtctgaaacttgccatccgtgatctcggtcagaaaaagtccatgctccttttgaaatatgacggtacatgcttttgtaatcacctgaagggttctctccaaccttcaattgtttatcaattttaagctaatgttccatttttcaaaagaaatagttccttgtgctacagtatatgctgcagagatatcgaacctgtgaattctttatgaactcatgtcctctcctgagtacatcagagatttcactggagagattgcttgcaagtaaagcttgcatcgcaaaccctgtatcccatagttgacttccaaagctctgcataatcaaaaaaaattcgatttcttaccaactcaaggttagtaaacgtaacaaattggatttccaatctccatggacatacctgcattttcatcccatcttcagccatccacaagtaatcggagattctagagaggtgcttcttgaaataatccccattcgggtcttcaacccaacaagctagcatgcatagtacctgcagaaagagactgaagttaactccagatgctcaatactttgtgtcttaaggtaaggtgtttttaccttttcaacacacccaatggtgatataacgactattttcatcttcatagtgtatgtgtttcattgccaattgaagagccttttccctaagaagcttgttaaatggccaacgtgcaaggaaaggctccgcaaagatgtaaagactgtcccataccaactcttgaaccagtggacggggataatatgtatcttcctaaggtaaagtagaggaatgtatccgtgttcttttccatgaaagaaaatcataaagagaaatgtcgatacatcctaacattcttacctttgcacaaagatggcggactttcatccaattgatttcttcataaggctgtaagtacagttctttgcgtagttgcaaaatcagagacgttattgggccaacaaaccgcttccggtagagataccacattggcaagtaaaccatccggcagtagctccacatttttgctgtaagatttcgttaattaatacatctcattgatagcatacttgtgtagagaaactcttaatcattgtagtacgccaaataaggtttttggtcaaatatcaacaagaggaatccagtttcccaatctcataagttctgatgtcaagaaacaaacctggatgcacgggaaagaaagaaggtaggatccaaaactcaggaggcattgggttgcttccagaccagtcaaatacaccaagtatctgcagacaacaagacgcacgcttatgatacaacttttctagtcattctcaggttataataccagatgatctgaatacataccgaaagccaagttttaccccaagaaggtatgtaggtgacaccaccatgactaaggatccattcccgggctcgtccacacgcattatcatgacctccatcaggactttctccaagtatacgcatacatatgtaattcaacgtggtacagaacattgtgctatgaccttcaatgtgtaatccccacccaccatcttccttctatggacataaaaatccaacatgagcacattgaagaagatacatttcgttgtggagctatagaccaaaaactgtacctggtgacagtagatgtatcgaagaatctcttttcgatgttctgaagtgaacacttcatcaagatgtcccgttatgtaaagacaaaacacctacacagtacacagtgtgcattggatttggagcaacaaagtttcagactttcacttaaaaattccctctttcaatttcaacattctcacttacacgaaaactaaaatcacactgatccctaatccaatttcattcgtcgatcgatttgaaattatcttattcttttacctattacgcaattgcactctttaatctctgattctacaattgacaccggaaaaaactacttaccagtggcggaaggaaaaacaaagggccggcattttccgccggccagtgaccgtcgctggcctgcaacgccgagaagaaatgaatacctctccgtaatgcactcgtcgccgtttcaaaggttaccttctcggagtcttcaactttcaccggagctatccgttgctcaaactttttctccctcagaaactgttgcaaaattcggtacttttaaaatagcaggtcaatttcgtaaataaacttttttttagggccttgttcgtagtttctcaaaattacgtatctttttgtgtttattttggtattttccatgtattttagtacattacaaaaatgaacagcataaaagtgagcttatgatttttttttatttttcatcaaatgaggaaatttgtaggagtcaaaactcaaaatcattcgtgttactttgaaaaattgttattttttactaaaatagcacgttgctaataaaatgttccaaggaataaattacaaaccagaaaaacaaaatacaaacctgcatgcgccacaagagatcgctgcttgctttaacatgaaaacgattgtcgtagaaaatccggcgagcctcaacgacagagtgtctttcctccggcgagcctccgtcaggatcaaactcccatgtttgtcgtccggcgaagttgttagtagtgaataagtagggatcatctccgttcccttctcctatcttcaacctccacattacaaaaatgtgagctacgtacctcatttcttaaacgcatacattagattatataagtggaagtatattaagttaagataaggtgggtagatttttggtaaatatgtgataagaaaacaccgacaagaagatgttacttctgggatgatagagaattaaaagacaaaaatgagagtacttgttggggaaaatattttgcttaatcttggatacgtacttaactacatacatataatataatacatttatattacttgagaacatacatagtcatgaatcatgatacaatacatgaatataatacatatgaacatataatattagatgtgtatgttcatacacgatcattagtttgcttattcagtaagaatactcaaccaccttcatataaataatagcttattgcaaaatagaggtcatgacttaatgatcctacatcatggtcaatgacctgtgagttttgagacgttctgatggatctaacttcttctctctgttgaaggtttttcatacggcaaaggaactcgtctcctatactctgcgagtgcccacacggggaagatgtttctgtatgctgcgtagtgtaacaagcagttcttcatgaaagctccagttatctcctgtaaaatatacaatattgactcttcaaacgttatgcatttttttagcatcaactcacgaggaccagttaaaattttaggcagcaaaaggaccagataaaatttgagtcgttatggttcatcgtgagggcatctctaaggtttttgtatgagcagctttttgtgttagctttgtttcatgtttccaaaagtacctgctgaggaaaatcgccattctccagttgagagttgattaagagctttgcagcacggtgaagaggagacggatctcgctcggcctgtagtgtgagattaaaaggaacaattaaatactttgaataagatctttcatatagcgaggaagtaaaagtctcagcatatccatattataaacctgtccagcatgaagtaaacccatcattgcccaagaggtttgcaccaagtttgaccgctctccttcacttggaatgtatctctgcacaccaaaccaagtatatttttcttgactcgcgggaactggggaaaagacgcttacattgcaatgattattacctttttaggacatgacaagtagctttcaccccga

SEQ ID NO: 38259 - DNA, 2763 bp, Arabidopsis thaliana landsberg
  unsure (1)..(2763): unsure at all n locations
ctttctaatcgtgttatatctaatgtatcacttttatttgtaataacattaagacaaaaggagttttcacaccttgtatgttacaacttgtggaaaagctctagtctctaccgttaatgtcttctaaacaaaactagtaaatgaagaagtttatgaagtcagtaacataaactattaataaataaacaatatattaattaaatatcctcaccgattgtcctatataacatctcttgttttttttttatatcaccaatcttacatccaaaaccaaaagtaaatatggcaaagtctcttctcatgatcatgcttgtatccattgtaatgttttacatggcttgtccaattttctctcaggagatacatgaagatgtagccatatctccaactccattcgaagaagctaattcacccgcaatggaatatgacatgaagcttccccattactcgcaaaaagtgttcgattttctggagacttgcgctgaaaagccgagctccatatgcggaggtgagattttccagaacgtgttggatgcaacaaccttagtgacagataaatgttgtcgtgatatattgaagattggcaaagattgccatcttggattgattaaaatcttcttctcatcgtatgaatataaaaatattgcatctattccaagaagcaaacagacatggaacgattgtttccgtagagttggaagcaagattggtgttccggtctctattgaataataaacttatattccatcgttctgatgtaactgtacgtttttgtaatttaaatgttacccttataaaacagctatcatattatttttaataataagctaaagccatacaatattttatatttttattcatcattcgaattagttcaacattaactacttaatttaaatagagagacctttgtttcgacgtaacattacaaccatgtctaaacctccatcaatataaaaaaaaaacttttcagtcaaattagtttgtgtaccataattcagaactcatagttctttacggaataaacatgaactaactttctctaaccaataacaaattcttgtagagcaaacaaatacatataaagtcatttcttataaaaataaacattagcatatataaaaagatgtctttttattattcaaaacatttattcaataaacataaatatcaaatgagctatatatatatatatatatattaaatagaaacaaaacaatttgactaatgaattagtcttatggcttaggtcataagccacaaacgaattgcataaaattaaatagaattagaaaaaaaatagaaaactaggaaatactccaacgatatttgcatcctgaaggtcgacgatcatcatatgtaaaccctatcacactctttatgaaactccattgacgtagttgatcacattgaggagcaaatgtattttgactgtatacttgtatataactatggaacctcatgttaaggccgtgcttaaaaagacaatcccattttgttatattgaatccttcatctaatgattctaatagcgttgaactctaggtatagcactcctaaatctatttttggggaatgacaatgatattggagaattttaccagggccgaatcggtttttaaatactatcctgttttctttacaagcctcatttactccataagaaatagcaataactaacatgaaaaatatctatatgtacatttttgcagccatttaacaaataaatcctttagttgaaacttatttacaagggatgctattgacattaattattttcaattaattaatattcctaattattagcatttccttatctaatatatctccatcaattctaattacttttgaaaaggagaaattttaaaactttattaatattatactttattaaaaataaatattatagttatttaaagtttagaatatttaacgaaaaaacgtttagaatatatataatatataaaatctataaaattaaataaccatttcaaaagaaaacttttaaattgatttgaattattaatgttttaataaaaaaattattagaacaaaaacataaaataatgtttaactttacaaaactggattagatggggggacaagtttagaatagtataatgtatggattttataacaattaaataaccatttgaaaaaaaaaaattgaattatatatctgttaaattaaagtattattaagaaaaacaaaaacaaaatgtttaatttcactgaacggggttagatggtaggacgggtttgggtcgacagtaatacgagacggtatactatgggtgaaatccattagatatgtttagtttcactgaacgagattagatggtatgacgggtttgggttgataaaaatacaagacggtataccacgggtgaaatcctagacataacaatcaaaatacaattatattatcttaaatactaaacaaaaaaatattattaataaaataaatatagtttaaattaaaattatttatttataatctagattttaacttaatgaactatactttaaaacttaatgaacgttattgttcatatattttaaaacagtaaaaatcaaacataataattgtatactaaataatatacagatataagagttgtacattcagaaaatatacaanattaaattatattttttttttaatcgactaaacaaattaaattttttattcttataagaacaaaatagtccccggttgtaccgcgagttaaaatctagttgattaacatttttgaaaatagt

SEQ ID NO: 38260 - DNA, 2655 bp, Arabidopsis thaliana landsberg
tttcaattttatatttaacatcatattagcagaaaacacatatgctaattatcacatagataagccatactaaaagtatccatctgaccttaggttaaaaaaaatattaaaatatagcatataagaaacatccactactgagttgtcatatttctactggccgacttagattccgacaactaaaatatattttttataaatcatttgacataggcaaaacaaaaacaaatatctctgtaactttttcctcaattttttctttaaaaaaaacacttttttatacaccttttcttgttgaatgtattattattcctattgatcatcacgtgaaatatagaaaaataaaataaaaaagcaaaatccacttttgtgttttccttttcgtttacgaccaaagagatccactttatgctctcttcattttctccatgtaatgatttttctcgagagatttctgaaaataaagtcgtttctttttttttttgccttggtcactcaagactctcttcttcactctctgttttttgtcctcttctaaaatttagagaaaaaaacgaaagttttcaccaaaaacagaggaggagctatgtcatcgtcgacgatgtacagaggagttaatatgttttcaccggcaaacacaaactggatttttcaagaagtcagagaagccacgtggacggcggaggagaacaaacggttcgagaaagctctcgcttatctggacgacaaagacaatcttgagagctggtccaagatcgcagatttgattcccggcaaaacagtagctgacgtcattaaacgatacaaggagctagaggatgatgtcagcgacatcgaagccggacttatccccattccgggatacggcggcgacgcctcctccgctgcaaacagtgactatttctttggtctagaaaactccagctacggttatgattacgtcgttggaggaaagaggagttcgccggcgatgactgattgttttaggtctccgatgccggaaaaggagaggaagaaaggagttccgtggactgaggacgaacacctgtaactaccaaatttcttcactacttctaattaatgttataaagatttgttctaaaaaaatcgatattttatgttataatactatagaatttaagtttctaagcctaacaatttgtttattttggtaaataattttggaactaaatcttgttttatggtattttgaggtaaatatatctcttttattaatatttacttgaaattctctgtttttatatgaactcactgaggagaatatttcttttgataattaaaatgcctaggatttatacttttcttacaatttatatctattttcaaatactttcttgaaattatttatcttatgtgaagttaactaaatataatattgatttacttttctttgtttgacagacgatttctgatgggtttgaagaaatatggaaaaggagattggagaaacatagctcgtaactttgtgaccacaagaacgccaacgcaagtcgcaagtcacgctcaaaagtatttcatacggcaagtcaatggtggcaaagacaaacgccgttcaagcatccatgatatcacaaccgtcaacatccccgactctcctgacgctgcagccgcggataacgcaaccgcaaacgcaccttgctcgccaccttccgtaggaggaaaccagcgggagacatcggagtgggaaggtcaaacactatacgatgaaacagcagctgcgttttataatcaaaacgcgttttcagaaacgctacttggaatgtcttcgacgccctacatggcaaaacttcaggagcagagttttctgaacgcatcgcaattcgaatcgtacaatgcgtatctccaaatgtagctcacaaggtgaagatctcggagaagttacgagttatataatcattaataatttttgttttttctcttaatcggcgtgcatatacaaaaaacaaaattagctgctatttttttattacgagatacttatttgttgttttgtttaccatctttttccgtggttgattcaacgagttttcagcaaattaattaggttttgttattttaattacttgagtgatttatttttgtgatttggaactcttttgagctcaaattgtttattaatctatgctgtgtctgtcatataggctttcattacagtatttttccttgttggtggatatttataattaataaattatgattgtaaatctttgttagatattttgccactttccattttctctttttatctcattgtgtgccaaattttagttttaataatggttgaactctctcaagtttcagtgtcaaaattgaggctaacaatatgtaggatgtctaaatgtaaaatgttaattacaaaaaataaaagtaaaaatcagttttaaattggttgttctggtatagaatgaattatctatttatgaataagcagccaaaagtatgtaaagtgccaagtgggttttccactaatcaaagattatttaacttgttgtggtgacaaatgtgtaatcgaaacctggctttgtggtgataatgacgctttctcacttagcatacatctaaaccctttttcttatgtaattagaatttagttttcaattacttttattttcccaactgttttatttaatagga

SEQ ID NO: 38261 - DNA, 2853 bp, Arabidopsis thaliana landsberg
  unsure (1)..(2853): unsure at all n locations
ataagagataaaaccatcgccatgaagatatctaatgaacgtagacgaaaacgacagatcagggacaagcctagctcttgagtcttgacccacaaagataccctaattaagctttcatgattacggatctatatgataatgaaccctattaagcaaagttaatttatacttagccatcaacgtacatatatatttccaataataaatgcaaataaaaatgataattatgacaaattaaccaaaagttaagttagcaatggaccttggcgttttaaatattggcatggttagcaaatagcatacaaatatatgaaatgatagcctgaaaatctagtaatattatttttattttagtttataaggctcatccattacttttttataaaaatgcctttattctgtttactgaaaaaaaaatcttttaacatagttttgtcaatttaaaattctgactgacacaaaaatgtaagtgtaaccaaaacagaaaagtgcgatataatattaaaaatatatagttactgataaaaagtcatactatttagttcagcattttacaatttcaaaataacaagattcccaacataaaaattgctgaaccagaaagcacgactatagctagatctaatgactagaatgaccaaagatatgattttcatttgtgagaaaaaaagaaagaaagaaagagttaaatttgtttgattgcacaaatttttcgaaagtccctcttatcactaaaccaattctgaaatgttcacaaacttgttttacttaatggtaaagataaagctaaaatagtattttattaataaacacattgcttaaagcaaatcaaggtctttgactcttttggttgtcacttagaattaatgtcttcaattatctattcatctaggtccctcttatttcttcatacttagaccttgtaaatcatatgtatacatatgtggtattttctaacaaaaatcatatattatagatattattcgacagagggaaccttataggcgaagaaacgtccctccactcaaaccctaaaaagagaatcacaaaaataataatattaatacataagcatatacaaataatgcatgagagtggaaaatatatataagaaaagaaataaagcataagaacatgacccatgtttagaaaagcattatgttctcactttatctttgtgctccttcactatcatcatcttctctctaaacctctatcttctctctttctcttttggttctgtgctcgatctcctcacatctctctttaacctttggttcccttctttggtttttatatgattctcccaccatttttgttcttttgagttttaaagatccatcaaactttattaaagaaagaagaacaaagagataaaagggaagaagaacaatggttttctcatccgtctcaagctttttagatccaccaattaattggccacaggttctttgatcttccattatacctaattctctctttctctactttctttttgggngatttttaccgctcttaaattcttcattgattgttttgattcttatattaataattttgattcattttttctaaaagatatattcctattctcatcttcattcatctttaagctcttcttttttcaaagttccaaaacatattcatggtatttcttgctttataatctcacctatatatagaccatttacatactatacggtttacataaataaaaacaaacaattttgattgaaaccaaagattgaattagaagtttctacatgttgttctttcttgtattgtgtgattaaattcctttttgtttgtttgtttgtttgcagtctgcgaatccaaataaccatcctcatcatcatcagctacaagaaaatggaagtttagttagtggccaccaccaagtactctctcaccacttcccacaaaaccctaaccctaaccaccaccatgttgagacagcagccgccaccaccgttgatccgagcagtctcaatggccaggcggctgagagagcgaggctagctaagaactctcagccgccagagggagccctaaagtgtcctcgatgtgactcagccaataccaagttctgttactacaacaactacaacttctctcagcctcgtcacttctgcaaagcttgtcgtcgttactggactcacggtggtactctccgtgacgttcctgtcggcggtggtactcgtaaaagcgcgaaacgttctcgcacttgctccaactcgtcttcctcctctgtttctggtgtcgtctctaactctaacggtgttccgttacaaacgacgcctgttctcttccctcagtcgtccatctctaacggcgttactcacacagtaactgaaagcgacggaaagggaagtgctttatctctctgtggaagtttcacctccactctgttgaaccataacgctgctgcgacggctacacatggatccggttcggttattggtatcggaggttttggaatcggactcgggtcgggttttgatgacgtcagctttggactcggaagagcgatgtggccgttttcaactgttggtactgcgacgacgacgaatgttgggagtaacggtggtcatcacgctgttccaatgccagccacgtggcagttcgagggtttagagagcaacgctggtggtggatttgtctccggtgagtactttgcgtggccggatctttccatcacgactccgggaaactcactcaaatgagaaaagcttctgtcttcatcaaagggcttcaaagtctcttcctttttttagtctctataagtgatgatgatctcttagttgtgtcttgtcaatttagaaacttgtcttcggaaactagaaaacagagaaa

SEQ ID NO: 38262 - DNA, 5133 bp, Arabidopsis thaliana landsberg
tagtctgtctaacaatattggccacggacggtccacgtgagcggatgattacttgtttgtcaaatttatgcatgcatggtaatgtttgggatgctattgggaagagagaagggatacaaatcctcataccgtaccttggtttgtctagcgaacaacatcaagaactgtctgttgagttcttagctatcttgaccgataatgtcgaagaaagtagatgggctgttacttctgcaggtgggattcctccattattgcagatattagagactggtgtatctcagaaagcaaaggacgatgcggtccgtgtaattttgaacctatgttgtcacagcgaagaaatccgcctctgcgttgagaaagcaggagctattcctgcacttttgggtcttttaaagaacggtggaccaaaatcgcaagagagctcagcaaatacgcttttgaaactgattaaaacagctgatccaagtgttatcgagcaagtacaggctttgtttcttggagatgctcctaaatcaaagactcatttgattagagttctaggccatgttcttgcatcggcttctttggaagaatttgtcaccaagggttctgcagcgaataatggattgaggtcgcttgtccagagacttgcctcatcaaacgagaagatgaaagagaacgcagcttctgtcttggctgatctattcagttcaagaaaagacctttgtggtggtcttggatttgatgaggatgacaatccgtgcacaaagcttttaagcggaaacactcacgctgttgcaacgcagttagcgcatgccttgggctctctatctaatccaacaaagaaaaaaactgcaacaaagaaattatccggtccagaagtcgaagtgatcaaaccattgataaagtcagcaaaaacaaaccccatcgagtcaacagagaatcccatgtccactcttgcgaaccttctttcagacccaaatgttgcagctgaagcattaaacgatgacgttgtttctgctttgaccagagtactgagagagggaacactgcaaggtaaaagaaatgcttcacatgctcttcatcaattactcaagcattttcaagtcagtgatgtatttaaaggaaatgagcagtgtcgatttgctgtttctgaactcattgatctcttaaacgcaactgacctgaacaacagcgctttcatcgacgtcttagaagtactctctttactagccaaagctaaatatggtgctaacttgtcacataaccctttttctgcattcggtgaagttccttcaaatttagactctcttgtccgcggtttagctgaaggtcatcctttggtgcaagataaagcaatagagattttgtctcgtttctgcaagacacaatttatcttgttaggtcgacttttggtgacacaatcaaaatcaatttcttcattttttaacagaacaatcaactcatcaagtcctgaaatcaaagttggaggagcgatcttgcttgtgtgcgcagcaaagaacgacattacattatgggcggaagcggttgaacaatcagggtatttgaaaaccttagtaaacactcttcttgatatgtcaaagcagaactctaaatctgcttcatatggaattgaaattcaaagaccaagatcttttattacaagcaatttgtgcttaaggatggatgactctgaaatggttgatccagttactatcttgggaagcaccgcctctatgtggttactctccattatttgctcttctcatccttcgaacagacttgttgtcatggaaggcaatggacttgatattattgcagaaaatcttcaaagaacaagtctaacacacaggtcaataagtatacttacttgctctctttagctttttcttctaaatcctgcaagtgttggttttgctgacttaatatctttaatttttgtaggagaattcctctgattccgaggaaaaatggatcgctatgtcatttttagctgttatgtctcaggaaccaaaggttgtctcatctccagcaacagaaaatattttgcaaacgctagcacctttcatgcaatctgagcagatgattgatggatattttactgcacaagtgttagcagcgttagttcgtcataagaatgataaaataatttcagaaatcatgaattcagatatcgtagaaactacgataaacttggtagggtgtgaagaatcagacacaaggagtctttgtgccttagcagaagagctatctctggtacaaaatccttatgaggccacattagaggtactctttgaaaatgaaagagtaagaagcggttcatttaccaaaaaatgtattcccttgctcgtgaatctcttgaagccatatgcagataaagttggaggcattccagtggctattcgacttcttcgtcgtattgcagacaatgacgatttaagtaaattacttatcgctgaagctggagctctagatgctttagcaaagtacctttctttgagccctcaagattcaacagagattaccgtttctgaactgttagaatcactctttcgcagcccggaaatcacacgacataaaacagctataagttccatgaagcagctcataggaattcttcatcttgcttctagaagtactcgctacaatgctgcaagggtcctctgtgaactgtttagctctgagcacatcagagattctgaattagcatggaaagcactttctcctcttattgaaatgttgaatacaacgttagagagtgagagagtagctgctctaacagctttagtgaagctaactatgggaacaaatccaaggccagatattcttactagtcttgaaggaaacccattggacaacatctacaaaattttgtctttagatagttcttcgcttgaatcaaagacaagtgctgcaaggatatgccgctttctatttaccaatgaaggtttgagaacaagcacatctgccgcatgttgcattgtatcccttatatcacttatccgaacaggaaaaagtacagctatagaagccggaatgtttgcactagacagactcttggatatcaaaagatttgtagaggttgcagaagaacatgattgtgtgaacctgttctacggatatgtggcttccgaaaactatctgatcagtgaggctgcaatttcttgtcttacgaaaatggctaaagacaatactccccggaaaatggatctgattaaaatggggataatcgagaaatgtattagccaactctccaaatcgccgccaagttctttgtgttctgtaatcgcagatcttttcagagttttgacgaacgttggtgttatagctcgaagccaagacgctataaaaatggtacaaccgctccttttgattttgcttagacaagacttggattttcaaggtcaactcggtggtttacaagctatagcaaacatcttggagaagccaatggttcttgaatcattgaaaattgcatcttccacaatcattatgcctttgataccactgcttgagtccgagtcaattgcggtcaaaaatgcaaccacaatactactgacctctctactcgaaatgcaacgtttccaagaagagataacaaccaaaaatctcattgctcctctagcgaaactggtagggatcagagtaagaaacttacaagagatagcattgatgggtttagagagatcctcagttacatggccaaaagaggtagcagataccggaggaattcaagagctctccaaggttatcatcgacgaagatcctcagcttcctgtatatctatgggaatcagcagctttcattctctgcaacattctcagaatcaacccagaacactattactttacggtgactataccagttctgtcaaaaatgttgttctccacagctgaaagcacagtgatcttagccatcgacgcattgatcatccgtgagaatcaagactcgtcaagcgttcaagaaatggcagaatccagtgcactcgacgcattactagatctactaagatcacaccactgcgaagaactctcagcaagattactcgaattaatactacgcaatccaaaggttagagagacaaagatatgtcagtttgtacttacccctctatcagagtacatactagacccagacacaatatcagaatccgcaaaaattctcatagcaatggctctaggtgacatctctcaacacgaaggactcgctaaagccacggactcgcccgtggcatgtcgtgcgttaatcagcttgcttgaagatgaaccgagcgaggaaatgcaaatggttgtgatgcgtgctttggaaaactttgcaatgcatagtagaacaagtcgtaaagctatggctgaagctggtggagtatattgggttcaggaaatgcttagatctagtaatccacaagtttctacacaagcagctctaattatcaaatctctcttctctaatcatacacttcaagaatacgtctctggtgaaatcatcaaatctctaacaagtaagtttcaattccgaatttaaaatttatgatcggattgagaatcaaacactcactgatttcaatgcagatgcgatggagagagagttttggacaacgacggcgataaacgtagaaatagtgagaacgctaaacacgattctcacaacgtttccaaaactccgttcgtcggaagcagctaccgcttgtatccctcacttaatcggagctttgaaatccggcgagcaagaagcgagagattcggcgatggacacgatctacacgttgcgacaatcgtggacaacaatgccgacggagacggctagatctcaagcggttttagcggcggatgcgattccggttctccaattgatggtgaaatcaaaattgaaatctccagctccatcgagcttccatgagagaggtaacagtctcttgaattgtttgccgggaagtctcacggtggcgattaaacgcggtgataatctgaaacgttcaaatgcgttttgcagattaatcatcgacaattgtcccaccaagaaaaccaaggtattgtaatttcggtttaaccggttcaatccggttaatttctcttcaatccagttctaaaaaaattcggtgcaatttcagtttgatttttgctattactaatccgtatccggattaaggcggtgtta

SEQ ID NO: 38263 - DNA, 2460 bp, Arabidopsis thaliana landsberg
cttgtatgccttgactgatgtggatcatcgtcgtctgatccatggttgtttgcgtagtgtctgttttcaaaaaaagatgtacactttttcctcctcctagctttttaagtgctaaccgaattttcacaatttgacttaacttttctcgatgtgattgagtgtttgtaacattgttattatttttggtaattttagttgatgaacacaaaaaaacaaaagattacagagaagtcactattataacagctactttgctatagcaagagatgtatatcagtatatatgtgatctcgctctctctattcgatggatgcttcctctgagaccgtggtgatttcagaaaccgcatcaccaacggccaagctcgtgacttcaccgctcaatgaggagacttcctcctcttctgtgacagatggggcaggggacgaggctgtgctggtgcacgtcgttgtggtgctctgagttgacgacgaatctgaactctcccgtgaatgtctctgaagactccagtacattatacttgccgttaaaattaggatcatcttctgattcacctgtcacaacataccaaaacacatctcatctgagcaattgctatttcggatgatgatacattatagtctctcagttcttacctccacgatatcttcaggtaacaagaaaaccgaacaaccgagctttcttgcgacactaactatgtatgtagcattcaacctcttctcatcatctgtacgtttcaataaccatataataatcaaataagctttgattcaggtaaacggagtaagtaactataccttagtaaaaagagtagtgaaaacctgtttcacccttggtgacaagattccagttcacaactcttggttcaaccgcccatagaaggttgaggaagaataacccactcgatagactcttgtcctggagaattttaatttgattcactagaaggtgataggtggacatactttatataatactattgtggtaagtgtttgaagtagttgtaaagaaaggaaccttgaaactctcgatttgcaattttcgtcccatggttcttactttcctgttggcccagctgaggatatctgcatcagtcatctctttacctagtgtccgagatctgagactcttgagaagttggagcatatggaatctcatcaactgccataagagacctgagatacacaaccatataaatctccagtttgtaaggcaaggcgatcatgtttttgtatcaagctaagagaaacatgagctctcgggtaatgattaccaagaatgagcttcttattcccttgaactatgtcatttccagctacatttacaagtgagaattttagctgtttcccgatctttatgacttgattgcagttctctacttttctaaacggcatcttaatcggtggtttggcagcatgcttccagttaactgagcctggatagaccttatgaacaacttccagaagaatccatctgcatcagaaatattcagtattgaaaaacttataatacgtttcaggaccaaaagattataaattattttccataccaaatgcttacccgtttctaacatcttcaaacacattattgacgtaactctcaatcccgaggctgttaatccatagccggtaacatctttcgtctctgcaagtctgtaaatcctcagtcatcatctccgcaaaggagaatctaccatcagtgctaaggccattcctgcagcagttacagagaagctagtgtgtaagaaaccagtacataagaaaatattctatctttagtgatcttttaccgacctttcatgaaatatctgtgccacaaatgctagattcaaatacgaagacccctcaactatctcctctgcagtcaaataccgtttgcagttcattctctctgcgtgttcgaggaccatgttagccctttcaagatcatcctctgcatttagagttgctggatcacaatgctctggtgcgagaacattaagcaggtaagcataggcctgtgcgtcctgcatagtcaacaatctcaaccatcaacattaagaaaaaataccaaacattttcataactaatgagtgatctgttgttttttctattcaaactgatattgcgtcagcgtgttggagaaaactacttgatgaatctagaaatctcttgaatgaagcttttgaagggacaaaaaagaagatttgctatttggaaataccttcagatccgatgaaaaatttccaacagtttttttgtaaccacctttcttgagatggaagttcatccatttgagcaagactttctctgggggtaatctcagaaattcttctatatcctgcaacagacagaaacttgttattaatatctacgacatgcttatagtttggtcagatattcacaaatagattagcagatcgttacctcgttgtcctccaccaactcaacaagctgaggcatcttctttaaactaagatag

SEQ ID NO: 38264 - DNA, 4957 bp, Arabidopsis thaliana landsberg
  unsure (1)..(4957): unsure at all n locations
agaaacccccgttggaagcccggcagcggaaaactccttttggtgctttttataatgtatcttgtatgacaattgaagatactttctcatatttttctttcttctttgctcgttgttatggttttaatactatattatatgattcttgaagaaaattgtgcttgagttttagatatgaggggttcatatcttcgagagcaaaaatagaaaaggaaatgaatgggagaaaaaaagcaaatacttttttcaataaaaccttcacataaaacatatattccgtataaattctaaattctaacaaaaagatccgatgtagcacattgtcgaaagcaatcattctagtttaatactggatcagaattccgggttcgaagcccggcagcgaagaaattcttttggtgctttttataatgtatcttgtatgacaattgaagatactttctcatattgttctttcttctttgctcattgttatggtttttatactatattatatgattcttgaagaaaaccgtgcttgggttttatatgagggggtcatattttcgagaacaaaaaaagaaaaggaaatgaatgggagaaaagaagcaaatactcttttcaatcaaactttcaaataaaacatatataccgtataaattctaaattctaacaaaagatccgcagtagcatattgtctaaagcaaacattctagtttaatactggatcagaattccgggttcgaagcccgacagcggaaaaatctttttggtgcttttttatattgtatcttgtatgacatttgaatatactttttcatattgttctttcttctctgctcatttttatggtttttatactatattatatgattcttgaagaaaatagtgcatgagttttagatatgagggggtcatattttcgagaacaaaaaccaaaaaggaaatgaatgggagaaaagaagcaaatactctcttcaataaaaccttcaaataaaacatatataccgtataaattctaaattctaacaaaagatcctgagtagcatattgtctaaagcaacaattctagtttaatactggatcagaattacgggttcgaagcccacagcggaaaaatctttttggtgctttatataaagtatcttgtttgacaattgaagatactttctcgtattgttcttttttctctgctcattgttatggtttttatactatattatatgattcttgaagaaaattgtgcttgagtattagatatgagggggtcatattttcgagaacaaaaacagaaaaggaaatgaatgagagaaaaaaagcaaatactcttttcaataaaaccttcacataaaatatatatatcgtatagattctaaattccaacaaaagatccattgtagcacattgtctaaagcaaacattctagtttaatactggatcagaattccgggttcgaagcctggcagtggaaaaatccttttggtgctttttataaagtatcttgtttgaagattgaagatactttctcgtattgttctttcttctctgctcattgatatggttgttatactatattttatgattcttgaagaaaatcgtgcttgagttaaagatatgaggggttcatattttcgagaacaaaaatagaaaaggaaatgaataggagaaaagaagcaaatactcttttcaataaagccttcacataaaacatatattccgtataaattctaaattctaacaaaagatcccctgtagcacattgtcgaaagcaatcattctagtttaatactagataagaattctttttttgaagcccggcagcggaaaaagccttttggtgctttttgtaatgtatcttgtatgacaattgaagatactttctcatatttttctttcttctctgctcgttgttatggtttttatactatattatatgattcttgaagaaaatcgtgcttgagttttagatatgaggggttcatatcttcgagagcaaaaatagaaaaggaaatgaatggtagaaaagaagcaaatactcttttcaataaaaccttcacataaaacatatattccgtataaattctaaattctaacaaatgatccgatgtagcacattgtcgaaagcaatcattctagttaaatactggatcagaattctgggttcgaagcccggcagcgaagaaatccttttggtgctttttataatgtaccttgtatgacaattgaagatactttctcatattgttctttcttctttgctcattgttatggtttttatactatattatatgattcttgaagaaaaccgtgcttgggttttatatgagggggtcatattttcgagatcaaaaccagaaaaggaaatgacagggagaaaagaagcaaatactatcttcaataaaaccttcacataaagcatatataccgtagaaattataaattctaacaaaagatccattgtaacgcactgtgtaaagcaaacattctagtttaatactagatcagaattacgtgtttgaagcccggcagcagagaaatacttttgatgctttttatactgtatcttgtatggcaattgaagatactttctcgtattgttctttcttctttgctgattgttatagtttttatactatattatatgattcttgaataaaatcgtgcttgagttttagatatgagggggtcatattttcgagaacaacaacagaaaatgaaatgaatggaagaaaagaagcaaatactcttttcaataaaaccttcacataaaacatatattccatataaattctaaattttaacaaaagatccgttgtagcacattatcgaaagcaatctttctagtttaatactggatcagaattccgggttcgaagcccagcagccgaaaaatccttgtggtgctttttatattgtatcttgtatggcaattgaagatactttttcatattgttctttcttctctactcattgttatggtttttatactatataatatgattcttgaagaaaatcgtgtttgagttttagatatgacgtagtcatatttttgagaacataaacagaaaaggaaatgaaagggagaaaataagcaaatactgtcttcaataaaacgttcacatagaacatttataccgtagaaattctaagttctaacaaaaggtccgctgtagcacgttgtcgaaagcaaacattctagtttaatactagatcaaaattctgggttcgaagcccagcagtggaaatatctttttggtgcttttaatactgtatcttgtatgacaattgaagatactttctcgtattgttctttcttctctgctgattgttatggtttttatactatattatatgattcttgaagaaaatcgtgcttgagttttagatatgaggggttcatatcttcgagagcaaaaatagaaaaggaaatgaatgggggaaaagaaaatactctctttcaataaaaccttcacataaagcatatataccgtagaaattctatattctaacaaaagatccgttgtagcacattgtctaaagcaaacattctagtttaatagtggatcagaattacgcgtttgaagcccgacagcggaaaaatccttttgctgctttttataatgtatcttgtatggcaattgaatatgtattgatctttcttctttgctcattgttatggtttttatattatattatatgattcttgaaaaaaatcgtgcttgagttttagaggggtcatatttttgagaacaaaaacagaaaaggaaatgaatgggagaaaagaagcaaatactctctttaataaaaccttcacataaaacttatatattgtataaattctaaattctaacaaaagatccgttgtagcacattgtctaaaacaaacattctactttaatacttgatcagaattacgggtttgaagcccggcagcggaaaaaatccttttggtgctttttatactgtatcttgtatgacaattgtagatactttctcgtattgttctttcttctttgctcattgttatggtttttatactatattatatgattcttgaatgaaatcgtgcttgagttttagatatgagggggtcatattttcgagaacaaaaacagaaaaggaaatgaatgggagaaaagaagcaaatactcttttcaataaaaccttcacataaaacatatataccgtataaattctaaattttaacaaaagatctgctgtagcacattgtctaaagcaaacattccggttcaatactgtatcagaattatgggtttgaagcccggcagcggaaaaatccttttggtgcttttttaatgtatcttgtatggcaattgaagatactttctcatattgttctttcttctttgctcattgttatggtttttatactacattatatgattcttgaataaaattgtgcttgagttttagatatgagggggtcatagtttatgagaacaaaaacaaaaaaggaaatgaatgggagaaaagaagcaaatactatcttcaataaaaccttcacttaaaacatatataccgtataaattcaaaattctaacaaaagatccgatgtagcacattgtctaaagtaaacattctaatttaatactggatcaaaatttcgggttcgaagcccggcagcggaaaaatccttttggtgctttttatattgtatcttgtatgataattgaagatactttgtcatattgttctttcttctctcctcattggtatggtttttatacattattatatgattcttgaagtaaatcgtgcttgagttttagatatgagggggtcatattttcgagaactaaaacagaaaatgaaatgaatgggagaaaagaagcaaatactctcttcaaataaaccttcacataaaacttatataccgtataattctaaactctacanaagagccgtatagcacattgctaaaacaacattctatttaataatgatcagaaatccggtt

SEQ ID NO: 38265 - DNA, 7586 bp, Arabidopsis thaliana landsberg
atcatgaatgttcataggcctagctgttatgattgttaatgagcttctatagtgtttttcttcaaagacagatatattcaatatggatctaaaactgaactgaatttaactgacatgacaatcgaatcaaattgaaaatgtgtttattttttcaattttcatttagcaagaagtgacccatcttcagagtgaagtaatctatgcttattatctcgattaagcaaaaatccgtagaatgcgtgggcctttcaacgatgatgtagccgtgtaggacaggtttacggaatctgcttttatgcaaatggtaaatattaatattcctttataagttagcgtttcagatcatcttctttcgttagattaagaaactactttgttattatataactataaataccatccaacaaccttactcgccatatcttttcatgtgtggtggtttataggaacattgaaaagtaccatattataaaatgaagaatcaacacgtcaacaaaaacacaaataaaatgagatagtacaattaaaaaaatggagcgcatgtaaaaagtgaagaatcaaacgaaggcttggcgatagagaatggaatcagatttcccattatccccactctaacaccatatattcctttccctttttaccctccacctcaattaggtttattaatcatatttaacactctaattaaccaacccatttcatctcttttattttactaatcacaatgctttggcctcattacgttttacctagatttactttgtcacaaactacacaaatatgaacctaattatctacactcgtgtcagaaacagttttagctaatatttagtaagttttaattaaaactaatgaaatgaataaatagtgtatagtacataggatttgtttttagtttattaatggaaattaagatttcattagtactaaaaacatgtaaataaaataaagctttaaagaggaatatattcaaataaaaaaagcaagacctcgaaaaaaaaactttctattatctctcttccgcgattaccgtaatctctgtcacaactcacaaacaacaaaaccttctctctctcactatcttaatgagagaagaagacattctcgagaaatgagaagactaccactacgatgaacacgacgccgtttcactcggatcctccgccgtcgaggatccagcgtaagctcgttgtcgaagttgttgaagctcgtaatattctccctaaagatggtcaaggaagctctagcgcttacgtcgttgtcgatttcgatgctcagaagaaacgaacctccactaagttccgtgacctaaaccctatttggaacgagatgcttgatttcgccgtctccgatcccaaaaacatggattacgacgagctcgatatcgaggtttataacgataaaagatttggtaacggaggtggccggaagaatcattttctcggtagggttaagatctatggaagccagttctcgcgaagaggtgaagaaggtcttgtgtatttccctttggagaagaagagtgtgttcagctggattcgcggcgagattggactcaaaatctactattacgacgaagccgccgacgaagacacggcgggtggaggtggaggacagcaacaacaacagcaacagcaacaatttcatccgccgcaacaagaagccgatgaacaacaacaccagcaacaatttcatcctccgccgcagcagatgatgaatataccaccggagaaacctaatgtagttgtggttgaagaaggtagggttttcgaatcggctcagagtcagcgctatacagagacacatcagcaacctccggtggttattgttgaagaatcaccaccgcagcatgtaatgcaaggtccaaatgataaccatcctcaccgaaatgataaccatcctcaacggccaccgtctccgccgccacctccatcggctggggaagtacattattatccaccggaagtgaggaagatgcaagtaggaagacctcccggcggagatagaattagggttacgaagagaccaccgaatggagattattcacctagggttatcaatagcaaaactggaggaggagagacgacgatggagaagaagactcatcatccttacaatcttgttgagccaatgcagtatctcttcgttcggattgtgaaggcgcgtggcttaccacctaacgagagcgcgtatgttaaggtacggacgtcgaaccatttcttcaggtctaaaccggccgttaaccggcccggcgaatcggttgattcaccggagtggaatcaggtttttgctcttggtcataaccggtctgattccgctgtaactggtgcgactcttgagatctctgcttgggatgcttcgtcggagagttttctcggaggagtttgttttgatctctctgaggttccggttcgtgacccgccggatagtccgcttgctcctcagtggtatcggctcgaaggctccggcgcggatcagaactctgggagaatttccggtgacattcagctctctgtttggattggtactcaggtagatgaggcatttccggaggcgtggagctctgatgctccgcatgtagctcacacgcgttctaaggtgtatcaatcgccgaaactttggtacttgagagtgacggttcttgaggcacaggatttacacatagctcctaatctcccgccgttgactgcgcctgagattcgtgtgaaagctcaattagggtttcagtcggcgcgtacaagaagaggctcaatgaataaccacagtggttcgtttcattggcatgaggatatgatctttgttgctggagagccgttggaagattgcttggttctgatggtggaagaccggacgactaaagaagcaacacttctaggacatgccatgatcccagtgagctccatcgagcagcgaattgatgagcgttttgtgccgtcgaaatggcacactctggaaggagaaggtggaggtggaggtggaggaggaggacctggaggtggtggtggtggtggaccttattgtggaaggattagccttagactttgtctcgaaggtgggtatcatgtgcttgaagaggcggcgcatgtatgcagcgatttccgtccgacggctaagcagctatggaaaccgccgattggaatacttgagttggggattcttggagctcgtgggttgttgccgatgaaggcgaaaaacggagggaaaggttccactgatgcttattgtgttgctaagtacgggaagaaatgggtcaggactcgaaccataacagacagttttgacccgaggtggcacgagcagtatacgtggcaggtttatgatccttgcaccgtgctaactgttggagtcttcgacaattggaggatgttctctgacgcctccgatgatagacctgacacacggattgggaagatacggatccgggtgtcgacgttagagagcaacaaagtgtacaccaattcatatcctctgttggttttgttacctagcggtatgaaaaaaatgggtgaaattgaagtggcagtccggtttgcatgcccgtctctgctgcctgatgtttgtgcagcttatggacagccgcttctgcctcggatgcactacataaggcctctaggtgtagcacaacaagatgcattaagaggggccgccacgaaaatggtagcagcttggctggctcgagcagaaccaccattgggaccagaggtagttcgatatatgttagatgcagattcgcatgcatggagcatgaggaaaagcaaagcgaattggtacagaattgttggtgttttagcttgggcagtgggtttagctaagtggttggataatatcaggcggtggaggaatccagtgacgacggtgctagtccatattctatatctggttcttgtttggtaccctgatttggtagtcccgactgcattcttgtacgtggtgatgatcggagtttggtactaccggtttagacccaagataccggctggtatggatatccgcttatcacaagctgaaaccgtcgatcctgatgagctagatgaagaattcgacaccataccaagctcaaggcgaccagaagtaatccgagctaggtacgaccggttaaggatcttagcagtgagggttcagaccattctaggagattttgcagcgcaaggagaacggattcaagcgttggttagctggagagatccgagagcgacaaagctgttcatagcaatctgtttggtaatcacaatagttctgtatgcagttcctgcgaaaatggtggcggtggctctagggttttattatcttcggcatccgatgttccgagacacaatgcctacggctagtctcaattttttccggcggttgccaagcttgtccgatcgactcatctaaggagagaaagatgtcaagatagtaaatgttaggtgtttttgagtatccaacagtttcttgggctgaggctgacatagaataaaaagattcattatgggttaagaatgatatcatatcattatgattcttcattttattattcagattctgtcgggtactataatcagatggcatgagctttgagacctgtaatattttgaaggaaacgagagagatttcagatttgagaggtgaaaaaggaagcaaaacttgtcagtaaagttttttgaccacagatttgcttttggtatctctgtagttttctctgtaatctaaaatgatttactaattcctcatttaacttattttgtttacgcctaaactattacatgtaaacattgtctgattatataaattctaagtgaaaaaccggagataaagcgctaacgaaaatgattggttgaaatcacaaagacatcatctgacgtggcagtttctctgtctatcagagtttcagatagtgtgccaacggcgaaacaagacacgaaagaatctctaaagaaatcattctcatcgcttcgcttcgatttttcttcaatggctgtcgtcggcgctccaatatcgtctccggcggctcagctgcagacacaatttctctccaatcccattctcccccgctttcgccggtctttctccaccggaaaatcaccagcaactttctccgtcgtagctatggctccccagaaaaaggtaactaactctcttaatcatctcctttgtttaagttctgagatcttttgcactttcatcaatcacttcataaagtataaatcttttttgattctcaagataatctttagaaacatgaataagcagtacattttagtaatggaacaaagacattgaagtctctgtatatagtattgttgcagagttttatatatactttttaatttgtgtaattgtgatcactgaatcgggtaacaaaaggtgaacaaatatgatgccaagtggaagaaacaatggtacggagctggattgtttttcgaagggagtgagcaaataaacgttgatgttttcaagaagctggagaagcgaaaagtgttgagcaacgttgagaaatctggcctgctgtcaaaagcagaggggttgggactcacattgtcatctcttgagaagcttaaagtcttctccaaagcagaggaccttggtcttctcagtctccttgagaacttagctggaacatcgcctgcggtcttagcctcggctgcattaccagctctcacggctgctattgtagccgtggagttgatcccggatgactcaactactctagaggatgctcaggcggttttggccggtgctcttgcgcttacaggggttgttttgttggatggttctgatgtttaggatggacttcaagaagctgactgattctttctctgtaaaccaaacataaacccatgtcttgtccaattgatttttgtcagttgctgatttatagctgtatggttcagttgtttatggttagtccaagacataagctgagtgatagaaagaagctttattataattatacaattattacatacaaatacattcattctccagtgaaaagcctaactacgcccacaaattacaaatttccaacttccccaaaaccaaaaaaaaagaatctctagaaacaaattgaagtaagccaaaatcacatctgaaaaaagcccagaaaaaaccccttcatgaacgtgtaagaaaagcagccatcagattgcttctgttttggtgataaacaagtgtaaagatcaaactgcaatagattgtccagtgagtgcgtcgtgtagatgcaatgaaccttctctcattaacttgaggctcaaactgttgaatctttcccgggaatactgcctcgacgctttcctccaatctgttccagctttcatcattgccgcaaactcttcatagcttattcgtccgtcctaatcaccaagacgataaaaaaaatcaagagaagacttgtaaactgctatgtatttccaaaccaattttgccatcaagttgcctgttcaagacttgagaactaaggatgcacaattctgagatatactgataagatcaaacacataatctcatctattctcaatgaaccaggttacacataatctcaatcacgcattaaaatgctgatatggcatgtgcacttggtgaactcctatcatattcccacatatagccttccgaggagaaagattcagacaaacatacccaagtcttatgctactacactgaatcatttgtgtccccatattatcgtcacataacattattgagtgaagacgcatttgcagtgaaaagtgtctatttctaatctcatattttgtggttaccttgtctgtgtcaacatcttgcataatagctgcaacaacttcttcactgttagtatccacctcatcatttaaagcctcacgcagctcctcaatctctatgtaatcgctctgattctggtcaaaaaagctaaaagccttatgcaagtgttcgtcgttcgccattttcttaagatgcactgtgacagttacaaactccccataatttaaagtcccatccccatcaacatcagcctgcacaccagataaaaaaaaaaggctttcaaatatctgttggaacacaaactccaaagttttaagttttttcttacagcttccatcagaatctgtagatcagtatcaggtatctgctgctgtccgagtttatgaagtccaaatttaagctcctcgaggtttatctttcccgtctttttactgtccatcatctcaaatgcttccttgatgccagctacttcctccactgataagtgttcggctatcacctgaaaggaagtgaaaaaagaagtttcgcattatttcttcaaatccaacagaaataaggtcatgaagcagctgcaatgctagacagaatacccgtagcgctcttttcttgagcttgttcataacagaaaactgtttgagtcttgctttcaccgtctcgccgagtgaaacatttggagccttcttcgcattttgtatccaagaatgttctgcagatagaagtgtcatggtatatatgttccataagtaacagattttagaaacacactaggaaacataccgagtacttgtgcagcaaaaagccgatttttggggtcaggttcgagcatcttcctcacaggtctttggcagtctcagaaactctcggcc

SEQ ID NO: 38266 - DNA, 6237 bp, Arabidopsis thaliana landsberg
tcaaacaaaacaaatgatttgtttgtgtacgtgaaggtacttcatgactctaatattgttcgtcttcctcgcaaagaaagttaatttgattccaccaaacttcggggatttgcagtttggaagattccttaaaaatggtacgtatggatgcatatttattaaaagttgtggttcttgcaataatattttttttttaaaaacaagatccgtcgtaggagctaatgcacagagtccaaaaataaattaacaaaaaatttatctatataataatagaattcaatcaaataaggtctatatttaaaatattgaatattttgaaatatatagttaagaaaatgagaaatgtggatatatgtctaacaagtatagtattaaaaatgaaagggctactattgctggcgaggaccatagcagtgacgttttgtcagaccttagcagcagcaatggcggcgcggctgggtacaacaccaatggctgcttttcagatttgtttacaagtatggttaacttcttctcttctcaatgatggtcttgccgttgctggtcaggtaatcatgttttctcgttgtattaatatatgtatagtttatatggttgatcaagttgtatgtagaaaatgatcattcaatacgttgcaggcgattctggcttgttcgtttgctgagaaggactataacaaagtgactgctgttgcatcccgtgttctacaggttcggtccaaaaatcacattaccaaacctttctttaaaaataaaataattgtgtaactaaaacagaaatgaatttgatacgcagatgggttttgtgttaggacttggactgtccgtttttgttggactaggtctctactttggtgacggaattttctccaaggaccctgctgttattcacctcatggccatcggaataccggtaactaataactaaataataattactatagtataaaaatcattttaaaagaattttactaatgagaagaggttatatatatttatgcagtttatagcagcaacgcagccaataaactctctcgcctttgtattggatggagtcaattttggagcatctgattttgcttacactgcatactccatggtatgcacactatatatactatgaaatgattaaaattccttcttttttttttaaatgacttaaactttgtctatctttttttcttgtaatccaattatgataaatcaggtgggagtggcggccataagcattgcagcagtaatatatatggcaaagaccaatggtttcataggaatatggatagctcttacaatctatatggctctccgggctattactggaattgccaggtatttttattgggtcttaatgggcctttacataatagcccactatagtagaagcagtatttgactgagtgtttgaatttatgcaggatggcaacaggaactggaccttgaggttcttgcgtggacgatcatcctcttcatcttcctaggacttagtttatttataacgagttgcatctcttcttccttcttcgtttttgtttatggttcttgtgtttgtttttcaacattttgttcgagagaccgttatcattatcagtttcacataaataatgcatatttttaagtcattaatatatggagccctctgccctcactggcttttctacccaaatagaatattctgtattgagtatgttttagctagactagatagttcaaagatatccggtatccaagtgtcgatttggtgttggttaaaaaaaatgtaagaaaaaaaagctggatcttatccttttactaaagaaaatctgaccatagttatttccttagttaagagccaaaattaggctcagattttaattaattgaaccattagatttgttcttactcaatttctatgtattttaataagtttcacttctaaaagtgttttctaaagttttacaactacttcaaatcttaagactgtttttaatgaattcaaaatttacactttaattcaaattttcaacttgtgattaacaaataattatactttatcggtattaatttccttgcactttttggaatgtcctagattatacttcttggtattcgtttaactcaaaacatttcatattacaataatatatcattcattttaacttgatgacaataactcaattccaaaaggagccaagacatacaaagcaaggcaccaagtccatgaccagtctaagaacacaagtgcagttgtcataaagagaaaacttaatctaagcgacatgagaaaccacaatctcgtcaatgacaggaccacataaagatacagtatcagtcttcttggtatggtaaaaaccactgaagaaagtaattctagttcttgcctcaaccgccttgaacttgaaactcgcggtcttgacatgacctccaccaacggaagtgtgtggtactttgagtgtatctctggctgcaaaagcttcaaccatcatggaaccatggcagtcattcttagcatctccaacgacgaaggagagggtgtaagtttgaccaggagaggttctaatgacttgtgcaatggcactttctttgcctgcaactagctcgatcgcagcatgtccaaaggggacattaaagtacttagagtctatgaatttcactgccttgagtgactctatgatccaaccaggtaaaggtgatgtgagatcttcttgtttaggtgggagtaggactccttgtgtggagttcactagacggtgaggaccttcttcgaaccctccattcttcaccaagttccctacatgtcagaaaaatcgaattatgaaaccaaattcttcaacagataaaaccgggactggtaataagcattataccaaaccgaaccaaagtgaaccaaaaacaggattggattgaaccaaaattggacaattcattacatacgaattatttctataggattaacaatatcgtcgtgtatataatatgtatgatttttcaaatatttatctaaaatcgaaccgaatctaaaccaaaagcaaaactgaaccatggtattttaattgagttcggttaaaccggaaactaaaaccctaggaaattgaaccagaaccaaaccaaagcttccaataattacctctggtgtagattggatgaacaagctctttaatggcgacagcgtccaacaaaggaccacaagcaggatcttcttgaactccaggattgtggaaagtcacagtaacttgagaagtcttggcgacgaaggcccaagcgtacacgtcacctccgaaactgttgtaaagtgtttgaagtggcaagtcaccggactgagaaggtacagagactctaagaacttcgtcttgtgcacaagttctcgacgcaccaaacgtgagtgcgtagagagaacctggcttcacttctaacttctgagagattgtagcttcgtttccgagcctcacggcgtggactccatgagccactgggaagtacatgcctcctggctgaggaccgccggcgatgtactcgacgaaaccggtggtttcccattcgggcaaggcgtttttgcctagtagaactgttttcttcatgtcggttttctttggtgactcttcgaagtttccattacgaagataacctgaagaagtaaacagagagataaatcttagatctagagactaagattgaatctttttcttccaaaaacaccaaatcttgctttagaatcacaagtagagaagacccatcttccagaatcgaaaacttgtcaaaagcaaaacagagcaaaccagtgcaaaccatagacagtgagtgtgtgtgtgtgtgcgcgcgatttaccttcagaagcaggagctccgagagcagcaccacagatgagtagcaagataggtagaataatggctttgggaaccgccattgtctctgttgttcttcctcggagaagagtgagtgaggggagcttcaggggagagagaaaaggtccgaagaatttgagattgtgagaggaagacgatctcgagatgctacgactttatacaagtgaaaggattaaaagcgagtggagagagaggaaatcacgtagaaagaggtaatgtgactggaccccaacgatggattttgtctgtctgtcttactgaaccgaaaccgacttttctccttaattcatgctctctaatctcgtattggcacttgtgccttgcttcatttcttcctaagatatttgtggccttttatttggtaatttttgtacagtaattagtaaattttgtatggtaataagagaaattgagaggaactaaagttagctaaatgagacaatattgagaagatcaaagatgagaggagataattagagaatgagttttctttggttagtgttattgatatatgcttgttactgtagagatattgaaattttactacataactctaaaaatgttttcatgcatgcatatacatagagttattgtttcctcataacaaagctagtgggaattttgtcgtctttgatggtaaactatcttggaaatgatacttagtatgcgtagagatatggctgatgtcaaaaattatcgatgtgctaactattgagattttcctactgaagtaactaatagagccaaaacaatgatgtcggtattgaactttactaagctagaatggttgttaatatttggtagatctcaatagccaagtcggtaacagagcaaatattctcaagacttcaatattaaactactacattatagtaaatatactctacctcatcatataagcgttttaaaaaagaactggtctaacatgtaaaaaaacacaaaatataccactaacttagtttataaatctcaaaacatcggtaatgaacaaccaagtcacatataggcggcaggcggcagcatctataaaacacacgtatattattaataacgattaccgagttattaaagtatcatttactttggcataaagttaattgcagattcaaaatcagattctttttcatattgtttatgcttgacaagatcgtataagaattgcacaagatatcatcagattgttggctctttttttgttgatcgtaataacgggaattgcggcagatgcaaaggtaattatggaggaagagaaggcgttggcaattctgcctttggctggttccaataataattggcattttaaacgaatatctctatctatacaaaatcagaggcatgtgcaatatcatgactataggcttgttatagtcagcgaatgcatgtggctatcagctgaataatagaataaacacatcactaaattacgtgttgtgtagggtccttggcgttttctatctatttatgttatccactcgatacatttgcccccatgcggccgcgattgctctatgttgcaattattaattacgaatggttatgtctagctttcacttgccttctcttatttttcatcagattaactcgttgtaagttgtaaccataataacacacactagattagacaagtgttttgctcgggaatataaaacctaaaaacatgttttgtaagctatgatatactaatcaattaatttagtagttttagttaaataagagagagtagttgagtttaaagtaaagatgctttgtagttgggtagtttgtacattgatgtctacattgaataatcaaccccaacaacaaaaaataataatttgtatgggactttacctcatagaaagctggcctaaaactagtttggagcccaaatgtatcattttacctttcattgataaaagttatgagcccaattttaaatcatagaaagttggcccaaaaccagtttggagaacaaatgtttttcgatcatcttctctctcgttttagtggggctggtcgagaaaggttcttgatactaaaattcaaattcttacttgagtttctccctctcgtcttcttttagatttggtgttattatcgtaaaggaagacttggctactctaacgtttcggggagatttatgtttggcaaaaaactcaagatcatttgtagtcattagatcattaaatagataaattgcatattaaattttctgttgtgcacaaataagcaaaactgtgtgatggcatatttcgtaaaaaatattgttacaatgtcaccatcggtgtttttagacaataacaaatttaccaagtaaaagattttggatttctaagtttttattgctctacagatctttctcttctatatatatatgattatgtgggaaaatcttatgaaagttgtgggttaaaaatgca

SEQ ID NO: 38267 - DNA, 5550 bp, Arabidopsis thaliana landsberg
caagcttgggcaaaaagttgcagtttgtggaccagttggagtatgaaaatcatcgctgttgcatgcagtactcggagaaatacctaaagtttctggaactgtaagcaaatcagccaccaagactgactttcacttttttcattagatatacatttgtttgttccaaatgtttcctttacgttgtccaattgaaacaggtaaaggtctttggttccatcgcttatgtttctcagacttcttggatccaaagtggtaccatccgggacaatatcctctatggaaagcccatggaaagtagacgatacaatgctgctattaaagcatgtgcgttggataaggacatgaacggttttggacatggtgacctcacagaaataggacaaagagggattaacttgagcggaggacaaaagcaaaggattcagctggcccgtgctgtctatgcagacgccgatgtgttacctgcttgatgatccttttagtgctgtggatgcacatacagctggagttctttttcatgtaagtttgaaacattgctttcgaagaagcttttcttaatgactgcttcttattatgttgaactgtgactgcagaaatgtgttgaggactcgctgaaggagaaaactgttattctggtcactcaccaagttgagttcctctcagaagttgatcaaattctggtaaaacttgagagtagcaggaaatgcaaaaacaatattgtctttgtcttacccgtttgattattactgactgatgatcttgatcaggttatggaggaaggaacaatcactcagttaggaaaatatgaggagctcttaatgatggggactgcattccaacagctggtaaatgctcataatgatgcagtaactgtattacctttagcgagtaacgaaagcctcggagatcttaggaaagagggcaaagacagagagataagaaacatgacggttgtcgaaaaaatcgaagaagagatcgaaaaaacggatattccaggggtacaacttacacaagaagaagaaaaagagagcggttatgttgggatgaaacctttcttggactatatcggtgtctctcgaggatggtgtcttctatggtcaagcgtattgggtcaggttggctttgtagtttttcaggctgcatcaacatactggctggcttttgccatcgggatccctaaaatcacgaatacaatgcttattggagtctatagcattatatcaactcttagtgctggttttgtatatgcgagagctattacgactgcccatcttggactaaaagcttccaaagccttcttctctggtttcacaaatgcagtcttcaaagccccgatgcttttctttgattctactccagttggccgcattctcacccgagtaagatctctttgcttataattatatggaatacactacagctcaatgtatgatatagttgaatgtaacatgtgcaggcttcgtctgatttgaacgtgttggactatgacgttccatttgccttcatatttgtggtagcaccggctgttgagctcactgcagctcttctcatcatgacgtatgtcacatggcaagtaattatcatagcccttcttgctttggcagccacgaaagttgttcaggtacatgattcgattctacttctgtttttagttggtttatgcagcaaataagtctgtattaacatccgcttcttctttgaaaaaaggattactatttagcctctgcaagggagctgattaggatcaatggaacaaccaaagctccagtgatgaattatgctgcagaaacctcacttggggtggtgacaattcgagcttttggaaccgcagagagattcttcaaaaactacttaaacctagttgatgcagatgccgtgctattctttctgtctaatgcagccatggagtgggtgattttgaggatagagactctgcagaatgtgactttgttcacttgtgcacttcttcttatccttattcccaagggctacatagctccaggtacatgaattattataactcatcatatcttcctgcagcctgcaattttaacttacctgttttcacagcttgtgtcagtatagcgtgagcatttccttgaaaaatttgatcaaactgaaaggttgtgcatgaacttgtgcctttgtgttgcaggcctcgttggactttcgctctcctatgcattaacactgacacaaactcaggtgtttctgacccgatggtattgtacgttgtcgaattccatcatttcagtagagaggatcaaacaatatatgaacataccagaagaacctcctgcaattatagatgataaaagaccaccttcctcatggccttccaatggtacaattcatttgcaggagcttaaggtgagaagtaaacataacttgttataagatgatagtaatagttatgcaaaaggcattgatttgcatcatttctttgtttcagataagatatcgacccaatgctccgttggttctcaaaggaatctcttgcacattcagggaagggacaagagtaggagttgtcgggaggacgggaagcggaaaaagcacattgatcagcgcattgtttcgcttggtagaaccagcaagtggttgtatattgattgatgggattgacataagtaagattggccttaaagacctgagaatgaaactgagcatcattcctcaagaaccaactcttttccgtggctgcataaggacaaacattgatcctttaggtgtttactccgacgatgaaatatggaaggtgaaataacaaagaaagactgagatttccaaatcaaaagatataaaatctttctgataaaaccattctttttgcaggctctagagaagtgtcagctcaagacaacgattagcaatcttcctaataaacttgattcttcaggtaaatggtaaaaaagctgtaatattttcatttcacaaaaaaatgggtttgatgacacttacgtttatgttttttcattggtgagaagtgagtgatgaaggagaaaactggagcgtgggacagagacaactgttctgtcttggaagagtattgttaaagagaaacaaaatattagtgttagatgaagctacagcttccattgattcagcaactgatgcaatcattcagagaattataagagaagagtttgcagattgcacagtgataacagttgcacatagagtaccaacagtcatagacagtgacatggtcatggttctctcctttggtaaacaacattttctctcattctttcatctcttaaacctactcataatgaccaatgaatgagtttcggttttggttttggataggtgatttagtagagtacaacgagccttcgaagctaatggagactgattcttacttctctaagcttgttgctgagtattgggccagttgcagaggaaactcttctcagaatctccaattataagccagctgctactgaaactgaaatgtcagagattgttaatcacgttcttcatctaccattgtagttttgagaaagagatgtaaaataaaaattcaagcatggataatgatagtagagtagctcaccaacccctacatgaactttgagacaacgattacgaccaatactcaatcattgcataaaaagacaaaactacccctgcataaaaaacatattacaataataacatttcaccaaccacaaattcttttatatggaaacactgatcatcatgctctgtttcaggctcaaacgttactttccaaaacaatcttttcagttttagataaaaatttgatattcacttctgattcatgacgacacaaaatgtgataatcaaagatcagaatgatcagaaacagtgtagtaatgacgtcattttccgatctaaattgcctgatatttacatccctaaccacctcccactccacgactacatcttcgaaaacatctctgagttcgccgctaaaccatgtttgatcaacggtcccaccggcgaagtatacacctacgccgatgtccacgtaacatctcggaaactcgccgccggtcttcataacctcggcgtgaagcaacacgacgttgtaatgatcctcctcccgaactctcctgaagtagtcctcactttccttgccgcctccttcatcggcgcaatcaccacctccgcgaacccgttcttcactccggcggagatttctaaacaagccaaagcctccgcggcgaaactcatcgtcactcaatcccgttacgtcgataaaatcaagaacctccaaaacgacggcgttttgatcgtcaccaccgactccgacgccatccccgaaaactgcctccgtttctccgagttaactcagtccgaagaaccacgagtggactcaataccggagaagatttcgccagaagacgtcgtggcgcttcctttctcatccggcacgacgggtctccccaaaggagtgatgctaacacacaaaggtctagtcacgagcgtggcgcagcaagtcgacggcgagaatccgaatctttacttcaacagagacgacgtgatcctctgtgtcttgcctatgttccatatatacgctctcaactccatcatgctctgtagtctcagagttggtgccacgatcttgataatgcctaagttcgaaatcactctcttgttagagcagatacaaaggtgtaaagtcacggtggctatggtcgtgccaccgatcgttttagctatcgcgaagtcgccggagacggagaagtatgatctgagctcggttaggatggttaagtctggagcagctcctcttggtaaggagctagaagatgctattagtgctaagtttcctaacgccaagcttggtcaggtttgttttcctaatttttgagctcttattgatatttttttcttgggtattttgattatcatttatattttatttttctgaggaaatttaatatttcatgtttgttagtgatgttatgcaaattatgaactttattacatctgtggcccctaaattccagaatattggacaatgaatattatggtgtttgaacccattttattcaaattttgttggtaaatgatttaaaacttttggactatattacttgatttgtactctctgcacaaaggccatactaattttctccagaaggatggatgcattttattcagtttatttactatatgaaaccttacatttggaatatggacattaatagacttactattttttattttgtttgaactagatatgaaatcaacacaaccaaagttaatgaaagatttttgaacatttttaaattgattttggactgttttaacttttagagcgtatactaactctctttttaaaaacgttttaatttttaaagccacacctactagtttcagcgttcataaaattagtttagctaaaaattaagatataagctttctatgataaggacttaccaatttcgagtttgagataattatttgcgccacttagttagcataatgaataccactcgagatcatttccttaattccacctataggctgaactttttgatttaaagattattatacaattgtaataactttttg

SEQ ID NO: 38268 - DNA, 2391 bp, Arabidopsis thaliana landsberg
catggtaaaacccacataacactctatttaaataaaattcgtccgttttaaagccactttaattttaacacaaaacatggatctttaagctttaaattttaagcgggttttgtttacccactacacttttacccatcactaacatccctaatattgtctgaaactcacaagagaatgtcaccataaaaaaaaatagagtttagagtcgtgtgcggctagccacgagtatgggatgtcatgcgtagccaccggtgaaacaaacaatggatattaaatgcttagtcggtcttctttgatttgatattgtagtgcaacttgtcgaaagcattcggagggggaccatcctctgatctcttggcaacatgttgatatgattttttattagctcgaaatgggcatttgtagaccttcaaaattatgctaaatagtaaatactataccataaaacgttttcgacctataatttcagacgtagaattatatgaaaaattgtaaaataaatgaactatgaaaaactcgatatatgatcctctaatttactaaacagaaccatgtaaacagaaaagttgtatgcatgtgtgttaattattgctactcgacaaacaatgttggaaactctacgaatatcatgtgatatcaaccacattaaatttatgttatccttttccttatcctttatagtaattagatttatttttcatctttcttggttttttaatacatctcgtgtactatctatttatagtatcatcaccggttaagtacatctcttaccacaacattttcggggaaatggtttcatcacttaacatcatcgaagtggcacgagtcaccccttcaaactctgactcggccgagtcactcagtctcccactcacttatttcgaccttatctattataaacttcgcgccgtcgaacgagtcatcttctaccgaatccccaacgtaactcgccctttctttgactcagtcatcgtcccaaatctcaaaacctctctatcctcatgcctctctcactatctcccactcgctggcaaacttatatgggaaccacttgatcacaaaccaaccattgtctactcccaaaacgacgacgtttcattcagcctcgccgaaacaaacgctgatttctctagtttatccggcaatgaaccattcccctccaccgagttgtacccgttagtccccgcgttacaaagctccgacgactcagcttccgccgtgtcgtttcaagtcacgttatttccaaaccaagggttttgcatcagcgttaatgcacatcatgccgttttagatggaaaaacgacaaccacgtttcttaaatcttgggctcacttatgtaaacatcaagattcttctttaccggaggatctaattccgttttacgatcgtacggtcataaaaggtccaccggagatcgatgcaaaagtcttgaaaatttggcactctattgataaatcaaaaagcttgaagttgttaccgagaccggagattgattccgacgttgttcgatacacattcgaactcactcgtgaaaatatagaaaagcttcgagataaactcaagagagagtcttcttcttcctcgcttagattgtcaacgtttgtgattacgttttcgtacgttttcacgtgcttaataggatccggaggcgatgatccgaatagaccggtcgggtatagattcgcggtggattgtcgaaggcttatcgatgatccaccgatcccgttgacttatttcggaaactttgtttactctgctgtgaaaatcccgctaatggcggggatgtttcttggtgaacaaggtttcgtggttgctgcgagattgattagtgattcggttgaggaattggattcaaatgtggcttggaagataccggagcttttggaaacgtatgagaaagctcctgtggactcacaatttgtgtcggttgccgggtcaacccggtttggtatatacgggttggatttcgggtggggaaaaccttttaagtcgttgttggtgtcgattgatcagagaggaaagatatcaattgcggagagtagagatggcagtggaggtgttgagattggcttctcgctcaagaaacaagaaatgaatgttttgatagatttgctacacaaggggataaaatgataatggaacaaaattaagatttaattcagtgtgtctctcttgttagcttgcatcgatttggttcgtaacattaatgtaaactttgtcattgttgatgttcaatattatgtatgtatacgatacagtattatcaagctaaaccttaaagtctaataactaaactaatgagaagcatgatatatgaaaacatgaaaccatttagatattattatgcaaaaaatgacaatgaaccggtccaagtagttgtcgaatacc

SEQ ID NO: 38269 - DNA, 2932 bp, Arabidopsis thaliana landsberg
  unsure (1)..(2932): unsure at all n locations
aatgacaaaaaagcttataccctccaaagcactctgccttgaataagaccataaggtacaggaccaaagtttcttgagtctctcgagttatgagtatagtcaccttgaacaaagacatgtcctttaggaacctaaaaccaatagaacatggaaagatcaattcaccattagtccaacaaacttaacaacttatatatcgaatcgaaactaaacaatctaaagtaaattgtaatgtacaccaataacactaaacattgctaaagattcaaaaatttccatgaattgcaataagctaaatcgagctcaatactgattaacaacttgtttcaactctgatcactcaatttctcaacaatgtatctactttcttcaaactcagttctactctaaattactacattcaaaatctgattcataagcaaaaccaaagtgaagtgaagtcaacaaggaaggttaagtaacaaaacataccacaatggtttgagattcatcactcttcactggatcaatcacaaagcttatacaatcaccttcaacaccaataactcttttaattggagtcttattagggttttctggagatcgtatcacaactatatctccacgactcggtttctgataccgcttcgagattctctccgctaataacatatttcccgaaggatgaagcgtcggagtcatgctcggaccataagcctgctcaaaaagactacatctttatggtaaattttcaataacgaatttgatttacaaaaaaagaagagagatttcgattgactcacataagccatgaatccgagatagtttgttgttacatggaggaagcagtagagtttcgcgagtaacacgccgcttttcatggcttctcgtgaagctgtgttccagaaagacgacgacggagtcgccattgcctatttcttcaactgtatcaaacgatttcacgaaagtgtgaaactttgagacgaatcgttgagcttgggccaatggtgatctttgttagcttttggtatactgtataatcataacccaatttataaacccgggttattattaacccctcagaaattgaaatttggttacgtatagaacccggtttatggtataagcgtgacttttcaaagcgatgggctgatggctcttacattctcaatagatgaatcatttgatataaaaggtggagaaatgctgttaacaacaaccttaattatggttgattataaacacaaaaataatatcattttttactgtatcatatgcttcagaaaactattttacatatcatcatctctcactacaacaacagtttgaatatcaccatcaaagctcatcgtggccagtctcggcttcctctgacttgtgagtctggtccaagcccttgtcgtcgtgcgagtataaacagnnnnnnnnnnnnnnnnnnnnnnnataaccaaatccttcagcagagttacaatatgcttctacttttccatcattgccttccaagattcacattgttgaggactatgtggctgcaagggactgtgtcactacacttgaagttgatggcttttgagcttttcgtggttccggttatgttcctgtacattatctcggatatgtgaaccgccgatgtctgcaaagaaataggaatcaaaagattaagtttctttcttgaggtttgttgactgaataagtcaatggttatgtgaaagaattaaaacctggttttgacaagttgatggtgaatcacagtagaattgatcgattataatcggattcgcaacgtcctgcatcactacgttctcgaaacgtacaccctttacgtaaccattaccaccctgttttaaagagtttcatctttcaatcaatcctgaaaactctttggaaggaaagcaaagatcaatagaattgagattttacctgccatgtcttgattcttagaccattagttgtgttctttaagaacgcagtttccaacacaactgcagtgacggttcctttcgaatgtccttgtccaagacttccaatactacagaacaagaaattatttgcaatcaataataatatatgtgtctcatttctttttatggttagagatggtttacctgattccatgtcctggtccacagtagatcctcttcatctttatcttggcgcttccattcacaatcgagacacaatcatctcctgttttcaagttgaagtgtcagctataacattttgagtttaatattataattaccatgatagtgttttgagttaaatagaagtttttggtgaagaacctgtgctgattttactgtcttggactacaacatcggtagatgcggttatatgaattccatcagtgttgggactgtctcctggagatgtgaccataactctagagattcgaactgtagttgaccgttgtatgatcaagtgcatctgttggctgttccggatagttaagcctctcacatacacatttgaacttgaatatatagttagagcctgtataaaagtagagactttcttataagcaaaatcaagcataaatgctaagtctaatggtcgatgaacacacaagggaaaaaacttagaccgttggtgcgcctacgcaaggctacaaaagaaaaacaagaaagatatgtgtcagatttctacttcatgattgattagaagaaagtccactttatgtaaagaagatacttacgttagacttgttcttcttgcaagaagcagcccaccatttggtaccagaaccatctataactccattcccttggaatacaactccttggagtttggaaaattgaagccaattccttgggaatttcgggtcccattggctaggctcatctggtgctatgattgttccatcaatctatcaaacccaaatcccaaaaaaaataataatgcataagaaaataaataataacatgttgttgtagcttaacgtgtaacaggcatt

SEQ ID NO: 38270 - DNA, 1932 bp, Arabidopsis thaliana landsberg
  unsure (1)..(1932): unsure at all n locations
caacaaacagcgccttcgaatcctttgttcctgttaatacagttaaattctctaaacacgataaagaagagcacaatagtctcatgtaatcacacagagaggacattcttggtctgataaagcatcttgagagtttgtggttttgcagtatggctttggctttggcttcttgcgtatttgagatacagacgtatttctaagtaaacgggacttttaactatcattttctctaagaggcttaaatggaagattccgcctggtgatgctcgagattgcgtaggagaattttcgtaaagatcttagcttcacgaggcgttttnnnnnnnnnnnnnnnnnnnnnaaggaatctcgattctcctccattctgcataaggcttacgtgatgcattgcatgtcgaccacccggtattgtaaactgaattagagcaagcacaaaaagataagatatatgcatcagttgttgtaaccaacagagaacacgacatattgtttattttaacatttttacatacctgaagaagcgcaaacgcagcacatgctttgagtgttgaatcaggattgcgcaacattgttacaaatcttccaatttcagcaccactgcaaagaaaacaatacatttaaaaatttcaaatcagttttcaatcaaacacaagacaccgctgatagagatagatagaggcgaaaagatttaacctgcatctcaaatggccagcttcttgtatgcgagctctctctgtgacttgtgctagcatagtaggggtagatgaaacaacaggagattcaaatatgtgaggatctataaaacttaggacaaaagcttcaatgtgtttaagagccatgtttcttgccccatctaagctaatgtttttcgatgtgctctctgatgaagaagttcctatcatcagagcatattcatccatcctgttgcagatcgataattcagatcgaaaaccgtgagagtcggattgaatttgggatgtttattaactgagttatatattaatataccttccatcaaacatgtatgccaaagccaatgcagccatgaatcgagccatttttgagacagaagacgaacacaagtgaacaagagctggaactcctccttcctcaacaatgcggagtgcattaccaggattgaaagcaagattccatagagctcctgctgcagtttcatgtacatcctgggaaaaaaaccaacacattgaggaaattttatatcagattatccaagatggcttggctaagctcaaagttcttacctcggcttcagaccgtgcaagtgcaattagaggtggaaccccaccttcacgtccaatcgcaacgctgatggagatcaaaaagagcaatggtaggattattatcaaggaaagtgacagtaacaataaattggtaagaaactcctttaaaacttctctgtaacaaaagcctcatcttggtgcaagcaaaataaaaagtatcagcatgtgtgatatgttaaagcaagatggtctgtccttatgttgcttctgcattgatcttaaacatatcacgtgacaatctataaacagaacgcattaaacttagattcagatgtatttagcacctgtttgcttctgacaccgataatccccaaagtgcaccagcagctctttcttgaagacctgtcgatgcatttgaacaagactgtgcgagcgccacctaaaataatcaacaaaagtgatcaattccccttatatatgcagaggaacagtgtaatcatactaaacaaactggaagcataccaaagcttcaacaccaccagctacagagatagattctcgattcttatcatcaaacgacaaattccatagagcaccagcagcttcttgtctaactccttcatgaggcgattttgtaagttggacaagagcttctaatgcacctgcttcttgcccaaccgcagcattatta

SEQ ID NO: 38271 - DNA, 1885 bp, Arabidopsis thaliana landsberg
  unsure (1)..(1885): unsure at all n locations
gcggaggatgttactgtgacttatgatgagagctaaaataaacattgttgcgactctaattaagacagttttatgtttttagtaagattatgaaagatgattttgtgttaatgaaaaaatcagtgctcaaataaaagaggtgggccttcccaactctaatgtaatagtgtgggcttttaatcatggcctttttagggacgaaaaagtccataattcagcgaaggaaataacacaacggctagtttgataaacggctccttccatttctgtacccagcggctactttctttcaaaaacccttcacagcgtttcaatacccctgtttatttatactttacccaaattcccaaacgccacaatcacttgtctgattctctcatataatagagttttctttctcttctcctctgcttaatttcccagaaattactctttctgtgcttatcggattcaatagattcttagtaaatcgtaatggagacaccatcatcgacaagaagagtcacgagatctcagacccgctctgctatcaataatctcttatcctcaagtaagtctccatagtccgattccctgattttgtttattgagtcggactattgtttctggatctgatcgtttataatttatctcctacagagaaagcggatgattggtcagataaatgtcaatcgaagtcggtacaaagaaacggtgcaaaagacaggtctgcgttgtttgacataaccaacgactcaccgatcgtaggtctggcgatgcagacactgtcctcagtagttgttgggaagaggaacatgagcagaatcaataacgctcctggatctggtgaggctctcttgagaggccaagtcnnnnnnnnnnnnnnnnnnnnnnaggaagaagcagatctcaccaagatttcgttggaatctcgtcctttcatccatctcgttacttctcccatgggtcttctcgccccaactccggccaacaccccccaagttcttggtttctcagacgaagtgcaggttgtgatcacttctccggtagttgcaggacaattcagagcaccgtctcaggtaaaactagatttgtatatgttttttgctcatagatggaagattcttggggaatgataagaagatgttaacttggtttttattcttgcaggtggtggaaagcaacatgtttgatgagaaagaagaaagcttggagttagagaagagcccgagcattactcggtcattgcttctggactttagtgataaatcagaattatgggagagctcagactgctcatctgtggtgactcaaaacccagaggatgataactcgtcggtgtggtcgatgcaggccaatgcaagtgccaaagacgaagagtatgatgatgaagaggaagaagcctattcttacggtgaggaatatgatgaggaatactacgacgaggaagaggaggaagacgagggagggattgtggatgggttgtgtgagggaattaggaagatgagcgtagagactgactttgcagggaaacacactagatttgtgtatgacagtgaagatgaagagattgtggaggccaaagatcaatctccaggagtgttgcgtttgaaaggctttcctacaccgacaggaaaacatgtcagatttgccggtgatgaatgagttcagtttgaatctttcttcttggagttgtgacaaaaagcctcatatgtctcgacttttttttttttttcttgttgttgcttgaagattcacaaatctgattcttgttattaccttgttgttatttttcaataactaaaagtgtaatcggaatatgactctttttatttttatcttctcttgcttgttgtaaaaaaaaggctttcaattgtagtctatcctaaacacttaaaaatgaaaa

SEQ ID NO: 38272 - DNA, 3116 bp, Arabidopsis thaliana landsberg
tgtatggaggagacaaccaatgaagggaaaagacttgatttttgttaaggaacagaaggaacaatggtggaatgtaggatgcaaatgaaggggaaggtgatgggacagacaaaggtgaatgcaaaaggaagaacaaggcacaaatggaaatacctaattggggagaaaggaatcacttgtaacgatgctgacgaattaaccaggtgatgaaaaccctaatttttaaatagaagaactgaatcctataatgataatggatggtgatgaaaactaataaagagccccggcaaatcgaaaccctaattcttaatgacagaattagttttacgttttccttagaaggtttcctgggaagaaagggttcttgaagagggcaacgagcctgcgtcttgtagtgagaagaagtgttgttcatacctgcatccattatcaccaaacaaaaacaagaaaacagagcaaaacacacaaaagcgatgataaaagaaacgaatattaaaagatctagaagattaaacgaaatcagacaaatacgaatcaaataaagctagcgaagagggaatcgttccgagcagagagagagcgagtgatgaatttcgtcgcagatgatgagacgatcgagagtagattgggtgatcgagaatgtacgaaattagggatcttataaagcagtggagtcaatttttagggtttgactctaaatcttacaattggaaactgtaacggctatatttcggagagagacgttgtaaaatttggttttacggtaatgcccctggcgctaatgtacactcttcgtttatttgcggaataaatctgcaattcttaggctaagtaaatactaataaaattactggttatactcctctcaaatcttacaaaccaaagcaaaaaaacacttggtattacttatatgatttaacaagactaaaccaaaagacaaaaaaagagttggtttaaatattgtggcaagccccaacacaagaaaataggcattaccagaaccagaagagttccgttatatgcacccaaaaaaaagaggcatcgtgagtgagagatagattacacacattcttacgtttacctttatatacaagttttcatctacgctacacatactttacactacagggttgaggaaaacgttgtagccttgcttagttattcacttattgtgtaaaccgggtcaacattgttggttctttccgtttcttcaccacggaatatatagacattgagatgaagcggttttgtttcagaattggctggctcaaacacacagacatcaccttcgcgcaagttgttgtcttgtacaaatttcttccacccggttgaaatcccaccactaccacgagctccgaaaatgttaaacttcatctcccatttcgtttgatccacctgcatcaccacttcttgacgtgtgataagcatgttcttcacgcaccatttgtatgggattgtctgtatcaaaagaaaaatgtgacctcttctattttttccaataatcgaagcttcaaggactatacacaaagcgatgcaaaagtcttaccagaaaacactttgataccacatgagagcgtttcatgaacaccaagaaaccatccggcgaaatggctctcttggccagagataaggctttcttattgcttccagctgaaatcatctccacgtcttacgacagttgataaggtatattagtattttagatgcatgataaatgagatagaaactgataaatatatggactcactccattatataaagttataaactttgaagacaaatggatcaaagcctatgggtagtaagaagttaataaagtttcggaacaagaaactttctctactgaatgagaaagatgagacaattctataatctccacacctaatatccagaatcatataatatccaagactaaggaatcagttactccaagctgttagcaacattctcaaaacctgaaactttaatcccaacagttgcatgcaaaacagagtctacagagtacagacagggcttatcagatgaataccaagaaacaagtgcactgtgtaatcactaagtaagaagattttcataccagctttttgatcgagattgtcattacttaattctcttcgcatcttcttaaaaccgctaaggggatacttcccttcactgactcgtactgtactagttggagatataacaggaagctgggcagatgctgtatcaatgtcagagttaatatgttcttcttgctcataaccggtgtgagatgctacaagaagcggatttagtattttatcaatatcaaaatcaagatcaatgtcaatgaggtcttctagctcattatcaactggaggagatataacaagttgctggtttggtgtagtttcaacatcatcagggttaaagtgtctcttaggagacctcgaagaggttgcattaaaatcaataatacctttggtcttctctgcatgcccacatttcctgacgaaataagaagtaggtttctcacataaagtctgtccatcgaaaacaagcacttcaaactcagacactccatggaacttgaagaccaatagatcattctcctctagcgaatgatctttcacaaacttgtcccacccaaaacgaaaagccattgtcttttcatcatcttcctctactcccacattatatgtaacgccacttggacttttgagagtcacaatctgaggcagcttccttttgcagtgtgttgaaaactttcgaggtatgacctgtaataaattgcaaaaagtggtaatttttatgttagaattggcaatcttaggactcttaaatccgcaaagaactgattttgagagaaaaaaacaaaaattgcttaaacccctttgatacatttgagtgtaaatctccaaattaaaagccggtggaaaacaaaggaaagtgaatacatgaagaaattgaaagagtaacatgaattgctgataaagatgcatgaagaagaaggttcttagagaaagtgatagagacataggaggcgagtgtggaaaccaggaaggaggacctgagtcaaatggagagtttgaaaatgagtccaaaagagaaattcttcccatttcatgcaatcctcgcaattctcttccgatctt

SEQ ID NO: 38273 - DNA, 7365 bp, Arabidopsis thaliana landsberg
  unsure (1)..(7365): unsure at all n locations
atccgctctcctaagaaaatagaaagatactagttacatcaaaacgataagtagatttatggaatatatctcacctcgtcttcttagacataagaaatatcaagaaaaaactccaccatacttatgtactattttttctttatttagtatcaccatatttatgtactatcaagaaaaaactccaaaatttattaatttttcttggccgttaatctagctaaacgaacgaaaagtttatgcataagtttggtggattttattttcaagtccaatagaagatgatggctttgtttccacaaatccacccatcattttgatagaacactggttttcacggcttcttaagtggaagtatcgagatgttcaaaatcaataaattctttggaagtttgcttatttaatcaacgttatcaataggatactggaatatttgcctctagcataagacaatcgtgttagaaaaacatcctctgaccatgagtcattagccttgtggtttaacatattgtagtgatgatagagatctttgtacatgccaatgtagttgcagttttagtaacatatataaagcaaaaccgcattccttctcatcggaagaactctttgtcgtaagagaacttcttggtgcagccatgtttggcatttgtggaagcagtcattgtgacatgcccaaatgccaacatgattgcagcgagaagttctcttatggcaaagagttagtccatgagaaagaatatggttttgcttttgttattgaaattactgtaactacaccaacatgtacaaaacttcactacaatgctaaccataaagctaatgactcatggttcaggtgttgccattacgataatgcatgggtatgcattagtgaagagacttttcgtcattcaagaatgtgaaaatggtccaccaggtgtagttcagtgtttgaaggagccgcaaggtcattatatatagactatatacatgttcgaattcacgattgttgataatttcaatttactttagaatcccactatcaattaaaacataatatttattttaaataaaactacatacgtggatttgtgaaacattacaaaaatgtaagtggtgattttcaataaaaacaagtcttctcaaacaaattggaccgacaaaccagtgttgtatgtgatgactcataactcattgtagaactttaaagaccttaaaaatttgtcaagaaaactgcaatagttttttgaccaaaaaatcgaaatattcaatagtcttgcagaaacagatttacatatttcaccgaccaaagaaaaagaaaatcatatttacgacaactttttgttctaacaaagttttttctgacactaaatttgatatgcattaataaacacaaaaatccaaaatatgaagagttttacgatttccctcatttccatgaccagtttggtacagcgatcgatcacatagaatcgttacttttagaagaaaaacaaaaacaaaacgataaattgaccccaaaatacgagggaataaaagtataataaaacctacactaaacagaaatcaagaatatacacgtggcaatggatgataagctaattatccaccctctccaccgacgaacgctatcaccaccggtagattgactctcacggctaggtttcgaaccaccaccgtctccattcggattaccaccgtacaaatgctgaatcccttcgatatcatctttcgctaactccactttccgatctccaccagaaatcgccggaaacataatcgcatcttccaccgatgaatgacctaaccctaaaagatgtccgatctcatgaacagccaccgattcaagatccaccacagacgtcaccggcaaaatccgacggctaatttcactgttagagatcaaccaatcctcatcaccgtctagatgtaacatccccgtaggaggcgaagaagcatgcgctaatgttcccatagctccatcaaacggctctccatctccatgttcaccggagaagaatccgatcactatatcagcacggaggatagactcagagcgcgtgaaattcaacggagtcacctccgcccaacgcatgaaggcgcgtgagaacacgcgtttaacctcgtctgttaaattattctgcggcacaaacgcataagtcagatctcgtttccgtttaggccaccgtggcttcccagggaaaaacgagtatttcgccgtcgtacggagtttcttaccaccgttcatctccgaaaccccgtcgatcaaatccggattcccgcatctcgatttaacgatttgccggagagtcgaggaatcgagttttccggtgactttgagattgaaatttttctggtaagtgttgatcgctgattgaagcacgtcatcgaaatcgtcagtgcaattaccggtggtggtgatgtaaccgaaacggcgaaagtattgtttgagttttgagagaccgttgatattttctccgatgtgacaaccggcgagtttggagaatgtttcccatgcgttttgcgttgcgtttaggaattgtaacggtggaattgaagagacgttagagtagaattttgctgagattggattcactgtgaagaagaagatcaaaatcgttagaagcagtgttctcatttctatatattttggggaagaataaaatgggagaagctacagaaaaaaatgaagatgaagagtttaaacgacgtcggtgtggtttatgaagctaaaatgcttagctcacttggctccatttttccacacgggtgttaatgctcatacgtgacatgcttttgagaaaaagctgaaaacaacttatattaattcattaataaagtaaatattaaaattttgaaattctagcacaaattacataacatatcattctttaaaagttttccaaataaacaatattaaagaatactaattcaaatatttttcgtatataatatcatgactactttctattaacaatttatagtcaaattatatagggttataaacttataatatgaagacttaagtacttttctaatcaaagaaagtatattaatataatattatcaggcattagtcagtggctactgagtaaagctttgggccaccgagagaaaccattttctgagagcacactttcgttgacttctctttaaccaatgtctttaaccacagtccctacgctcgcaatcagatccggaccatccggtcatcactcgatgccggttcttggttttggaaccgccgcttctccgctaccggaaccaacgatgctgaaagagacggtgattgaggctatcaagcttggttatcgccatttcgacacctctccaaggtaccaaacggaggagccgatcggcgaagctttatcggaggcggtttcactcggcttagttcgatctcgatctgaattctttgtcactaccaagctttggtgtgctgatgcaaatggtggtctcgtcgtaccggcgatcaaacggagtttgaagtaagatttttagattccttactgattttcacatgaaattagaatgaacggtttcaatcactgagagtaggtgtcactattagactgtatatatgatagtccggttttgtgattccggttaagttaaattgtgattgtatatggtttagttggtttagcgtagatgtatacaaacatacttgtaaacacttttacgattgagaaatacagaaaactatttcacatatctctatggatcatgttctctatcagtcaccgtgtcaattttcatgattgaatattattttgggagtgacataacttaatgtaatgtaaaccatctatgtaacaaatatggttttgcagaaaccttaaactggactatcttgatctttatataattcattggccggttagctcgaaacctggtaaatacaagtttcctattgatgaagatgattttttgccaatggatttcgaagtagtgtggtctgaaatggaggagtgtcagagactcgggcttgcaaaatgcataggagtaagcaatttttcatgtaagaagcttcaacacatactctctatcgcgacaatcccgcctagcgtcaatcaagtaaacactacttttttttactctttgatttatttttcagcaaacaattccaattcaccctttttttcttttatggatgaatgtcaacaaggtggagatgagtccaatatggcaacaaagaaaactaagggagctttgtagttccaacgacattgttgtcacagcgtactcggtgttgggatctagaggagctttttggggaactcccaaaattatggaatctgatgttctcaaagaaatagcagaagcaaaggaaaaaacagtggcccaggtactttcaaaagttttcttaaacgatatcaaacaagaaaaatacaaaaaacaattggtgacatttatatgaacttttacaacaacaaaaaaaaaaaaagtggggacgtttatcagttattatcaatttatcaccatcaatagtcagtcactatcttggtaacatgaatctcaacagaaaaatttgagatgtattcatcagctatatccatggagttcaaatactattaaaatttgacaatttcggtttttggactacaaggatttaaagctcatatttggagttgtaattacaggtgagtatgagatgggcttatgaacaaggagtgagcatggtagtgaagagctttaccaaagagagattagaagagaatctcaagatatttgattggtctttgacagaggatgagacacagagaatttcaactgagattcctcagttcagaaacgtccacggagaggtttatacctctaagaaaggtcccataaaatctgttgccgagatgtgggacggggagatctgatcactttgtgtgaaaatagcctagtgaaacggcaaaattatcattcgtcacaatgattttcttgtcattctctctaataatgaataatgaataatgaataaggactatctcaaacataaacgatttgtcatttagacacagcgtagtacggaagtggagtagaacttggctaataagattggattctaataatacattttttaaaatactaagaggttatgggtctaaaccctaaatttgaaatgggacaaaactaagggcatttgctccttattaatcatttttaaattagaatcacaatacacaaaccaccaaaaatatttaacagcgggagaggggagaactttcaacacctcgctttctactatcttgtgttccaaggaacatgttgctctattgtccatatcaacgaagttccgaacaaagccataaaacactaataattgagatttttaacaagtacacactattagaaagtaactcaatgaaaatgacaatggattgaatccatccaaaacctagtccaataccgatggataaattcaaagccaccggggaacttggacacgacaccgacattagacaaatgattggaggtgcgtttcacctcttgtagcaggttatgggttacacgtgacatcctccttttatttttgttttgttttttgttggccactcgtgacatgtttttttttctttacttgtttttggtggctagtggctacgaagtagtgagtataagtttagccaatgagaaacgattttctcgtagcaaactttctttgactttttggcgcttcttttcaccaatgtcagctcttacgttccctatcggatccgttcatcacttgatgccggttctagctcttggaactgctgcgtctcctccacccgaaccaatagtgttgaaacggacggtgttggaagccatcaagctcggttatcgtcacttcgacacctctcctaggtaccagacggaggaaccgcttggtgaagctttggcggaggcggtttctctcgggttaatccaatctcgatcagaactcttcgtcacttataagctatggtgtgccgatgctcatggtggccttgttgtaccggcgatccaacggagtttggagtaagatttgagttccttattatatagaaaaggatagcaaatgagatttgtggttacatgaaagatttaaatagacttttgaactctagatggttaaactcaaatatatacttaggggtgtgcatggatactccaaaatttcatgatattcgagtttggattcgttgatatatattcgtactcgttggtatcaaaattggcgaaataatattttaagaacgaaaacattattataactaataacacaatggtgttaaaaaaacacaataaaaaacttaagtatatacgaaaaaatatcatttaatttttttaattttcttttcataaagattttgggacattagtcattaatgtataacatctttacatcgtatatatgaacgcttaggccgtatcttagaacaatgcttaatcttaatcatcattttcatatcatgttttgtagaactcttaaattggactatctcgatctctacctaatccactggccggttagctcgaaacctggtaaatacaagttccctatagaagaagatgactttttgccaatggattatgaaacagtttggtctgagatggaagagtgtcagagactcggagttgcaaagtgtataggagtaagcaacttctcatgcaagaaactccaacacatcctttcaatagcaaaaatcccacctagtgtcaatcaagtatatttaaaattctctcttatttaatttatcaaataagttcaaccttttttttataagaaaatattggattggtgaaataatttgaaacatttgtttgtggataatgtgaaaaaggtggagatgagtccagtatggcaacagagaaaactgagggagttatgtaagtcgaaaggcattgttgtgacagcttattcggtgttgggatcgagaggagcgttttggggaactcacaaaatcatggagtctgatgttctcaaagaaattgctgaggcaaagggaaaaacagtagctcaggtactctccaaagacaattttaaaattactaacgaaaacatttttaaatttcttttaacgtataaatattaaaaaaaacagtcgtaatttaaaggaaaattttgttaattacagaaaatattttaacaaatcggtaaacaaaagtcattgttatattcatttgaaaattagttttatttttattgtgataatggctaaaactatctttatacgatatttaattttggactattgacttatttatttgtttgatacatttttatattgtgcactcactctcgttgacccnnaaaaaaaaaaaaaaaaaaaaaactcactctttaaacgggtaataaagtgatgtggagaatttttggggaatgaaagcatttaaagctcatttttagagttgtaatagacaattgactaggtg

SEQ ID NO: 38274 - DNA, 8955 bp, Arabidopsis thaliana landsberg
tgcagcaacattatgtgagtatcatataggccacttagtttatcaaacttttccttgaaggtcagattctttttgtccaattcagtcagctcagctaccaagtattggactaattcatctagcttcttaacctcctgctctgagctgactagtttttcaaaacaattatctgcactcagctgaacactcgtcttttctttctccaacttctcctggatactaacaagatctttgacctcgtcttcttttgttgttaactcaagatgaaccttctctagttgggaattcaagttttcaatgttgagttttctttcagctgcagatgcttccaattttgttatcacagcatctgccacagacgaagcactcagtaagaagacaaaaatgctttaaatcatgaacgtcacagagaaatgtgtggccacatattcaagctcttcaaatcgcagtctagaacaaaactaattcaacaatcgtttttctaaggcatgcgaccaacggcattgtgaattcaaaaggacagagaaatgtacctttcttctcaatgagactggcagttccacaccgttcagtttgatagaacatttccttctgttgtttctcgagtttgagctcctccaattccttatctcctgcatttttatctcaaagatgttacaaacttggataccaattgcgttacaggtcataaatagaataatgcaacgacttactgcttgtgatttcttctttagcagcatctaatcttaaagacatgtctcgcatttgctggtttaaagagtctattgcttctgaactagtactgaatttggtctcaaaaaaacctttatccttctcagctgcagaatgcaagttaggaaacatataaagcaacacagcatagataagatatttcacaaaataagatgactgtatgatcatttactcttaccatcctgaacttgggaagccaaatgctgcagagtctctgtaagttgatcacacagagtctttgttgaagagaacttagactccaatcctctccaaagcttctcatcttcctttttcctaactctgagcttagcattctcattaaaagcgttctgcagtttctcctctaaggcatagacatgttccattgactttttcagcttacaattctacaccatggaaaagcaaaatttctttcaaattgaggtgaaatatgaatctgctaactattcggaagaacaaaacaagatctcaaacctccagatcaaaactactttcataaacgcaaccctagcaatatacctcacatgcacatccatcgaatttaagttcgtaaacacaaacaatgtatgaagaaaacaagatagcttccaaaataccgccaattcgagatctgttctcatcgcagcctgatccttcaccagtttctctgttaaacaaccgtgaaattgtcgaaatcatcataacagtcgaatttagagaagcggaacgaaatgcacaagagaaaaacctgcagtgagtttcaaattcgagaaacttccggaggaaacggaatccggaggcttacgattggagaaggagtacatattcgccgatccagacaacgatcgaggtttatccaaactcttcatcaccggaaaccctaacttctgcatctctagatcggagataaaattgaaatgaaaaagatgacgaaatcgatctatcgctctcttcgtctctcgctctcgctctcaatttcttgcttgcgctctcgaattgtgtgaaaaaaatctgaaataaagttgagcgccaaacacgtcggtggtcttttataccggagaagtcgattaattcgactaacggcaaaattttgaaatatgcttcacgcgctagagaatagcgtgaatcttacttggttactaaaaaatatcgtaggagtcacgtggcacaataaacggctgagattaaaatcaaacgcagtgaaacaaaaacaaaaaccctcggccgcattagcttcttcttcgtcttctttcttcttcacttctgcctcttagggttaagcaagagagaaactagagatgaggttgataacgcacaacatgctttcctgcaacatcaaaggagtcaccagtggatttcctctacggatcgaagctgggaacgtgattgagaaggaagtcgatttcaatcccgattttatcaggcacatgttcgcgaagattgagtggaaagctctggtggaaggtgcgcgttccatgggatacgctgagttaccggaggaatctccggacgccgcggtgctgaaatcagatgagcccttccttaagaaactccaccacgcgttgctcgagctccaccttgaggaaggcgcgcttgtttgccctgagactggacggaagtttccggttaataaaggaatcccaaatatgcttctccatgaagacgaggtttaattgattgtgagatttttccttgtaagtttcaatctatgatgtttctgatgatgtgacccttttagtgagatatgcaattgaatgattccatttgaatcatccattgttgtcgtttttgaatcctttaattgtgttttatcaaagaatggtgcctgattgcaaaaaagtttataccctgattttgagtattgtttcaagtagttggtcactgttctttattattggtgcatcttgtgaatttggattgcattgttggtctctcttaacccttctgcttatgggtgatcatgatcctcttgctcataaagcactgagcttagcatctgaatttgtcaaatctcactacttacaaaagatgtggttgatatagtgcaagctcgacttatggctccatatatgctagttttgaatatgatggattcatgattctatccaaagccttgggtttctgtgtgctggatgctttcatgtcgtgaatgcaggcagaactgattcaaggaataaaactcttgttgatagtctttcaatctggatttacagaaactactttttgactgatatggatcctcactagatcaatatatcaaatacattgcacaaaagagtttaactaagtcctctatcgttcatgtacttgcgttttagaacctactaataagcagtctcaaccacaatacattgatttttcttctcagtctatgtcctagcatctacctcaggctttctaggcttcattgtttgcaattcttagccttgcgactgcaaagtttaacatgcacgtctgcagttttggtcccatggttagttcgtttatgtgacttttgaaagtttcgtttaatacttgtactcttttaaacaccaaaatttgataaacaagaagagctatattaatattaatcaacatttactatattttcatcagattatatgtatagattaattataatcagaatttatcattacataggtgaagattattatcaaactgtacaactttatagtttattatacacgaacccatttttatgattgaaatggcgtccaaaaaaaagaaacagggtcagattgaaatgtagctcgttgataatcaatcgcagccgttgatcatgccaagtggcccctgcgatattctgagtctctgacatcagcataccgttgggggaatgagtcgccttcatcggtataaataactttatttcagattttatgctcacacaatttcgagagcgcgcgcaagaaattgagagcgagagagtgtgagaccaagagcgagggattgattcgtcatttttgtagcttactttctcgatctccgatctagagatgcagaagttagggtttccggcgatgaagagctttgatcaactccgatcgttgcctggatcggcgaagacgtacttcttctccactcgtccgcctcaggattccgtctcctccggaagtttctcgaatttgaaactcacagcaggtttttctcttgttttatttcaccgcctctctcaaatcgtactgttatgatgataccgacaatttcacgtttgttgaacagagaaactggtgaaggatcaggctgcgatgagaacagatctcgaactggcggtaatttggaagctatcctgttttctttatacattgtttgtgtttaggaacttaaattcgatggatgtgcatgtgaggtatattgctaggtttatgtttatgaatatagcttggattatctgcgtatattgctaggtttatattggaactataatttgtgattgggaggttcaagctcttggtttgttcgtctgaggtaatggcatagacatatttgaaaggaaatttgcttttccaatggtgtagaattgtaagctgaaaaagtcaatggagcatgtctatgccttagaggagaaactgcagagcgcttttaatgagaatgctaagctcagagttaggcaaaaggaagatgagaagctgtggagaggactggaatctaagttctcttcaacgaagactctgtgtgatcaacttactgagactctgcagcatttggcttctcaagttcaggatggtaagagtaaatgatcatacagccatctgatttttgtgaattatcttatatacgctgtgttgctttatctgtttcctaacttgcatctgcagctgagaaggataaaggtttttttgagaccaaattcaatactagttcagaagcaataaactctttaaaccagcaaatgcgagacatgtctttaagattagatgctgctaaagaagaaatcacaagcagtaagttgttgcattattctatgttttgacctgtaacgcaattggtatccaagtttgtaacatctttgagttaaaaatgcaggagataaggaattggaggagctcaaactcgagaaacaacacaaggaaatgttctatcaaactgaacggtgcggaactgccagtctcattgagaagaaaagtacatttctccttcgttttaaatttacaatgccattggtcacatgcagtaaaaaaatgatggttgaattagtcttgttctagactatgatttgaagagcttgaaaatgtggccacgcagtagatgggaaaaagcaatgtttctgaaagactttcatgatataaaacaattgtatcttcttactgagtgcttcttctgtggcagatgctgtgataacagagttggaaacaaccgcagctgaaagaaaactcaaaattgaaaaattgaattcccaactggaaaagctacatcttgagttaacaacaaaagaagacgaggtcatacaccttgttagtatccaggagaagttggagaaagaaaagacgaatgttcagttgagttcagatgaactgtttgaaaaacttgtccgctcagagcaggaggttaagaagctagatgaattagtccactatttgatagctgagctgactgaattagacaaaaagaatctgaccttcaaggaaaagtttgataaactaagtggcctatatgatacccactttatgttgttgcgaaaagacagagatcttgcatcagatcgtgctcagagatcgtttgatcaactccagggcgagttatttagagtagctgccgaaaaagaagctctggaatcttcaggcaatgagctaagtgaaaaaatagttgagctccagaatgataaggaatctttaatatctcaactttctggggtacgctgctctgcaagccagaccattgataaattggagtttgaagcaaaaggactggttttaaagaatgctgaaacagaatcagtgatttcgaagttgaaagaggaaatagatactttattggaaagtgtaaggacatcagaggataagaaggtataaaataattttatatccctatgcactgtatctaatgcattcttgtaatactatatttttcttgtatatattgcagaaagaattgtcaataaagctttcatcattagagattgaaagcaaagataagtacgagaaactgcaggcagatgcacaaagacaagttggggaactagagactttgcagaaagagagtgagagccatcagctgcaggcagatttattggcgaaagaggtgaaccagctccaaaccattaaagaggagaaagggcatctaatcctccagtgcaatgaaaacgagaagcagttcaaccagcaaatcattaaggtctaaaaaatgacttctaagtcatggctttaaggttttaaaatcgacatttttagtactcatcaaatatgaatcccactgcaggacaaggagctactggcaactgctgaaactaagcttgcagaagcaaagaagcaatatgacctgatgctagaaagtaaacagttggaattgtcaaggcacttaaaagaattatcacagaggaacgaccaggtatatctgtagcgatgtttccatatatttagtagaataagaatcgtgaggcccttagctgaatctgaatgcaatatgcaaagacactaaagcaattaatttatctctctatgttgtttttaggcaattaatgagatcaggaggaagtatgatgtagagaagcatgagattattaattctgaaaaagacaaggtataatgactacagtatctttcgttttagtcttctgaacaattgatgatgtttattgtggttctaactccaggttgaaaaaattatcaaagagctgtccactaaatatgataaaggactctcagattgcaaagaagaatcaaagaggcaactgctaaccattcaagaggaacattcttctcgggtatatctttgaaattaccttttatttaacagatcatactgtttttccacatattggtaaatcatttaacgagatttctcgaaaaggttctttacgaatctctgagctaaactaccacatcttatcctgttactgatttcatgcattgtccagtccgatactatcaatgagtgttattagattccaaagaaacctgatggttctgaccatcctcaagcatgaaggttcacagcttagaatgaatcaatcaaactgggttgagttgttagatttaataacagaaaatgaagatatctgaaatcaagttcctgttttcttgtatgcattatctggttggaagtttatttctgacacatgtcaagcaaagttcgaattactttgcatattaactcagaaaagctgcgtgttccccagattctcaatattcgggaggagcacgagagtaaggagctcaatctcaaagccaagtatgaccaggaactgagacaaaatcagattcaggctgaaaatgaactgaaagaggtacacacagatataaattcatagctcaaacagatgaaagaataaggagcctctggtattcgaatattttgtatatttatccagaggataacagctctgaagagtgagcatgatgctcagttgaaagcattcaagtgtcagtatgaagatgactgcaagaagctgcaagaagaattagatcttcaaaggaaaaaagtaagtgctttttaagatccattataagatgaatctttatgagtttaacttatgggctaaccttgcaggaagagaggcaaagagctttggtgcagttacagtggaaggtgatgagtgacaatccacctgaggagcaagaagtaaactcaaacaaggttagagtggacttcattttcttccttatctatccactttaaaatatgtttcttaaaataacagaaacagggtaataactggaaaagttgtatccgtaactagatatcgttagcattgcaatgtatggttgacagaatgtttactgttttgtagaactattcaatttcgaaagattctcgccttggtggtagcaaaagaagcgagcatataagagtgaggtctgacaatgataacgtacaggtaaactgtagagaaacaaatatatagttttgttcgttactgctttgtcaaggccacatatataaacacttcctcatggatcaaatgcaggactctccttttgtaaaggcaaaagaaacacctgtgtccaaaatattgaagaaagctcaaaatgtaaacgcaggaagcgtactgagcattccaaatccaaagcatcatagcaaggtaaatatttgaaccttttacatctttacacttttacatcaaaatcaccctcatcgtttggtttgttgtttaacttggcaggtgacacatcgtgagtatgaagttgaaacgaataatgggagggtaaccaatccagaaaaagaaggaaattcaagcatgtatgaggtaccttgtccatcgaaacaagaaatatctggaacatattctagaaagctagcttgccactctttttcaacaggagccacaaagacgcaggactagggctacacctaaattgaccccccaaagtatcgccaaggtaaaatacacagtcactacttttgctgatgcttgaaatgtattaaacccctatcaagtaaacttagtgctgaagcagagagtaaaagagtaaatttgatgatataggaaaaacatcatactttcagaaaaggcacaatagttttttttctgtaacttgatttattctaccttatcttccttggtaataaaatagataatctgacaggtgagaataataggagctaagacttagagctgcttagccaactgttaggtctatccaagtataaatacagtgatccttgtgctatggaaagtccggcacttagaaatgtagaaatttgttttaagtcaagaagttatggatgctgctgctaggttctaaaacgtgttctgagttaattgcatattatgcagggcacaggaatgacgagtcatgctcgctctgcaaatattggagacttgttttcagaaggttctctcaacccatatgctgatgatccctatgcatttgattgaagtctacctcgcaaagttagttcccttcactagactatctctctcactttcagaaacatactctttgtagaagcttgctcaccctccgatttacaacatctgattaatccgtgacctgtttgcttatgaactagctgcctctaaaaaacaatgataaacctttgcataaaaaacattgatctatt

SEQ ID NO: 38275 - DNA, 5205 bp, Arabidopsis thaliana landsberg
cttcttggaatgctgtggcccaggttaggtctgtatggtcctgtaactggatctgcaatatatacctgtagtcacattcatccacgcatttgtcacacttctcacaacgccatgtcccatctccgttatttgtgacctttttgctgcatggacgatctccattcatgataggacaagccgtatagcagaaattttcaaccttcatgaatgaaatggtggcacagactgtgatccagtccggcttctctgaggtccctagcttctcgtccttgatctgtgcaattaccttgcgaacttcttgtctgccaacaccggaaaactctctagatatggaggtaaaatgagcattccttccttctctctcataccattgccttaattctctggcttcagggaaatctggctctataaagaattgacttgctccaattgtgctcacttgcttcccgttgaattcaccgatccttcccgctttcaaagcaagaaccgggaataccccagaatcacaaagattttgcaatttctgtccttcggcgttgcagaaattaccccacatggttacctcaacacttcggcctgacatatccttcaactgaagagaccttttctgtacctcagttaagtttttccgcatgattgctactgtcggactgatggacgaaacaataccaattagatcagtggtgctgttgttctccatgttttcaatatcacttatgttacgaaaatggaaatgatagcgtggaatggtaccatcatcctcacaagactgtatcgttgatgcagagtccaaatgtatttcataatcattgggaagatgattaaagttcttctgagcaggcttcaaatttccccttgaaatcagataaacattacccactacaatcttgtcaaagaattgatcaaccgcatcattaaaacaagtcacccgtatttctccaccatcagcatcaagaagatcaaaactgaataacttcccttccccacgcggattattaaaccgcctcagctctgccttactcgtgaccctaaccttgatggtccaccgaccctggtaaggattaagagcagcaatcggatttatcctcggaggagcttcgttcctagccacaggtcccctgttaacatacatcggtggttgttgtggctggtaagctgactgaactggacgggaataagcagttgttgcagtaggagcccgaggttgctcctgcctagagcctccataacctgcatttgagctcgcatacggtctagtggaaggtgatgtttcccgagagccagaaccagtaccatatctttgactaacttgaggctgaggtgaattagccgatacaccatatctcccagcgtcggaattgttatgactaacttgaggctgaggtgaattagccgatacaccgtatcttccagcgtcggaactgttatgaacaacttgaggctgaggtgaattagccgatacaccgtatctcccaccattcacatcactccttctagcttgttgctgctcagaaccaccattgctttgtgtgttaactccaccacgttgtagactaatcgagctatgcccaggttctttaggatttccaattatattacatttctccacaataacctccaattgcataataacaacaatcctgtaattcaacaacatcagaactactttataaaaaaaaaagattggttctttagacaactatgaatctagggttaagatattgcaatattaccttcgagtctggatgagattgcagatgtagtgagtgagtcttataaccgaacccaattgaatagttccttgattcactaaactgttcaatgaagtattaagcattcctgctgccaagtcagtcccatctgataacaaaaacttatatcgattgctagattcctgattttgatgaagcttgctctgaatcagcttcaattccgttacttgtagcactggcatcatatctgtctcgctcgtcacttctccgttcaacatcttcattatcactccctccgtcaaactcaccgccatcgtttccgacgaactcaattaacctcgatttccgcactgtagagaaactagatttcgagaagggaattgggtttgattcagaaattgagaagacgaaagagaaaggatgataaattgaattagggattttaatgattgaaccctaaagttgtgtaaaggtgggagctttttagagggaaatggaaaactagaacgttttcgtcagttttggactatttacatatcgggtcttggagtttacaataattatcaataagccccaaagtacataaaactccttaaattaaaatcccattttcgtaattgtccagtaatgttcaaaattatacgtagatttctaatgaacatgtagaaagtttttgtatgatgaataagttgtaaataaatgaagaatcaagggaccaaaataatgaactaatgcgaaattaatgagtaattaagtagtaatgaggaaaaaatcttttcaagttgaaaaataataccggaattaatgttaagcttaccgtagaagcttcttgtttttgaactgctgacgtggaatacatagtggcccacgatgaagctccactaaaccttacaattaaaaagatgtttcattttgactacgtcgagaaggactacgtcaaatgcccaaatccaataaattttacaaattttacacgatcattaatatatgtaggttttagttttgaggttttttaccaaagtatatgccataatcatggtattttacagccttaaaacatactattcgtttgctaacattttgtttctcgaaatcatcacctcacataatatattttgcaaataaaaaagtttatggttgtaaaagttcatggtcttaaatatgaataccacaaaaatactgactgatacttcttgaatccattaaacacttgaagggattgtcataaacgagataactacagcttcttcaagtcattttcctcaaaacagagtgatttaaagaacaattattttctgaacaactgaaatatgagatacaaaagccaagtactaccagcttcggtttcgcaaagccaataccagtaaccgcagaagatattgagcttttcctcgaaactgctagtcttagtcacatttgaagatccctgaatataaagaaatgtcagatttctcctttaatggaaatcacaacagtctaactaggtttatgttcattcatcttcttgacaataaagattcaaacattattcaatcttcaccactaaatagcaaacgatgaagaaaccatgggtaaatattaacgagaacgtagttatagtcaaaatgatcaatcacctgcttctagacgagcttggctttagtagatctcatcatcaggtatctcgggagtcaagaatttcatcggatccttgctaatctcctcgtagtttactctcggtttcactctatcaggaacaggttcaagaggaataatgctgtctccatcaataactccatcaattaaaccatactcaactgcttcaatcggagacatgtaccggtccctatcaatatctttcagaacctgctcaaacgatcgactagtacatcccgcgataatgctggtgacattgttcttgttatgcataacttccttagcttgaatctcaacatctatagcttgaccgcttgcacctccaagaggttgatgaatcattatcctcgtgttgggcatagcaaagcgcttgcctttagttcccgcaccaagaataatcgaagctgttgatgcagtgccaagggcaatcttccaaacatcacctctcacaagttgaaccacatcgtatttagccacggttgcactaaccaaacgatagaacggcattaagtttgaacatctgaagcaacattaaacacaatcaacataataaatacaagtcaacaagcttttaaatatcagtgtttcatctcgggacgctactgtttatttcagtgtttatttcatctcagtgttaagttagaatattagtgtttgggttatcgcttgtgcttcccttatgctatttgtactttagtttgtagattgtcactttttctttagcttttagtacatctttgtatcttctgtccaaaatttcgaaaatgttacaaatacttaacattgataaaaaaagaaaaaacaagcttgttaatatcacttaacattccattgcgaagatatgaactttcaaaagtggaacaattacttattagaaaccataaggaacattagcaaacttaataacctacctggtgaaacctacaaattagttggtaacaggttgtcctgtgagaaggttgttaaagggagaggtcttaggttcgaggaacgccaagcgcaccaataacctacctggtgggccaaaagagcccacaggagagaagttaggattgatgcgctgcaacgccaactgggtcccacgtgcgatttgttacatatttgttaatttaattggtcttttcccgacaaattcagcagaaatgtatttaaaatgtggcaaaagaagatgtttttctatcttacagtgcttaagctgagccaatacacacgtgagaataaacctattctcctagcagataacactgaccctcgtgcgcttgggagcatccacgttgagaatatggtgatttctacatccaaagtcgcctttccgatatgctgaacaatatgtatcataatgtcaagacttagaaggagttgtgggattctcttgacaagaaagtatcgcaccgaagaagctggatctcaaaaataagcggtggactcacgactattgatggagaaaattgaggagttgactaatcccctccatgagatacatgctgaagggaggagactatcaagtcactttttttaattgaaaatttcgttatggctggaccaactccaaaactatttcaagtttgaagcaaaagtggatgagttttcaagactcgatctttaggctccttgttgagtcaacgaaccggagacaaataggagttggtgtacaaattcgcaaatttaactcgaatatgagcatcaaacccaaaaacaaggaaaatggcaaacaagggatagactcctatttgttttccttgtttgccattttccttgttttttggacccaaattttagtcatttttgcttcccaacaacctatctagtatctataaatcaacttgtaaaaatcaccattttatgaatttaagacagg

SEQ ID NO: 38276 - DNA, 5677 bp, Arabidopsis thaliana landsberg
  unsure (1)..(5677): unsure at all n locations
ttttgtacttcactgaaagattcatgcttctgacagaaaatggtccaattgcagaggatatcacaccttctcctctgcctgatgcagacgaaaacggatatgatactgctacagagtctttgactcccattgctgatgccgcctcttccaggacttacgatgaatcccaaactgaagatatggaaaacggatgcgatgaatctgcatatcccgttgctcggcactaattaacagagacacagtaaaaccaatttttcagagcaaccaaggtagcgtttctacctgtaaaaagaccttcatctgcaataacgccaaacaccatagaacaacccccattgaagaaacaagaaactggcgagaaagacaaaaaggaagaagatggattttataatctactcatccgcggaacacagaaagacagtttgttctagcaaacacaaacatttcaaaactcaagaacataacttgtgttgttcctgtgtattaaaaccaagcggagtcaagccttttgagtcgagtagccaaggatcaaatcacggatctcttcactgttggctctgtcgatagcggttcttccatcagcgtccttgacggaataatcagcaccggctttgagaagctcctcgatcttaggtctgtcaccttctgtagcggctaacatcaacaagatatcaactgggtgaatgtttaggttaagaagagcttccatctttgaataggttccttctactgcaagcatacccatgtagttgaaatactgcaaaaaacatcacgaacacataaaatttatatttatgtatacataaaagttatattcaatgtagctctatgtaatgcttcttcacatctacaactaaagattgcaattcaagtagcaaacttgacgatttgattcatcagaatccaacctaagcgtcttctgacttcttggtcgaaacataaatcaatctgattcttagtcaagggaaaaacctgttcgacgtcgtctctgtcgaaatcatctcgagactggctgccatagattccggcattttcagcatcgacaccattcttgccgaacttgaaccagcaagtggttcttgaaccattggagggtcctagtctggcaggtcggatccgaagctttaagtttcgggttccgagaaatctagaggagagcagccttggggaagaagaagtggtggagaagagtgaggtggccaaagaaggtgcgcaggagaatgagattgaagaagaagccatggctgttctcttaatgcttccaactaaagcaaaacagattcagtggttgtattatccactcattttctcccttctatctaaaaaagactataaatctttttatttattttatcgattaatttccaccgttagatttcagatactgattttatttcctttttcttttgtgacaaccacgaagaatctattttttcattttttcttaaaaaacaacaacgaagcatgacatggcaaagacgtggtctccactctctcaagaccccaacagaaaatttcagcattgtcgccggaaaaaaaccagacgtcttcttcttcttccttctgacctatttcttcttcacattcatcatcatcatccaaactcaacattagcttttatcgaatctaccctaaatctcctaaaaccagccatttcaatgattcacaaagctctctaaccctcactactcaaaatcccaccaccatcaccatcgtttcctctatgtagtcttccttcatttctatctctaccaatttcaaatgcgatcacaaaccgcttcaaaaacttcaatgaaaccttctttaaattcatctgcgttctccgtcagatcctccgtcgcagtttcgtctcactcagcaatggttgaattgaaacagagaatcttaacctctctctctagactcggtgatcgcgatacttatcagatagctgtagatgatctcgagaaaatcgtcgtctccgtccccgattcacccgaaatcctccccgtgcttctccattgtcttttcgattcctcctccgatcttaaagctccggtcaagagagaatcaattcgtctcctctcctttctttgcctctcttacaccgatctctccttttcacaattagccaaaatcatctcacacatcgtcaagcgtctcaaggacgccgataacggtgtacgcgacgcttgtcgcgacgcgattggttctctctctgcgcagtttctgaaggagaaggaagtagagaatggaaattatgttgggtcttcgttggtggggctatttgctaaacccttgtttgaagcaatggcggagcagaacaaaagcttacaatctggtgctgccatttgtatggggaagatgattgattcagcaacggagcctcctgttgcagcttttcaaaaactgtgccctagaatctccaagcttttgaatagccccaattacattactaaggcttcactcttacccgttgttggaagcttgtcccaggtttgtgcaatgtggtacattgcttgaattttcagctgcatttaatttggcatcgtctctagttttgtggctacttgtgtttctatgctaagaagattggaatggcatgtttgtgtgaagggatatgcttactattttcactatatatctctagtctgcttggtggtcaagtcaaatctactgggtactctctatggattacatattttgagctatggaattgttgcaggttggagctattgcaccacagagcttggaatcattgctacacagcattcacgagtgccttggatgtacgaattgggttactcgtaaagcagctgctgatgtcttaatctccttggctgtccattctagtagcttggttgcagacaaaacagattccactcttacagctcttgaggcatgtcgttttgataaggtactaatagctatgatattttcttgagatatttctggtagaggaatcattggctaatatctatccaaggttagaaataagattgataccaagaaaagaaatgcagattactcttaatggttattaaaacattgctatttccattctctttccttgtcttcagcaccttatgtatacgctgatcgtgatagctgtgttataattttctgatcaactaaacagagccaaaggtatataagctagattgaaaataaaagcttggatagcagtggcggatatttgttatacactgtgattttcgatgagctgaaagaatttgcttaggcatgttttgctttgctagcatgtaaaaacgataatttagtttgactgagttatatccatatcaccattgcttaagaagggaactgctagactggaattacattgttaatttttccgacattgtttttgcatcattctgaaaagtggctacattttctttgggttgcagataaaacctgttagagaaagcttgtctgaagcactaaacgtctggaagaacattgctggaaaaggtgaatctggaacaatggatgaccagaaggatgtgtcatctgagcaatgtatattggaaaggaatggagaaactgattcagtttcatgtgaggaagcaggactagtgatgcaaggctcttgtgatggtttgagcagtagttcagattctatttcaaaagcagttctcattttgagaaagaaggcacctcggttgactggcaaagatcttaacccagagttttttcagaaactggaaaaaagaggttctggtgatatgccagttgaagttattcttccttctaggcaaaagaattcgtcgaactcaaatacagaggatgaatcagacgccaatacttcagtattaaggagtaggtcaaatggtttgtgcagaactgctggtgtccataccaaacaaagacattttggagattttgcaagagaaaaatgggttgatgaaagaatgaacggaggcgaatcacggttgagagcatttgatggagatcatactgaagtaatccaggcggacacatctgaaaacagagggaactggccaccattacagagacagttattgcacttggagagacaacaaacccacataatgaatatgttgcaggtactgatccgatttcaaataaatatagggattcactttaaaaagtttctctattaaaaggtagcatccttatcattgcaggatttcatgggtggttcacatgacggcatgataagtttggagaaccgtgttagaggtcttgagaggattgtagaagagatgtctagagaaatgtccatacaatcaggtacgtataactgcatgacctgcgctgttaaaacaattctacttgttgcatccatttgaagaaagatatttattatttcgaaaactgtaatttgcttcaggtgcgagaggaaaggcgactgcatcatggagatctgatgtagatggatgggatagtcctaactatggaccttcttctagaaacactcagaccagtacaagaaagatacgtggcactggtccttctgagcaatcaggtaacagcagaagagcttgggacaaaagctctgtagcaattcgactaggtgaaggaccttctgctagaagcgtgtggcaagcatcaaaagatgaagctactcttgaagctattagagtagccggcgaggatggtgcagtccctcgtccaacccgagtggctgttgcccctgaagctgaagccatgggagatgatgataacgaagggcaggaacgtgacccgatatgggtttcatggagtaatgcaatgcactcactccgtgttggtgacattgatgctgcttacgcagaagtcctctgtgctggtgaccagcacttggtcatcaagctgatggacaagacgggaccttctcttgaccagatgtcgaatgagattgccaatgaagctctaaacttcatctctcagtttctgctggatcatagtctctacgacatttgcttatcttggagtcaacaggtacatctcttacagtacattactgggttccaagaatcacacatatgttttgtctttaacctctctttctctctttttgccattccatttgcagctgttggaattggttttacaagacggagcagacacgtttggagttccaatggaactgaagacagagatcttgtacaacttacaagacgcatgttcgactatggatccacctgaagactgggaaggtcctgcgccggaacagctcgtggtgcagttggcatcagtttgggaaatcgatctccaacagttcgacaagtaaacatgagcttgtgaacggagctttaacttcagtaccgatgttgttcataattttcgtacagacaggattcaacatctagactctagagtctagagtttgatttttcttattaaaaacccgtaaaagatgactggaattgatcaaatattgctatgtatttgagttttacaatattttgtcattcttccttttgcttaattgaaaaagccggaactttgaagaacaaataaataagacagaaattattttaagaatatcattaataaatccctaattttataacagacttttaaaataaagttttttgttattgttttggccagacaaaattaattaatttataatatgatacgagtttgagacaattatccatataactntattttattggttgtcattgatccatgtaaattataatgtttttatttttgtcaaaatggaattctcgacatagaaaac

SEQ ID NO: 38277 - DNA, 2578 bp, Arabidopsis thaliana landsberg
cttctacttcttgcgttgatttaatttagcattcttactcctgcaaccgggttcttgttgagaatattgttgtagaaacatgttcggatgaggtcacaaaggaaaatgagcaattaaggcaagaagtggctcgtcttggcaagactttgtatgacaagaaaggcaaagccaaacaaatccgacctccacaggataacaccactgcgggagtgaacaagcctatggagggagaaactgtgatttgtaggctatgccacatggaaggccacaagtctttccaatgcaaggcaatgaccgggataaacaaaggcaaaagctcaagcaaaagccatcaagcaaaatctccaacacctacatcaaaagggtgaacaaaaaggatgctacaccatatttgatcaagaagaaaaagaatggaaaggtgatagcaatcaaggccaacaagcaagccaacaaaggaaaaggggccaaacgcatctgggtgccaaaggagataatttcaaccatgaaaagcaccaagaaggtttggatcctgaaagggaagtgagtggaccaaaggtcttcgggaaatttggagacttggctaaattgggatgtatatcatgggatacatcatattggatcaagtttattgccaagtgggttagtgaaaatttttggacccaaatttcccacccatgactaaggtaactagttttattgtatttctcgtttttagatatgcatatctatttatcttttatctagtttacctttcttgcctagtattacatttgttatgtacttttgttcaaaatcatgcatactaggtaaatcatatggtaggattgctagtttttaaattcatatacttaagcaaacctacatggcttaaaatgtttagttaaagcacggcacatagcttttatatcactccatagtaaatgatgcatcaattgaaaattttgatttctacaaagtgtatcatttaacttatatgcgccaaagtttggattatggataatttgcccctcttgatatcaaatcaaagtgcatgtcttctacaagtattcaaaacttgtatgcacactttcagggggagattactctataatctaagactttgagactaatattgttttcaagtatatttcatgtaatagtctcattgtaaggaaaatgaagtcccggagaaagacaacaaacttccactgcaaaatctccaagaactttcatgtctcacaagtctgtcattggtcttcaattggtccgtcattgactttcaattggtatctttgagactacatttggtatcatttacatgtcttctccaaaatttggttagactatatttcatatcctatacttcccatgttgctatacatgcataagttgttaactcatatttgttacttatgcataagggaaggtagtctaatcaaatcatgtcttgcacctctatttttcacatgctttttccgaagtagaagatctctattaaggggaaatttctttgtctctaaagggggagaaaattctttctaaaggagaacactcatttaggaggagtaataattttttggtgcttcaattggtataaattgacaaatcttttatgagggcaagtcttatttgcttcctatgtgctcttaatgtcttcctttttggtggttgatgccaaagggggagaatttagggaccaaagcaatgaaaactatatcaaacaccaaacaccaccaatttaaaattttatatctacaaatggtttttaagtggttttggttatttggtccaaaaataggaagtaagtgaattatggagttagggggaggcttaagtccataatttcacattgtggggacaatcatgcatcttagcaagtaaaatgcatattttcactctaatacttgtattatttgcttgctttggttgtgttgtcatcaatcaccaaaaagggggagattgtaaggaaaatggatcccgggccatttggctcaataggttttggtgtttgatgatcaacataatatgtggactaatatgtttgctagtatttatgtttgtagttcacaggatgcgaagagattcgactagggaaatgtggcgcatgacttcaaacgacgacatacatagaagcatagaagtccaagactcaagaacaaaagaaacccaaaagaatcagcaaagaaattcaagaaaaggtaggtcagccagcgcctggtggcacaccggacagtgcacaatacctgtccagtgtgcgccggactgactgtgggacaaccggacagtctacgcagaggggcacgctgaaaggccacttcggctgcagcatcggactatccagtgtacaccggacagtcaggcaacggtcggatccaatggtccactgctgcagaccccaacggtcggctgacgtggcagacaccggtcagtgaacagtgccctgtccggtgtgcatcggactgtccggtgtgcccattgacagaaagttgttgctttctgtctaacggctagaaatggggttggggcctataaataccaccccaaccggccatttcaaggggtaggagcccaagcaacataccaaggcatatagtggaca

SEQ ID NO: 38278 - DNA, 4751 bp, Arabidopsis thaliana landsberg
aaaaacaatatctcctctctttactttcttcccatgcaccaagaatatactatttttcatttctatttatttaataaaacaaaaaaaagtaaaggtgcagaaaatctaacgcacgactcttgtcccaagatcagtctcagtcatcatcaaaacagaaaaatttattatccattgtaattttatttttttattccaaattacaactctttttttttcattcgtggaatttggaatgaagaaatgttttaagccaatccgaaaaagaaaccaaaacaaaaaaaaactagaaattaggaaaccgttagcaagaagagaagaatcgagacggcgactaggaaactgctgggaccagagaagaaaggtgacccatccatcatttacttaattagatacatactgtattacttattacaataatgcctatatatattctcccaattcatcatttacttctttacacctccactttcccttttgcccctcttttttacagatttcactctctgctctactactctctcctcctcctcctaaagaaagttcttaactctcctgggttcttcaggtttttccttttctggaataaaaagaagaagaaatgggtgttcttgatcatgtctctgaaatgtttgactgctctcatggtcacaagattaaaaagcgcaaacagttgcaggtaccttccctcttccttttcttatcttagcagattcagctgataacttagatcttggtttgcaaaaaaacaaacattataattcgttgaaaagttatgatgaatgagtctagtagaaactagcttcgatggttactaggaaagtttgagtgttacttagtagatctcgtatattatagttccataaatagacatcattagcaagtttataattgtggttttggctggctaatttgtgttacctttcttacttcagatcttttttaatagtatctctgtttcttttatctgaagaagtatatccaaattgttacatgatataagtgggattttatttgaagcagtttttgttttgagttaatgttccttcctaacgccgaccgaatagattcttttaatctgaaatataagttgatacagccatctgttagattttacaccgggatttgtattcttctcgctgtcaggaatactatataaaatcattaatttccggggaaaccaaccacgttaatttttctcactagtcatgatgatatggttaaagtctttcaattgtggacatttactattcttcttagatatttttaaagtaggctaattttgtcgttttgtgtcgactgcttgatgaggatagacggtggagattaaagtgaaaatggactgcgaaggttgcgagcggaaagtgcggcgttctgtcgaaggcatgaagggtgtgtcttctgtgacgttggagcccaaagcccataaagtcactgtagtcggctacgtcgatcccaacaaggtggtggctcgaatgtctcacaggaccggcaagaaagtcgagctctggccatatgtgccctacgacgtggtcgctcatccttacgctgccggtgtctacgacaagaaggcaccctccggttatgtccgaagagtcgacgaccccggagtgtcgcagctggctcgtgctagctccaccgaggtccgctacaccactgcatttagcgacgagaacccggcggcttgtgtggtcatgtgatgtcatatggactactactgtttcaatttgttatggcttaatttaatgtcttgttttgtacattcataccataacggtaggtttcgtgtctttgctttgagttccatggtctgtattccgtgcactttatgattgcaatatgtgtttttccctttcttccaaagacgtttaatgttaataaatatttctacccaaaattaaattattttcatttatggtttgtaattgtgaagaaagcttcaaatgcggatcaagttgtagttaagaaaaccattaaattaaaatagagagagtagttgaaacaagggttccgagcttccctctttaacctaggacatccttaaaacaagggaacaatataatacaagttgtaacatttatgtatcaaagtgttcatcgatgagcaatcaagtagaattaggatgaagtcgagaacacgatacttgatagcgattctacttgtaatttcgctctgttccaaggcaagcagccatgatgatgagaaaaagaagaaaggagtaacatacgacggaacttcattgatcataaatggaaaaagagagctctttttctctggttctgttcattaccctcgaagcacacctgacgtaagcacgtctactctgtttttattattacccaatcaaaaagatgatttcacttcatggatcggattctggttttgttgcagatgtggcccagtatcattgacaaagctagaattgggggacttaacaccatccaaacttatgttttctggaatgtccatgagcctgaacaaggcaaggtatcatcgacttcaattctctcttaagatcattccttcttttttctttttgggtgatttgatcatttgccttaaaatggttcagtatgatttcaaggggagatttgacttggtgaaattcatcaaactaatccacgacaaaggtctctatgtcactctcagactcggaaacctttatccaagccgaatggaaccacgggtacgaaatattccaaccataacaattcctttataagacatgctaacctaattcatatttcacagggttgccgtactggctacgcgaggtcccagatgtttacttccgtacaaataatgaaccttttaaggaacatgcagagaaatatgtgaggaaaatacttgggatgatgaaggaagagaagctgttcgcttcacaaggaggtcccatcatcttgggacaggtacacatatactacacattcatcatccatcttgtgaaagcagaaacattgaaatctctaagattacataaataaatggcagatagagaatgagtacaacgcggttcagctagcctacaaggagaatggagagaagtatataaaatgggcagcaaatttggtggagtcaatgaatctgggaatcccctgggttatgtgcaaacaaaacgatgctcctggcaatctgattaatgcttgtaatggaaggcattgcggagatactttcccaggaccaaacagacacgataagccctccttatggaccgagaattggactactcagtacgctccacacatcaaactctcatgatcaacacaaactacaatcttacgttggtttcttttgttcttaggtttcgagtttttggggatcctccaacacagagaacagccgaagatattgcattctcagtcgctagatacttctctaagaacggatcccatgtcaactactacatggtacttttaaatcatgatttttatatgcgtcatgtttacatagattgagctttgtttctgtacagtaccatggcggaacaaacttcggacgcacgtctgctcatttcgttaccactcgttactatgacgatgcgccacttgacgaatttggtacatccagaacccaaaagttaagccataccagctttgggtcgtaatcacaagttgacggttattttataggtttggagaaagctccaaaatacggtcacctaaaacatgtgcacagagcacttagattgtgcaagaaggcacttttttggggtcaacttcgcgcccagacacttggtcccgataccgaggtaacctaaaccaaaaattatgttatccggtttttgtaaaccggagcttaacgattcaatactggttttgcaggttaggtactacgagcagccagggacaaaagtgtgtgcggctttcttatcgaacaataacacaagagatactaatacgattaaattcaaaggtcaagattacgttttaccgtctcgttctatcagcatcttaccggattgtaaaacagtcgtttacaatactgcacaggtgagtagaaataaccggttcgatttggtttaaagaaaaccataatgtttgatttatccgcattgttctgaaacagattgtagcccaacacagttggagagattttgtcaagtcagagaagacaagcaaaggtctcaaatttgagatgtttagtgaaaatattccttccttacttgacggtgattctttgattccgggggagctttattacttaactaaagacaaaacagattatgcttggtataccacaaggtataacttccttcgcaagcaacattttgtttttggtcttttaagctttatagagaaactttgtaagttgattccattgctaacagcgtaaagattgacgaagatgactttccagaccaaaaaggtctgaagactatactgagagtagcgagtcttggtcacgcactgatcgtttacgttaacggagagtacgcaggtactttaacactaaaattaaggggatataagacacatagaggtttttaactttttgtttgctaattttttggtagggaaagcacatggacgccatgaaatgaagagtttcgagtttgcaaaaccagtgaactttaaaaccggagataatcgcatttcaattttgggtgtactaaccggattaccagtgagttaaacaatcaagatcgagattatatctgtcacaccaaacagagtaaaaatttagttatcatgtttcaggacagtggatcatacatggaaaacaggtttgctggtccacgtgctatttcaatcatc

SEQ ID NO: 38279 - DNA, 7028 bp, Arabidopsis thaliana landsberg
ctttattacatacagtagattgttttactcgccatagacacgcttgcaccgtctacggtgtcctgagaagcattgccactgtcattgggcctacaccaccagggaccggagttatgaaacctgcaacttttgaagcttctgcgaaatcgacatctccaaccaaccggtatcctgatttcttgctcgggtcgctgactgcattagttccaacatcaattactgcagcccctggctttatccagttgcccttaatctgaaatgtcaaaacgatagtatatttgaattgtaaactattcacattgatctacaagaggtagactaaattatcttctaaatgacaatgaaaatcaccatgtgggcttgtccgcatgcagcaataacaatgtcagcttcccgtatgatagcctcaggatccttggtgtgagaatgtacagttgtgacagtagcatcagccttgagcaaaagaagtgaaacgggcaaaccaacaatgttactccgacctacaacaactgctcgttgcccctttatctttacgccgcttctagctaggagttccaaacatccctgcacacacagaaaatcacctcatagttgatacagaagaaaaacagaacactgagatttctggcttgaaagagactgaagtctatatgcaaaaaaaggagaagtacctctggggtgcaaggaaggaagaggggttctctgcctatcatggctagcttaccaatattcaaaggatggaagccatcgacatctttatcaatgctgattgcacccaatatattctcctcattaatatgtttcggcaatgggagttgaactaatatgcctgcaaatcaaacaccaaagcttatataagcacaggagagcaaggaatgtttgctttataccaaaacgaaagacttgcatagacattaaagtttctatctatccttaatagtttagactaatgataaccgagaagacatacaaaatcaagtattatttaccgccacaactaaccatggacatccggatttgaatttagttcatgaactttgctaataagatcagcttcagaaacttcctctggtaggcccacgtcaaatgacttaatcccaacctcagcgcacgctttcctcttcgtattcacataggtctgtgaatcctttcggctcccaacaataactacagctagtcctgggacctgcatgaaggtaaaatcagattcgattgaatctcgtacattcttgaaactatataaaggggtccaactgaagcaactgaacaaacgcactaaaccatttattacacatactctcgttccttctattttattacaatgatatcaaacattataagcttagcacacactatctgtataaataagatagtatgccacttgaagtaatgcaggcagctcaaaaatccagcgaaacaaaataacagtgatctaactaaaatggagcttacatttgaccctgttaagcattttcaatagaaggttgtgatcatagctgcttaaatctagtcattttaaaccataaagctaaaagagagtaaattttcaatagtgctatcatcttataaaagaacggagaattataaggagagacatgtcaagattaggacactgattcataagatgcgtttaccttgccgtgtttctcagatagaccgcgaacttcctcggcgatctctgatctgatggtatgagcaatcgccttgccgtcgattatcttcgccgtgtgatcagatgatgacgccatgagccactaggaatttgcctcgtgtcggaaatatctaattctctctctggatccactcacactcgaagatgacgaagaagacttaatctgaatccatccgcggataggacactcatacttctgcaaccaaacgttctacaatggcaaatatgtaatttcccgcgtgacctaaactagaaacggcatcgtattaagggtgggcccaatcataactcacacgaggctttgtcgcggtcacgaaaacccagacggcgttaatggcccactccgtttgtttcgaccccgccgtgacggcgaatctttccctctcagcgtttcacgcaacagtaagtaagttttggcggtaaaattgggtcacagatgggtacgtgtcgatttaatagtggttgaaagcgcgcgaatataattgtatacgtatgtgtatgtattctccgtgttgtttttcccgcgcgagatatatccttttttagggtttgccgcataatcagaccccattctagagagagaagagggaagtcaggtgaagatagagagagacactgagaggagggaaaatttgtacggttttcggagatctctgtgattcctctgaatttgtcgaattttttggaggaggcgttagaagtcgggcttcttaaaaatcagatcttctgctcagctttaatcggcgacgtctggtattgggatctgtgacacaaaaaggtaagatctttctctattgcctatcctttgatttgaaatcttatcctctaggtggtttatctgaaattttctattgatatttcgctattcgattgtaagttggtgagagaattctccaaaaacaaaaaagagaaaaactttgaatgaatatttaagataacatctgggtaaaatttttccggagtggtgggttttagattatgccccaatttctcttctttttttcccccaaattttgtctttctgccatgttttgggaaattgggagtttgttttctcatgtctgttagtgtgttcttccgaatgggttgggcatggttcctattgaatttcagtgtgattaaattaacaaatctctttgcttgaaaagtccctttttcttcggctttcagttagcagtttaattggaagtaaaattagcttgattttgcgtgattgcagctgcgttggagactatggaagaagttcagcctccagtgaccccgcccattgaaccaaatgggaaaagaagcgaagcctctctcttggacatatgcgagggtcactcttctctttgctgatctagctgcatttgattagctgaagataccatttgagttctctcggaaattttgaggactagctctaatccctgtagttgatttcttattgcagaaaagttctgtctcttgatgggagcacttgcgatgaagctttgaagttgtttacagaaaccaaacgaattttgtcagcaagcatgtctaacattggaagtggaacggtgaaatacatttttcctctaacttctcttttatcagttaactgtggtttcattatgactaaatccttttttcttcttcttattagcgggaagaagtagagaggttctggtttgcgtttattctctattcagtgaagaggcttagtgtgagaaaagaagcggatggtctgtcagtgtctggtgataatgagtttaatctatgtcagatactgagggctctgaagctaaagtaagtagtgttcaattcttccttccttgtcattcttaaattcatttgtagtgacgattttcctcttttctgtttatagtattgtggatttttttaaagagttacctcagtttgtggtcaaggctggatctgtactgggtgaactttacggcgcagactgggagaacagacttcaggttttgactaacatcttttaaatatacttctacttctattatatcattgttaaatatgcttctattaactaatttttacttactaggcaaaggaggtgcaggctaactttgtgcatcttagccttctaagcaagtgagtttagctcccttcctattttacatttatctttgttttgtgtaagaatagttattgacatagatttcatattttggacctgcaacttagaagcaaattttcttcctatgcaataatcagaatatgggccttgcaatattccttcaattttaaattaattaagatttagagttacagatttctggttttcatgtgattatattctgtgaattgttttaaggacatgttaaagtatgatgtttttggtacctttccttggtaacagatactacaaacgtgggttccgggaattctttttgacatatgatgcaaacgcagaaaagaactcagcaaactcttctacctatttgctggatagttatcgttttggatggctactctttttggcactccgaaaccatgcgtttagtcgatttaaagacctcgtgacatgctcaaatggcgtagtttctatattggttagtgactacctgtggagctctccctaatctttcattcattttagtcttgctgtacattattacgtgaaagatgcttcgtttaatataacgcaattgaagtataggctaactccttttcatgttatcaggctattttgatcatacatgttccttgtcggtttagaaatttcagcatccaagattcttctcgctttggtgagtgtttatcttttcttctatcccgataaccatggcaccatagaatgtttatcatctattttcatttatgtgatgaatctcagttaagaaaggtgacaaaggtgtagacttggttgcatcactttgcaagatatatgacgcctcagaagatgagttgaggatagtaattgacaaggcaaataatttggtagaaaccatactgaagaaaaagccatctccagcatctgagtgccaaactgacaagctagataatattgacccaggttggtctaaaatcattttccttcttcaattaaagaatcatgtgagttcattgaacagttgcctgattgttcttcgaatctatatggtgttttactgcagatggcttgacctactttgaggatttactggaagagacgtccatctcaactagcttaattacacttgaaaaggattactatgatggtaaaggcgaacttgatgagagggtattcatcaatgaagaggatagcttacttggatctggaagcttattgcaggagctgttaatattactggtgttaagaggaaaattgatgctttgagctcacctgcaaggacatttataagcccactttctcctcataagtcgcctgctgctaagacaaatggtattagcggtgctaccaagttggcagcaacaccagtgagcacagcaatgacaactgccaagtggctcaggactgtcatatccccgcttctgccaaaaccttctcctgggttggaacatttccttaaatcatgtgatagggatataacaaatgacgtcacacgaagagcacacataatattggaagctattttcccaaatagttcccttggtgcccaatgtggaggtggaagtttgcaagctgttgacctgatggatgacatatgggcagagcagcgcagattaaaagcttgtaagttatactacagagttggggaggcaatgtgtaaagcagaagctcagattttgcatgcaaataatctgaactctttattgacaaatgagaggttccatagatgcatgcttgcttgctcagctgaattggtactggctacccacaaaacaattacaatgttgttcccagctgttctggagaggactgggatcacagcctttgatctcagcaaggtaattgagagtttcatacgacatgaagattctctgcctagagagttgagacgacatctgaattcactggaggaacggcttctagagagtatggtatgggagaaaggctcttcaatgtacaattctctgattgttgccaggccatcgcttgcattggagataaatcagctcggtttactagctgaaccaatgccatctctggatgcaatcgcagcacttattaatttctctgacggagcaaatcatgcatcatctgtacaaaagcatgaaacttgtccaggtagttttatttgtttctgaattaaaccagttgtccaacctgctgttaatggtatgattttcttaccaaaaattgtcaaatttgctgccatataggacaaaatggggggattagatcgcccaaaagattatgtactgattaccgcagcattctagttgaacgcaattcctttacatcaccagtaaaggatcgtctgttggccttaggcaacgttaaatccaagatgctgccacctccgttgcagtctgcatttgccaggtacattttgagtaactatgagtagaaatggagagttagtttacctatctagttgtccctgtacttgttaagtaacctcttcggatttatgtctacagcccaacacggcccaacccaggaggtggaggagaaacttgtgcagaaactggaatcaatattttcttcacaaaggtaggtctgtgagatctttggatctactactaatcgtttggttagatgatgtactacaaaacacggtatgattcttcattttcggctgggaattgtgttaaatgtggtggctcttcccagattaataaattggctgctgtaagaatcaatggaatggtggaaagactacaactttcacagcaaataagggagagtgtgtattgtttcttccaacatgtacttgctcagcggacttctcttttattcagtcgacacattgaccagatcattctctgttgcttctacggagtggccaaggtgagtagagtgattcaaagggtttaactatatgtcatctggtttacaatggcttctcttacacttacactttttccatgaatcaccttgtagatatcccaaatgagcctgactttcagggaaatcatatacaactaccggaagcaaccacagtgtaaaccattagttttccgcagcgtttatgtggatgcgttacaatgtcgccgtcaaggggtatatatacactcttaaccttatgctgaaaagtttctttactcggtggagaagactaaatttgtgacaatgacttgaacagagaatagggccagatcatgttgacatcatcacattctacaatgaaatatttattcctgccgtaaagccgctgctggtggagctaggtcctgtaagaaacgaccgggctgtggaagccaataataagcctgaaggtagttaagaaaggccagatacttgttagatgtaagctttgtctat

SEQ ID NO: 38280 - DNA, 4643 bp, Arabidopsis thaliana landsberg
taaaagtacacagaattattatatgtttattttgaaaagagaaaaaaaaatcgaagaggggaagggaagcttgatttatctatttaccattatccaagaccttcaagaaaggcagaccctttgctccggatttcattgcttcattgtaaatatctccttttttgagagctgagtttgaatactttttagcacccaaaggcacacacaataccttaatgattccaccactttcaagggcctctgtaaaaaccctgaaggacgattctgtgaaaacgtttgaaacctgcaatttcagaagcttgagattttaactttaaaatagacttcagcacagaaaatgggaagcagctctaaaatgctcttcctggttgaagaaaaaatccagcataagcaattattcccatgcacaaaaaaaagcaggcaaagagacatatagatgcttctttgtaacattagctaaaaaccaagatgtggataatattacatctttcaactcgagatcaaatcttgtatcaggtctatcggatccataacgatccattgcatcagcatatgtaagccttgggaatggatcaggtagctggatacctttgatctctgaaaacacctgcacaagaaggtcaagcaatcaaaattgctgacagcacattactaatttaaagagaagagatccacatacaaaatgagctttggaatttcaggacataaaggaattactagaaacatatcaagaagcaacaagtttgtacaacattgagccacatgcgtcattgtcacagaagatacaaagtcataaaaaacagtttcaacagtactctaaccttacggataagatcttcattcagcttcagcatgtcctccataggcatgaaagccatttccatatcaagctgagtaaattcaggctgcctatcagctcttagatcttcatctctaaaacatctgatagtagaaaaaacaaacgcatgagagagaaatcatttgcatcaggagtcctgcttttggtggtaaatgaaggtgatgagccatttatgtcagggaggcttatgctgaaccaaacttaagtgccaaagatcatatatatacctggctatctggtaatatttgtcaaaaccagagaccattaacatctgcttgaagagctgtggactttgtggcaaagcatagaatgttcctgacttcgaaagaaaattagatagaatcagacctataaactatgatataagcttatacttcagggaaacttaattctttgttgggaaatacattaggatgaaaaaagtattggcacctgaattcttgacggaaccagataatctcgcgcgccttctggagtagatctagagagtattggagtttcaatctgacataaacaacagaccaacatgaaaaactgggaaatggccaaaactgaaaaatataaattagatttcaaatagagtaggaacacacctcaataaaaccatgtctgtcttctaggtatctcctaatcagcttcaccacattatggcgaagaactatattattcttcatttgctgacggcgcagatcaagacatcgaaatctaacatcatacaagccaaatccaaaacatgagttagcatttggagattcgatacgataaaccacccacgcaagatcaatcatatatctaatatttcaccttaagcgaatttcttctttaatcaaatctttgttctcgtctgcagtagtaactaagaagggaagctttgtcctcacaggattcaatatttcaacatgctctgcaactacctaatgcaacatactacacacatcaacgttacatataggatatataaaatgcagctgagctgaatgagaaggcatacctcgacgaatcccgttttcattttcttgttgacggactcatttggcctactacgcacagtaccttccaccaaaacaacgtactcaagcctcatgtcattgatcaagccatgtgcctcaggaaactcatccggaagcgtcctaacctaagattataaaactttcaaacataaacgaatcatacagtccccaaatatccatctttgcgttacacaaattgggtaagaaagaattgaaaatggtcgaatcaaggataatcatctagaaccaaagaagcaactaaagagaaactcaagtaaaatccaggaatcggattgaattaaactctactcaattgtttcttattcagattcaacaccaatcactgagtagaaagttcattgctgagacgaaacttctaaatactaatctactgaaacattatgcttcacgactatataatgcaaaaaagcattaggtgaaaccttaaacctggacaatgccggtatgatctctaagattaaggaaagtgaggccaccatgaactcggtgaagggcgacccatccgcaaaggtggactcttttaccaacatcattgactgataactcgccgcatagctctgtccgtgacacccaccggagaaccgacggaggagatggaaccggcttcactactacatcgccggaggcagctgcaacaggggaactggagaaggttcttcgagttccgggaagtgggtttgtccgtttgggtacgacgaagaaattagtagcgttagagatggatatggctgtggcggagaggaaacgagtaggtcggagaggcaaagttcgtaggaggagagacattgttgggtgggacgagagttagataaagagagaaaaggtttaagggattgcgtttttagagacgacgaaatcaattcgatcgaaccggttaagattgattcggtttatataacgaaccgctatggtcaaaataagaattcagatatcgtttggtcaactttggatgaagagacgtttatttcactgaaaattcaaaatcagtaatcaaaacttgtttatctgatactgcttccaaaagggagagctaaattctgtacaaatccataattagacattttattatttgtcgcttcttagtagaccatctaaaaactgccgccattttctttcatttacaatgttgtctcttcttatatttgacctgcgccagattttggaagaaatctacaaagacttgctcgtagtctggcagttttccgtaacctgcaaatcgatatcaaacagagaaaagttcacttctctgcttccatgagagaactacacaaaagcttcaaaaataagggaaaaacttgccaggaaaatagttgatgtcaataacataaaacacgtttttgctcccatgttccctgatcatgtctatgttgaaaagccgaagtccctaataatagaaaagcagttagaaattatgataatcaaaaccggatttgtaaagtaaaatgtggagaaaggcagctaaaactataccaataagcttcttagctctttcacaagcgcctcgaggaaaggctttggaggtagctcagcaacacgagggtccaaatctgcgttatcagctgaagcagcagctgatgaaacccttgggaattggaagacgccatcaactttggctttttcacaattactcacatttggtagagaaaaccgtctcatgacttttataacatcacccaccacaaataccttgaacataactccaccttcaggcaccaaaaaagatgcattgaattttttgaaaacacatatacatgggacaactgcgtattgaagtgtcatattaaccaataccatgattaacaaactcttgaaggactaaaggcggatcaagctctgcaagcgagcgcctgtcataagccaagtacaattgatgtgactttgcagtcccatcgatccagagcggctttgcaactgggacaaatttgaaataaacaagtttaaattcatgatcatcatttatacatacaagaatattcaatgccaagataatatgttcaactgtacctagtggaaatttgagaccagcttccacaactgcatcagcactagctgctgaatctttcaagacaaccatttgctttggaacaaaaaggctgcctacaaatatttaccaaaagcaaaaaatcacttctagagaaacttagaaaaggtcttaaatttcgatgtcaaaagaacttattgaggattgttaccactgcaatctgacagtttcaaatctgccataccctgaagcatcgattgtcgattatatatacgctgtattgatcctggaggatcaagcacagtcacttctgggtgtttttgttggtaatcctacaaaaaacggtgaaacaacatgagattgtatttgacaacatataatttccacagactgaaaaactgccccagcttaacagaagtctttcaaataccactcaagggttaatacctttacatagttcaaactaagaaactcaaaaccagattggttaccatcttcaagcaagaaactaaaaccagaaacatataagaaaagtagtcagttttccaaacctcaataacctcttcccactcttttcccaacaactacaagagaacaatcatataattcattagacttccagcaaaaacacagattaaagctcagagagttcttagttctcacaaaccttatgcaaaacaacatcaaatggcccttgttcagataggggccggttcaaatcgaaggcgacaaagaaaatgccttttctcctgaaattgacagacacaaaaag

SEQ ID NO: 38281 - DNA, 7961 bp, Arabidopsis thaliana landsberg
tcaatctaggcgaattagaagtcgcagatatcacaagttttgaattcgtatggcgatactgctctcgtcgagataacaagaagagtgtttccttctacaaacctgacaaattacctgaagatttccattgcttaggtcattactgtcagtctgattctcacctcttgagaggttttcttcttgtagcaagacaagttaataagtcttcagagcctgcacttgtgcaaccactcgattatacattggtctggagctcaaatgatttatcagaagagcgtcaaagcgaatcgtacggttacttctggttaccgcagcctcctcaagggtataaaccgatcggatatttggttacaacgagtcccgcgaaacctgaattggatcaagttcgatgcgttcgagctgatctaaccgataagtgtgaagcacataaagtcataatcaccgcaatatcggattctttaagcattcctatgtttatatggaaaacaagaccatccgaccgcggaatgcgtggcaaaggagtctcaacaggtacattcttctgcacaactcaatcccctgaagaagatcatctcagtacaatcgcgtgtctaaaaaacctcgattcgagtttacacgcaatgccaaacatcgaacaaatccatgctatgattcaacactatggtccaagagtttacttccatcctaatgaagtctacctaccttcttcagtctcatggttcttcaaaaacggtgcactcttatgcagcaattcaaattcctctgttatcaacaatgaacctatagacgaaaccggctcgaatctacctcatggcggaaccaacgataagcgatattggatcgatttaccgatcaacgatcaacaaagacgcgaattcatcaaacgaggcgatctcgagagctcgaagctttacgttcacgttaagccagcatttggaggaacgtttacggatcttgcgttttggattttttgtccgttcaacggaccagcgactctgaagctagggcttatggatctctcgttggctaaaactggtcaacacgtttgtgattgggaacatttcacagtcagaatcagtaatttctccggcgagctttactctatttacttctctcaacacagtggcggcgagtggatcaaacctgaagatcttgaattcgttgaaggaagtaacaaagctgtggtgtactcgtcgaagaatggtcacgcgagcttttctaagtctggaatgtatttacaaggatctgatttgcttggaattgggattaggaatgattcagcgaagagtgatttgtttgttgattcgagtttgaagtatgagattgttgcggcggagtatctcggaggagcggtggtggagccgccgtggttaggttatatgagagagtggggaccgaagattgtgtataattcgagatcggagattgagaagttgaatgaacggttgccatggaggttgagatcttgggttgatgctgtgttgaggaagattccggtagaattatccggcgaggaaggaccgacgggacctaaggagaagaataattggtttggtgatgagaggtggtgatatttttgtaatgggcttgcgatatctgatatatgggcctgtaatattttatttcccaggcccataacttcatgacccaccagaaacctattcatgtgtcctatgttcttctcttcgctatatgattcgtgttacagtgaagtgactatactgtaaactatatgattagacatgatggtttcggtcttaattgatattttattgaagcataagatagaaacgagacacacacgagtagagtagtctgttgctcttaggaaatgtcaataccgataaaagacgaaagtcacaagaacacatagattaaagcagagaggacccatatagtcatttgctggtatcgaggacacaacgaaggcaagtaccttcgtgcaatagatcgaaagccttattgatttctcccaaggtcaagttgtgtgttatgtattcatccacttttatctcctgcatggttcgaataacacgtaacagtcaagtgtttgaagagaaaagattatcaaaaatcgttttgccttacgtttaagttttttttcttaccttgttcatgtacttttctacaagccaaggcacttgggttcgactcttgaaaccaccaaaagctgttcctttccacacacggccagtcacgagttggaacggacgagttgatatctcttgtcctgatgctgcaacaccaactatgaccgaagttccccatccctacaacgtaatcatctttagctcttaacaaaatcctcttgtctacaatgttttaacagtttcttctgtattttacatggatgacttaccttgtgacagcactccaatgcagctctcatcacggagacattcccgatgcactcaaagctgtagtcaacaccgccatcagtgagatcgacaatcacttcctgaattggcttgtcgtgatcctttgggttcacaaattcgttaacaccaaacttctttgctgaaattccacaaccaaggaactcagtgaattgcataaattatatgcggttaaccaatccagtgaagaaagatgaggagatttaccagtttcatacttcttgctatcgatgtcaatgccaatgatccttgaagcaccagcttgttttcgcaccctcggcaacctatacattcacaatttaaaacacttaaccacaatggttctctgccttgcagaagaaaggaaatatggaagcactagaaagtttgaggtagcagcttacagcaagtccaacagtgccaagaccgaaaatggcaacatttgaccctggttctacttttgcagtattccaaactgctccaaggcctaataggatgcatatacatgttatgctgttagggaccataatgttcatatatatcaccaaaaagtcagaaattcgcaaagaaagaagagaaggacacagagtgaaaaaaattaggttcctatcggaaagaataaaaaggatggtgaagaactgtgcagatcaatcttatcagtgatgttacatcaataaacagaaagggcaggcgacactctaaaactgaagcatcgtgaaagaccttagcatattaccaatcagtaagagaaggtggcaattcttaccagtgggaacaccacatccaagaaggcaaactttatccaaaggagcagtaggatcaattttggcgacgctaacatcatgaacaacagtatactgactaaacgtggaagtacccatacagtgataaatgggtttcccattaaccgagaacctcgacttacggtcattcatcataatcccaacaccagtagcagatctcaccttgccacaaaggttagtcttcccagatttgcaaaacttgcattcacgacactcagcttgataacaagggataacatgatctccagcttgaacttcagttactccttcaccaacactctcaacaatcctatacccacaaaacaaaataagaactttagcattgagaagaccttaaaactgaatttgatgatgataatgaccattaacatacatacccagcagcctcatgacctagaatacaaggaaagagaccttcaggatcctgtaatcaaaagtcaaaacattaggacacagcctcaaattgattcactaatcaacaataaatcgattcagatcaaccacaaaacactaaatcagactcaaacgaatgaaaatggagagaacgaaccttgcagctccaagtgtaagagacggtatgacaaagagacgtgtagagaatcttgatacgaacctcaccagcttgaggtggagccacttgcacatcttcgatgaccagaggcttgttcggctcgtaagccaccgcagctatgtgaatcggcgtcaaaatgaaatgaaaatcagaaaactaataatcggagatagggtttttcaataacatgtctacagatagtgagagtgcgaggatcgaggataaaggtacctttgcaagtgataacctgaccttgagtcgccattgacgcaggaagaaatgagagagatagagagagatagagagaaagagagatagagagagtagtgtggtcttctttttcttctcatagctacaaatgtaattatccggtccgagccgggtcgagtcgggtcgggtcgttaataatcgagtgagaaaagtccgatttgatttaaagtaggcccagagacacatcaatgtcatatgctttggtccaaaattacaataatggatacacctttcgaaaataaagaaaacatgggatcacgccggctcattgttaacactatagtggtgcattttcaaagtttcaacagcatccgattggcgcacatgtgtaatcagttgaataggactgaaagaaatagatcagaaaacgattcatcgtgattggatacacttcctttctttctcgttaccataaagatatccctgaccaaaatagtgtatatcaacatgtttggcatgtttagtacgtagtagactgggaaccttatcgatctaagaggtgtactatatacacagatcaaatcatgtctcgtacttcaaattcagatttagtgtcattcgacgataaattcttgacaattaagaccatgccgctagcaattaggtttagttcacaactataatggagttgcaatcattttatcattaaaccattagacaaattaaaaatatacgttgaaccaaaatatattttattctgagaaaattattataaaaaaaacattgaaaacaatgataagaggttgtacttattttgttaagctagtggctagggccattgtcttgtcacaacacatgattttgctgaggtttggcatcaatcacgaagaacctttatgatcttgcggtatacatagtcttgaaaagttaaagactcaaacttgggaggattctcgtctcccgtgagctcaggcaaaggtcccacgaccaaaccacgcttaggctctaccaaaaccggccacgacattcttgtctttttcccatccattattgatctgtgtagcacgttcttgtacttcccgttgctcatcctctgcatgcaattcacacattttaaaaaccaaaccccaaaaacatttccaaaagttaaaaaccaaacacaaacggaccatgatctgatccccaatgaggacaatgactgcggagttgatatactcaacgtcgaaccaatggtcatccttgaacacttgaagccctggaacctcgttggagacaagaagtgcgagtccacaaaaatctgtgtgcgccggtgctccgatggctgaatccgatggcggatagtaattgatcctcatcacatactgtgctttatcgccacctagacattcttgcaaggcctcacgccgtaaccctaacccttttgataagtaaccaacaatcttctccgttagatttgtaacattccttgtgtactccttagtcacctccctgaaaccatcaccactcccaaataatactattaattttcagctacataataatctatatagccgaaaaacattttaagtatcatgaagaatgtaaaaacttgatgaatgttttttaatggtaagaaataacgcaatcaagtttcatgtaacttgtatactatttaattacatacattttgttggatattatataacttacatgagctcttatacaatgttaaggtttataactataaactatatatcggcttttcaatgatgttcaatacctgtaatctgaaggattgttaggccaatatctatagttgatggacgatggtggccagatattgtgaatcagatgatcgtcccaagcctttagtttttttggatccttggaaaagaaaccttcgatgtcttgggagtcggctggccttgtgacagattctttttcggaagccgggagctcgaaaaactgcctccccacttcttgcagccgccgcatcaattcggcaggaatgccgtggttaaccaactgaaaaatcccccactcttcgctcgctttcaccactgcatgagccacgagctcgtcgcttggatcgcttagatcaacgatagggatcttcttggttaggagacacggtggagatatgtgttggtctctttcgacgttcatagttgttcactctctcttctccaatatttgatttttttagacgttgatcagttggagatgtttaaatagaggaattgtaatgatcacgtggtgtaattcgtatatgttacatgaatatgagaattttcatttctgtttttttttctttcatatttatcatttcttgttatatatatttttgttgtctcgtgcttaccgaattatcgttaagattactcatcaatacaaatgttgtctacatccaaatcaactagtggatttaactacgggagtacaactttacaaaatagcattaataaatcgggaaataagaggtccttttggctacagtatccgtaatttgattggcgcccttctggacgtacttttgaatgtataaaatcattagccaaaaaaataaaaatgtataaagtttctcaaacaagaaacactctcactcctactttttcattggttttttttttaatctccaaatactctatgagatactactgatagagatgctccctaagatggtatgatgtgtcatccttttgcctctaagatctatgtcgtgataccctccggtctaagccacttatgatggccttctaacgcctgaaacaatgctttggtgtcacttatgaacatcacaagtccaattccaaggttgtcaaggtaagacatcgcccatgaaagtgccactacttcagctatttgacagtgccttttgttccttgttatgtttggttcaaactagctttttgcaaagcagtggacaaaagaaaaaggggacatgtaactatacggggagattgtagtaggattttatttgcccagtcactatctgataggttcaaataatgtaaagttattgggagcttgtagttggatggtttctcgagtcatttatctggtgggttcaaactccacatgtcaacagtataaggtttttaatcatgtcaaaaacaggacaattgccattttcacaatttcttcattataaaataaaaacttcaaaatatgatttggtatgatcagtttgaataatttggaaatatagtttttgtttttactttttattcaagggttaaaagtcagtttaaatatggaatcctaattgaacctctcattacataaaaaaatagtgtgtcaagtggttgcaccaaacatatagtatgtacatcaaaatctcatattatgaattgcaattgtagcagagatagagagagaagagtgaagagaagcaagcttgaacgctactaaaactgatttagcatcataaaattgataacttaagacttctttgttaatctgtagaggaagtgtgacaatgtctattgccctatttttaacatgattcaaaaccaaaattaaaccaattccatttttttctttatacatttctttgtctttaactttttaccttaaacaagactgtatgaagaggagtggaaaagattcgatgaaacctatgtttgcttcttgcttgcttaccactctaatgcacctgtagaaatcatatatatatgcttagtcagctagatcatcctttatagttaggtcttttttttttttgacaaagatccaaccttctttattataattctacgctacctcaggttaggtgtttggtcctgtgaagtttgaggtagcagctgtattgtactggaagatcctcagtttcccctcctacggaaaaaaaacatgagtcatgagtcgataatgatcagattcccaaaccgaacattgttaatcgataatgatctgattcaatatggtttacctttgtcccataaacaagacctcctccaggagaaggatgaaaacacgcaacgttcacttcatcctctgaacttggcagtactctcacaagct

SEQ ID NO: 38282 - DNA, 3105 bp, Arabidopsis thaliana landsberg
ttacaaaggaacaaaacttgatctgctttatagtaaataacataactcaggaagttcaaatttgcttgggcagagaaccatgagctacaaaaatacaaataactctcacttgattctcttcaagctgttacttcttctgatcctttattctgcagatctcacagcttcaagctcatgtcgaagtgaatgtggaggatgcaaatgtggaggaattgcgatcccatacccttttggaatcggtaagggctgctatctcgagaagtcatacgaaatcgaatgtcttaatacttcaggaaagcttgtcccctttctttctgtaattagcaaagaagttgttagtatccatcttccgagtgcagatagtcattttgcttatgaagtatctgatcaagaacgtcatgaatcatttggcttagttcgtgtcaaaatcccaataacatccattggatgttcgagagatggaaaagagtctggatcggttctaaattttacggacagtcctttttactttgggattggaaacagcctggttgctgttggttgcaacagcaaggcgtcgttgactaacatcaatccgagcaaggtgggatgcgagttgaattgcactgcaagcaaagactcatatagcaatagcatcccttttgtcgaagcggtgtgctcaagcaacgttttaccctattttcaggaccaaggttgtccagaagagatagcagaagaaacaggatgcaatggtatcggatgttgccaggcaagtctacctaacgagcctcaacaagttattggtatcagaacagagaataatgatggaaactctacaacatatgtagagtgtacaggctcggtcttgttaacagatgagatctacgctttgccgaaggcgaccaaaacagaacacttacttgctaagagatatgctacggttagtctaggatgggtaatccagacgagtaatagatctttcctggactccttggccttggcctgcaaagacagagaagattaccgcaattctactaacttggaaagaaagtgtacatgcggcagaatcactatatctgagacaagttatgcaaactgtggatgcacctatggttacacaggtaacccatatgttttgaacggatgcaaaggtcagtatatgttccttccttattctctcttctctctttttgtgtgcacgcatcttttgagattttacaaatcatccctagatgttataattataagtttttctttcatcatttgattataatatgtcatctttcaaatatagatattgatgaatgtaaagtcaaattcgaatactgtggaaagacagaaacttgtgtgaattttgaaggaggctatcgctgcgtgcgcgataaaactaaagcgataatgataggtaggtcactgatttatcttccaagttgagtcacaaacatgtagaacttttaaaaagaaagtgatgatcaacctgtaatattcttgtgcggttttgcaggcgcgggtacgggttctggggtcttagtcctagttggtggattatggtggttgagaaagtttctaataaagagaaggatcacaaagagaaagaaaaagttcttcaaacgtaacggaggactactattgctacaagaattaaataccagagaaggctatgtcgaaaagactagagtcttcaactcgagagagctagagaaagccaccgagaacttcagcgaaaacagagttcttggacatggtggtcaaggtactgtgtacaaaggtatgcttgtagatggtagaaccgttgcagtaaagaaatccaaagttatagatgaagacaaactccaagagttcatcagccaggtcgtgattctctcccaaataaaccatagacacgtcgtcaaactcttgggatgttgtcttgagacagaagttcctatgttggtttacgagtttatcatcaatggtaacctctttaagcatatccatgaagaagaatctgatgattacactatgttatggggaatgcgtctacgcattgctgtggatatcgcgggagctctttcttatcttcattcttctgcatcttctccaatctatcatagagatatcaagtcaacaaatatattactagacgaaaagtaccgagccaaggtggctgattttggaacgtcaagatcagtaaccatagatcaaactcattggacaacggttatttcaggtacagttgggtatgtggatccggagtactaccagtcaagccaatatactgaaaagagtgatgtttatagctttggagtgattttagctgaacttatcactggagataagcctgtcataatggtacaaaacactcaagagatagttgcccttgcagagcatttcagagttgccatgaaagagaagagacttacagatatcatagatgctagaataagaaatgactgcaaaccggaacaagtaatggcagtagcaaaggtggcaatgaagtgtttgagctcgaaaggaaaaaaacgtccgaatatgagagaagtttttacagaaatggaaaggatttgtacgtctccggagattcacaggtgcagaaccggattgacgaagaagaagaagaagatggagtagaagaagaagaagaagttgtgacaatagtacacagaggagattcttggagcattggtgttactgctccagcctcaagtattgtggcttcacctccatcttcagatgttgaaccattgaatcctcttctcacatggtgacactcaatcagatcttaaagtaatgatgatgaatgaatttgatgtatctcgttagaaatgttttctgtaataaatttgagtagttgttagtctgtgtttcccgcttaagaacgtttgttgtgtgtttattattcctaacgttcacctttgtgcctcaccgatcacagactctctgccattgattgaaaccagcatagtggttaatagcagctgtcgagtagtgaacgtggaaatagccccactctagaaataaacagaggaagctgcgactgctgcgaccggtactcgttcagataatctgtttttgctaacgtagtcactcttgaatttggatcattttcgattttaattctaggagcctaaagtttcctcgtgtttt

SEQ ID NO: 38283 - DNA, 5004 bp, Arabidopsis thaliana landsberg
ccacttctccataggcgtcacatcatcttctattgcttttgatggtaagcgattttgcaaatacgctgaggtatataccgcttctgcccataacttgaggggtaagtcttgttcaacaagcattgatcttgccatctccaccaatgatctattcttgcgttctgctgcaccattttgttgaggtgagtaaggcaaagtcacttgcctattgattccttcatcttcacagaactgattgaattctcgtgaagtgaactcaccacctccatcggatctcaacgtcttgatggaacagtttgattgtttctccaccaacgctttgaatttcttgaacgttgcgaacgtctccgacttttgttttaggaagtatacccaacacatgtgagtataatcatccaaaaacagcacatagtagcgacttccatcgatcgattggtgttgcatcggtccgcacacatccgtatgcacaatctcaagcttttctcttgtcttcgtttgagattcttttggaaagctcttgcgtgattgcttcccaagattacacgctttacatgcctccttcgtcactttgaatcttggtaacccatttaccaagtccttgtcttgcatttgttgcaagcgcttgttgcttacatggccaagtcttttgtgccatgtttcctctgtttgaacattggctgtcatggcttcttcttcgactgaacttaacttgatcttgaagctcctgttcgtcatctcaatgttcatgatctcctttccatttgcatcttggatgatgcatctcttgtcttgaaaacgtacccgatagccgcttgagatgatttgaggaacgctcaataggttcttctccaaaccaggcactaagaaaacattcttgatgattcttttgccatgccttgtcatgacggtaatatctcctttaccggttgtcatgaaaatatctccatttccgactctaatcgggactttgatacttttgttgatgtttgaaaagtatccctcttctttcgtcatatggtttgtgcagccactgtctaccaaccaaacatcttctcttaacgttgttggttcttcttcacttgcactaaacaacatatgatcttcatttacgtcttcttcttcaagagttacatgagctctctctttgttcttcgagcgacactcatttgcgtaatggccgatcttcccacacttgtaacacttgatgttacttctcttatttttgccatgatcgtcattcttcggtttctctcgacactcttcttctgtgtgtttgctactcttgtgaaaaccacaccatttcttgtcttgattgacacggttgttggtgttgtcttgtttgaaaccggattctcttcctttggaccgaacatagaatgctccctcttttgtgctttcttctcttgcagttactctcgcttcttgtgcttttaagataccaagaagttctgacattgttagtgcatccaagtcgcgagtttgctctagaacactaacaatgttatcgaacttggcttggagagagatgagtatcttctgtatgagttgagcatttgtcttcttttcaccatgataagtcaattgattttccagaacaattaacttatcggtgaatgtcttgatgttgtcattgtcatacatcttcaagttctcgtactctctacgcagcgattgaagtttaaccaatcggacttgtggagatccttggtattcgtccttcaacacatcccacgcttcttttgatgatgatgccgctgcaatccgtgagaagatttgatcggtaacggcagtttgcaagatttgcaaagccattgtatcatttgtcactgcttcttctctgagcgtctttgctcttgcagtttcaggagtttcttccgcttgtaccggttcgaccggtacgccttcttcaaccacggaccatagttttctggtcctgaaaatggttgccattttaatgctccagaagtcatatttctccccatcgaatatagggatgacttgatgtgaggagccttgcatcgtctcgctttttgctgagacgtatacaatctcacttttgttgcctctctctctttttagtgttttctcttgtcctctcaatcgataagctctgataccatgttaatgttttgttatgaaagaagaacagagtaagaacgaaaaaacagagtatgaatgtaatcaatcttattgacttgattgtattacaaaactcaattgtgttacaggaaacagagactcgatctatttatatgaaatgaaacattgtcttgtgtaaaagacatgactcttgataaagacacaactgtgtaacagacacgactcttaacttaataactaacttatacgaatgtgactttgacttatacgagatttgattattcttcaacaggcaacactagaagagtatgggactaattaacttaactaaactagcagaagaggtaataaatatatgtactcatcttgaagagagtgtcatgttaatgcttgaagttttatgctgaattttggttttttactttctatggtagggtaaactggatccggttgttggaagtcagccacagataaaacgagtggtccagatcttggctcgaagaacctgcaggaacaacgcgtgtcttattggaaagcctggagttgggaagagagcaatagcggaaggaattgcacagcgaattgctagtggtgatgttcctgaaacaatcaaggggaagatggtaaatattttcccattggatcattttgtaatgaatttgagaggcttagctagagtgcaaaaatgtgtatatatgttttaagtaatttacttttactttttatgacggtcaagacttcgtctcattctttctttccttgagaatgtggcagggaattggtgtgattatattgatgaatgcgcaattaaaaaaatattacttctacttttttatcaggttataacatttgatatgggtcttctagtggctggaacgaaatccggtggagaagccgagggaaaattgaagaagtttatgggcaaagtgatgacataattctgtttattgatgaaatgcacttgctcatcggtgcaggagccgttgaaggtgcgatagatgctgctaacatcttaaaaccagctctagaaagatgtgaattgcaggtaaattttataaattctttttatatctaatgatgtcaaatttttcaattcatagaactggaaactcaatttttaccaaatgttttttttttctttttttacggttgtagtgtattggtgcaacaacaattgatgagtacaggaagcacattgagaatgatcctgcattggagagacggttccagcctgtgaaagtacctgaaccaactgtagaagaagctatacagatcactgctgttttagctaaaggcaaagaagtggccacacccgatattgaagctgtggaaggaggacctactgtcacagaatctgacatacaacacatcgtcgccacctggacaggaatcccggtagagaaagtctcgtctgatgaatctagccgtcttctccaaatggagcagacccttcacacaagagtcattggccaagatgaagccgttaaagcaatcagtcgggctatccgccgtgcccgtgttgggctcaaaaacccaaaccgtcctatcgccagtttcatcttctctggtccaactggtgttgggaaatcagagcttgctaaggccttggctgcttactacttcggttcagaagaagcaatgatccgtcttgacatgagtgagttcatggaacgacacactgtttcgaaactcatcggttcacctcctggttacgtaggatacacagaaggaggtcagttaacagaggcggttcgacgcaggccctacactcttgttctctttgacgaaattgagaaagcacatcccgatgttttcaacatgatgcttcagatcctagaagacggtagactaactgatagcaaaggaagaactgtcgatttcaagaacacgcttctgatcatgacttcaaacgtagggagcagcgtgatcgaaaaaggtggtagaagaattgggtttgatcttgaccacgacgagaaagacagcagttacaacagaatcaagagcttagtgactgaggaactaaaacagtatttcagaccagagttcttgaacaggttagatgagatgattgttttcagacagttaacaaagctggaagtcaaggagattgctgatataatgcttaaagaagtggtggcgagacttgaggtcaaagagattgagcttcaggtgactgagaggtttaaagagagagtggtggatgaaggattcgacccgagttatggtgcgaggccacttagacgtgcaataatgaggcttttggaggatagtatggcggagaagatgctttcaagggacattaaagaaggagattctgtgattgttgatgttgatgccgaaggaagtgtggttgtgttgagtggtaccactggacgtgttggtggttttgctgctgaagaagccatggaagatcctattccaatattgtagaaggaaacaaggggttttctagtgattttcttttaagtgttattgaattgactattgagtctcttatgattcgtattttgggcgtctaatctctttgtttctggataatgactgttcgggaaccacagagaatttcccacaaaaaaaaagaaagcaggatttggttagaatttcatcgagtcatataagtgtcaaaattgagaatctaatcacagattaacgaggttcaattcttctatcccatcctcaaaacatggtttataaaaacagtaagggtaacatgaatttttcgtgatcagtgttttcgatatcctattttttacccagtatcgtcctccaaaactttttggacttgattgcaaaaataagaataccaaaagcttacacacttaagtgtgaaaagggaaaacataaaaaatacaatgacacaacagattcttcgtgaaacttacatgacgagaaatatacaaaacg

SEQ ID NO: 38284 - DNA, 2942 bp, Arabidopsis thaliana landsberg
taaaatttcgattttgaagtttcctttaaacccaacgaattgattgatacgatcttgaatcgctgaattatttaatttcaatatccaatcgaaaaatggtgaagaaaccaagtcttgtttgttgttactttgacggctcttttggtatgtagaaggctatgatttttctatctttgaagataacgttttagctcatatagtttacatgaaattgatttgaatcaacaaagatatattcaaggttttggatttggaaatttgaatcaacatacagttagatttagattgaaacaagatatgatcaagttttcaagtttgaatgcatcaatccaatactctgcaactacaaatttacaatctttttacagatagacttgggaagccttattggtttagttacatagttttgatacacgaaaaagtcagctttggttagcttctaactatgcggattttgaacaggttaaggtttttcgaacagaggacagtcctgccaaagtagcctctcagcctcaacgtcatagctacccatctaggaaacctcgagggccagatcttccacctggttttgaaggtaatcactatgcagttaagcctaatgtttcaaacattcctcgcatcaaatggaaacgacctcctcccaaggtatattttttatactgtaaagaattggtgaatcccttttgaatctttttttatcatatctgatattaatattatgtgtcttggacaatgcagttctctgtcaatgatacttggctggttggatgtggtggcgggagctcagaatggcaaaatgaaaacttgaggatttcaaaagtgctggaagctatctatcctcatcgctctgccatcccttctcggtattttaccttcttctcttaggttattcaacattgtgttggtgtgttagttagcctgctgattgcattctgttttcatgtagaccctctgtttcaccggctgtggaagctgaatgctttgatgacagcaaaactcctgccattcgtctcactcctattgaagacgagagtgaatcttcttcagaggagtcatccaacagtaaggttgaatcaggtgttaccgcaaacaagcagggtcagttggagaccaaacctctatgttcaacccaagaacaggtttctggtcttactggtcttgcaccagacttgagtctggctgcttctgcagctctgactgcactgatgaaaaccaaggaacaagggagtttggtcgatactgagctacttatcaagttcctcagcgtttccaaaattaatcaagaatcttatgggtgacacgggaggtaaatcctctgaaactaagaatcagcccattgtcactaacatcaactctgctactagacctgttccgcagcctgtcagtgctgtcaccgcctcacccatggctagaaagccgcagccagtgataatacctcaagaacacagtgttgcagtttctcggtcttttactaaccctgagaggcgagtatcacctcccaagcctgtaaatggaagcatatccccacctaagcctataactggaaaaccatctagtataccaatgcccgttcatttccatgtcggtatagctaaagaacaacctcagcctgctcggttcccatcgagttctctgccaatgaaccttaacttccaccgacctccaaatgttttctcagaaccaaaggtaatagtaaatcctcaaccccaacaccaaccctattccgcattccgtacatctgaaatgaactatgttcaatcatcaattggacttggaaggggtcctcaaaccggtttcaattcttatccaatgaactttagccgggcagatgcaattggtagcgctaaaccagtagtacaacctatgaagggtctagactatttcaaaaaccttataagggaacatggcacagataatcatgaaactaaccaataccattcacaaactggaatattcaacggacgcattgataataataataagattcatcaacaatgtatctactttggcactgcgaatggatgtaatatgggagacagttgcacctatgttcatgaccggtataggcccaactttgaggccgcggctccgagggctaagagaatgaagtttggaaggtatgagagaaatggtttttgaacataaaaaaaaaattagagttcacttttatagtcttgtctatcactggttaaggaacaaaacctgaggtgatacaactttcaattttgatcaatttgtgcgcaccaattttaattcatttaacaaagttatttgtttagagcaccagtttaatgacacccgtttaagaggtcgagaaagccgaacaatattaatttaaatcatgatttcatggtgcgtgaactagcaaccactatcaagtcaggcgacaaggtcgaagttgaaggtcaacctatctacaacgaagaaaaggtctattatctgcttaacaaaccacgcggtgtcatttccagtgtaacagatgacaagggtcgcaagacggttgtcgacctcttgcccaatgtcaaagagcgcatttaccctgtgggtcgtttggactgggatacatcaggagtcttgattttgaccaatgatggggactttacagacgagatgattcaccctcgtaatgagattgacaaggtttatgtcgcgcgtgttaaaggtgtggccaataaggacaatcttcgccccttgacccgtggtcttgagattgatggtaagaaaaccaagccagctgtttatgaaattctcaaagtggacccagtcaaaaatcgctctgtggtgcagttgaccatccatgaagggcgtaaccatcaggttaaaaagatgtttgaagctgttggtctccaagtagataagttgtctcggactcgtttcggacacctagacttgacaggactccgtccaggagaatcccgtcgtcttaataaagagaaatcagc

SEQ ID NO: 38285 - DNA, 4983 bp, Arabidopsis thaliana landsberg
  unsure (1)..(4983): unsure at all n locations
ttacacgccattagtctaactctctaactaatatacaagaaattggcttagccacagtctagatagttcacatattatttgaaatttctattgtacaaaacgctttatctcattcttggctaatttcagtcccagtaatacacattactgaattgtaataagtacatcaccattataaggttacctcaatattgagtgggagacctttannnnnnnnnnnnnnnnnnnnnnnnnnnnnnnnntcctgagccgcctttgtgttccttacggccatcacaacatgagcaccagcttctgcaagctgcctgcgaccgaagaagcaaaagagctaaaaagcttagggaagttttcagtaattcgagtcccaatctagacgaaatcaaactcaatttggttgtaaatcggaagaaacggggaagagaacaaacctcgcggtttcacggccaatgccgctggtggagccagtgacaacgcaagtgaggtcgttgacggaaggaagaggaagaggattctccaaatgagaagctgtgatcctctggaagagaatctccccgaaaacactgctccatcccctcatccactccatccatcccagattctgcttcttcttcgccggagctggggacggagatgacgtcgtttcgtcactcatcttcttcttcttccggagttagatctatgacgttgcacagcaacaaaaagacaaaaagtgtatttcgtcaatatctatggcttcacaacctcaactcctggaagctccggataatatatataatgggccggcgagatttttgtgacccagaagtagaagataaacaatttcaattgaccggtcatggactcatgggtcaacgattacacattgttaatgtgtttcataaatatgtttacaatgatttctattttgtaattatgaatgtcctgactagtagtgactatgcaaccggtcatagcattactgatctcgtagacaaaagagtaatagagtcgctccaaacttaagcaaaatgaaaggaagaaatgacactgagttatttgactacattcaaggaaaaaagtgagacaaaatcaatcctgaaatgtagaatttgtcctactcttggattttgtgttcatatgacaaatctagtatgatgaatccttcttgttttggtgtccaatgattgtggattgtggttgatgtgttattcgaaagtggaacatcattaaacaactctattttcatgagtgttgttacattgttacacataataataacttggtattatgtaaataaggaaaaaacaaaagtagtttgacagttagtacaagtcaagagactcgagcactctaccagcctggatatgaagcgccgtgattctttgttcaggatcacctgttgaaccgaattgactcgccgcccatattaaagaagcagatttttcacccaagaggcgcctgatgtcttcatttacactcgctattggagatcgatccttcccatttacgtgtccaactaacagtagtaagaactctccgcatcttaacctgtgaatcagtaaggaactaaacatgaccaaaagcctaaaccactaccatcggttacttacaaagtggatgatatcattcactaaatcataactagtgaccttagagttggaactcttaaggatgtatgagacaaaacttgagatgagaagagcttaactagacaatttgaagactattcaatgaatttgacaaggaaatcgatttaaaatttactaaaaacataaaaaccagaagagacaaaaaggaaatgaatcttcgttgacggcaatttttatcgtgtaaatactgtaatataaacatatgcaaaatgccacaacaagtgccatgaagaacaaaagcttggtattcacctgaggttttcatcagcttgtttgtctcgcatgagcattgcaacctcttcaatgccattgcaagctccaaaatcctgttaccatgagaaattagaaaagttaaaataaaaagcaagtgaaggccagtttgttccattgatatacacagaaactttaactagaggtttaaatgtgtatctgtctgagaatcaaaacttaacaacctgctttctatttcgtttataaacacagaagttgttactaaaaaacagaaactgaatacttaccacctgatttgctgatgaatccagcaatactgagattaaggcatccaagcaggctccttgctcaagtactcctcgtgttgataatacattcatcattacctgaaacattttatgagcatcccaatcacattaacatcccactgcatcaatctaaaacatgaagggtccagcataaatagacaaagaaatgaaaaacgttcaaagatgtctcatacacaagagtctcccttttcgccaaatcagagtgagaggtgacaaatgtcaaatgcaggattctagtttctagagttctctatgcatcaatagacaagtaataaactaccaaacgaaagtccttcttacgcggactgcaccaagcatatgagccaggacattgctctgaggatggagaatgcagcatccttcgagaactctaagagcatcagcaacctcagcatccgtagaaggacttgttatcttcatcggctccacactgaatatatgatccaagctcgtcactttatcatcctccgcttctttcaatgaatgttgaaaaagcaccggaaccactacgaaatcacgaagcttccatcatcagataacacattacacagcatcgatttgagaacgacaatgaggaaaataaagatatcagacgttggagatcggaaatggtttgggtatgagagaagagacgaatgattgaatctgaatcagcgacagttcggagagttttgagaagagatctaagaccacggatgcgaaggaaggagaattcagcgcaagcatcgcgtaaaccggtcctgagggatagtgtcagctccctgtaaagtctctgtgtattgagagaagtcaccagctcttcgactaccatcgacgccgcgtctgattcttctccggtctccgattctgatggattctccggcgttgctgacgcgccatcgctccatatcggtctcttcagatacatctctctcgctccgttttctctctccctctcctctggtaatcacatttattgcgccaaaacgacaaccacttagctttggtaaacataaagcagcacgtagtctaaattttaaacggcagacctttctttttccctagtaagttatcttccaagctactcaaagacaaagtatggagattcatattacacttacaaaggaaggttctgaggcgaaacacaagagaagctattaacatctttattaacagagaaaccttgttcgaacaaatccatagtttgaacacaagagacgacataattaacatacagagagagacaatgaagaactggaaaaatggctgatgatgacttgtgaaatcacaaagccaaattttatctatatacatttttgagccaatccaataatgaattcatcatgttcctcagctctaccaatcctccttgacaatcttagccttttcgaatatgaacttgccctccttgtacttctgtgaggtctcataagctcgctcgtatttccaacccaatggttcgttacagtcaacacaagatatatcagccacggtgtgtagaccagttagaagattccggtcttctttaggtcctaccacaatgttcattgcgtgggagaacaggaaggctcgcccagttcttccctggtaagtggtaatgaagaaccgtgattaagaatttggtattcacaatcaagaaacacaaaagccgggctgtctaacataagattttgaattgagtccacaacctaccacaagcatactcaaagaatgactacttttgtgatttgtaacaatttgagtcaaaggctactttgtgtcttatgttttgtttccatttccaaggatcaactttcaagttttgatttgactctaacaccaacatgtaacttagtaggaaaactgaatcatgatcagtagcatcgatcgttgatcaggaaagacaataaagtcacaggttttcttagattctaagctcagctgcagctagtcttacatcgattctccacttaattttctacatcaatcatatgggacacaaacaaaacaaaagaaatgatcaaggtgattcacctgaaaagccttagagatgatatcatcgtgaagtccaacatggtttctgcagttgcagcaactatacagtcttggaccaattgcctgagccattttatcaaacactttcaaggcgtgatcaattgctccaaccaagttctcaccttttcaccaaaaacataaaaatccatcaatatatccagaacccacatggaaaaccagaaatcagggtttctaaaccttaccagaatccaaaaattcaccaagcttcaaacgtcaatgtctgaaaaatagaggataagaacagtgggcaggtgttagcgtgcaagactagagattccacgatagtacctcaatttcaataataaacaaataagagtgggtcaaaagaagagaccacagattatatatatttggtagggtaagggaaacaaaatgagatattaccggagaggaaattacgcagtaagatatatggttcaacgaaattgagaaaaatcagacgaaagattcgattttgatctttgaaatgaatttttctgaggaaatttcagagggatcttacaagggtttaacagatcgaacaaggacgcaagacaaaattgagaggagaataaggttggagttggatgaaagttttgatctttagtctctgatcatatatgccgtgtagcgactaccttgtgacttctttctttctgggtttttgctttatgactggtaaattgagaaagtaaatcgtatcagcagtgatgaataatggaaatgtggaatctcttcatattttcttatactttttcataattatttaatttcttactgta

SEQ ID NO: 38286 - DNA, 5952 bp, Arabidopsis thaliana landsberg
  unsure (1)..(5952): unsure at all n locations
gaattttgttggaaccaaccaatatttgttgatgtgtccaaatcctagggcatcatcaactatatcattgtttttttttctttttatctttttgcttttatttccgtttaagaatatattttatagttgtgatcctcattatcccaaatcccaagtcaggtcaaacatagttttgaggcttggtcagctgatatttttacaagtttgttgtataaacttgcaaacttgagtattttaattaaatgaaaataaaccataaataaatgaagttctaaacttgagtaataataaaaacagaaaaaaaaaaaaaaaggtatgtggggaagttttgaaggggcttttgggcttagaaaaggaaaggagtaaaggaagaagcggcgcacgtggcaggcagtcacgagagtcacgagagatcgagagaagtctttgattctcttctctcatcaaatcaaaatatcatctcagagactccaattctctctgtttctcctccacttttcaacccaagtccaccctcaaaattctcagaatgattgctcggatccttgccgccttagccgattccatggagatgccggtggctgccggtggtggatcagtgctcggtaccatcaaaatcgctgtgatgccaattgcaaaggtattcaccatgtgcttcttgggtcttctcatggcctccaagtacgttaacatcttgcctccctctggccgcaaactcttgaacggggtaattaattctccacactagactttttcactttctctataaatccaaaaaaagcaaactttgaatgaaactgtctctccttttcacacagttggtcttctcgcttttgcttccctgcttgatcttttcccagctcggacaagccgtcactctccaaaaaatgcttcagtggtatttgtttccttctttgtcccccctagtctctctctagtccttatatagatcatcatattcttttccatctttcaggtggttcattcccgttaacgtcgttcttggcaccatctctggctccataatcggtttcatcgttgcttccatcgttcgtccgccttacccttacttcaagtttacaatcatacaaattggagttggttagaccccttttttttccctaccctcgcttttctgctctgacactagtctcactttatgtgccttgtttgtttcaggcaacattggcaatgtgcctcttgttttacttgcggctctttgtagggacacttccaacccttttggtgactccgaaaaatgtagcattgatggcactgcttatatctcctttggtcaatgggtactcttttttctctttttaactgcttctatgctgtaactattattatacctactagaatcagtccattagctgcttcagtttctgtctcttatgtaacagtgatacagtttcttgtcttctgcttttttttctgtttggatgaagaggagcttgatgtatgaggagtatcctcattgaaactattttgtataggatctttagttccaatgtactgtttgtcatcaatgtcttatgggaatggatattatttctctctgtgggacttcaattaaccacaaggtttactttttatatcaggttggtgccatcatcctctatacatatgtgtaccagatgtttgctcctcctccagaagggtttgatgctgaagaagaaaatcttgctttaaaaacccttccagtagatgctgctccagagcaagtccccttgcttactcagaattttcccaaggacttttcgccgactcaagatcttttgcctgtacagagcaccgaacctaggggaagaggggtttcaaggaaaggcaaggtgggactgcaattatggaatctttattctatgtttcaggagtattttacctgatataagctggttcttacgaaactttttatcttttgctccgtgatgtagattgcacagatctttgttttcctctatgagaagctgaaactgaagcaaattgtccagcctgcaattgttgcttcggtaagtatctcgtcttttctattccccttttttatctgacaatctaaagatcaagagaccgtgcgattgcctttaccatgtaactaaactagacgtgtttttgttaacttcagatccttgccatgatactcggagcaatacctttcacaaagaagttgatattcacaaatggtgcacctctattcttcttcacagacagctgcatgattcttgggtaagcacactctttatttgtcttctgtgaagcagctgcaaattaatgagttaatatatgtaaaacctttggctatcagggacgcgatgataccgtgtatcttactggcactggggggaaatctcattaacggtaggtttggtggttgctttcttttcatactgacttagtttttagccccatccatcacatggatcttattggttccttgggtaaattttaggaccaggaagttcaaaacttggtttcaagacaacagcagctattataattggacggttggtgttagtgccaccagtaggactaggaatcgtgacagtagcagacaaacttgggttccttcctgctgatgataagatgttccgatttgtgttactccttcagcacacaatgcctacatcagtgctctcaggagctgttgccaaccttagaggctgtggaagggaatcagctgctgtgctcttctgggtccacattttcgccatcttctcaatggctggatggatggtactctacattaacatactcttctgaattctcttcttattgacacattcatctgctactatacaatacttctgtgtaaatacagtggcatctctatgtgcctgaaccaaccaaaattctgatttttttttttcctttcctgtgtaaatgttagtttataactcttttcaactaatgagcactccctttttctctggatatatcaagaatattatttgaaacacgcgacaaacagcacaactttagttaaacgtcaattaaaactaatgtgtggaaacagtaccaagtcgataaacagcagacgaaactcaagtatcttttaagggtcttaaaaaaatacagattctggaggcacctacggatctgggcatcagtcagaaaaacggcagccatcttctggttctgttctccctttggctatgagagattgctatacccctcctgtgtgggctgcttagccacattgccaacacaacgcccaccagactcacaactggtgcagcagccagaaacagccatcttcctctgctgactctgctcacaccagactcgctctcacctctctctacatattcctcttcccccgattctgtaccatcatcagaggaggagctatcctcgctcacatccagcacattccgctttccctcctcgtaatctttatcatctgtcgggagctcataacggcagagtgggcaggagttacgggcactcagccaaggtacgatacaatgagcatggtataaatgtagacacggaagctgcgtggtttcattgcggagggtgaaaagctccttgcagatcgcacaaactaggcccttcattacatgctcctctgcaatgataacccttggaagattcctgacgcatgagacagatgcaggtggtgcacctcttcttgaattgtcagactcagcaagttgctcaagtagttcatcaaagcctctctcatcaagataatccccaacatttgcagcatagggagagaagtccaaatcctccaaaccagtgaagatgttgcgagataacgcatgcctcctctctataattctttgacgaaagcctctctctaactcaggtgaatcaaaccgagtcatggagctgtagctttcacttggacttgccaaatagtttctatagcgtgttcctgcaaccccagaaggacccgctccttcctcccattccctgtcttcttcgtctgagttccactggttaagaccagcgcgcatcgggtctatatcagtgtcaaagtcaatgtcgctcctgtcatctggttgaacaaagatatcggcatgcctgtcagtggaagcatcagactctccaccgtaagcactaaaagaaatggcatcgttatcagcatggggaaatctgtagaggctaaaactagcgttgattcggtntcgccaaagttgtcaaaatcatcactttcagattctgagaaaagtctccatctagtagagccgcttggagtggtatgagagctagttcgcagatcatcacgtagatcctcactagcatgaaccgttgaaaggctttgccttgcaatgcttatcaagtgtgtgaattgttgggaggaaagatcaccaacaccgacagactcagagctgtcgtgcctagttgttcttctcctcctcctcatcctcctcctcctaattgtctgccgccgagccaagggaggcgcgggagtgccgaaatcttcaagcaacaaaaacttacagtcgacacataagctgaagatttcaagatcatcggaagcagattgaacgactcttccgcacagattacaggcggacgatgggattgaattgctgctgatatccatgggatgaccattagaaggtccttgtgattccatcggatccaaaggcggaagctttgaggtctgaaaaggggcatacatataaaagcatgaccaaggagggttagatcagaccggatacacccacactaatctccaattgctcgaaaatcacaaggaacaacaaaaaggctgaagagaaaagattaccgaagagatacggccggatcttcaaaaacctagcaaggagtcatctgtccaagcaaacaaggcaaggggatggtttcgatgcaagaaaacaggtgttgggattttatggcggaaaggggtcaacgacgacggatgggggtcttgtctagctgagagacatttctcatcttctttccttttttcttaacgtttattatctctagactaaaaggaaccaaagtctccgactcatgaagagggtctcaacttctgtgaaattgcccaagtctagaggcagaaaagactatggagtttccgttgagccgccagtcaaatccataatatagtacattgtatgttggtgaatcatcaaaagccatgctaactcaactagtaaagtggttgcattttaagcagagatctttcccaacttgtagaaatgtggtgtagagtcggcaactcttatacatgatttttattctcaagcttaatgatggttcacacaaagagctttcattgatgtatcagatgggtctgagatggtggggaatggtatggaagtactgggtttgggaatgaagatgttctccatagaaagctaattagtttttaggacaatatcacagattctgtcgagttgtcttggacattaataaataatcactcactggcttctttcgagagcctcgtgggtccgcatccatcaatttgtccatacagtttttttttttttatcaatcgtctttgaacctaaatcatggcgtatagaagaaggcaggggatcggaaagtttgcgactttcaaggaggaggttgatcggcttcccccggaaagcatcaccgccgtcaaggatagatcaccgccagctcgatcctcccctgcttttgaccaacccagatctaaggtttctcctttatctcaactgagagtccactttatgtttttgcatttacatgatccgctcttaggatatccttagtgaccaatctttgacgacttttgactgtcttaagttaatgctaaactttctgatcagattcagctgtgaggtcgaatctagtggttttgttacaagttgtgatcatgagatctttcttctgccattgatcctatgttttctggggatgtataactgcagaattttacgaccgagccaaagggcttgtggggagtcatagcccagaaagcaaaatctgttattgaagatgattaacatagtgatcggtctggatcaa

SEQ ID NO: 38287 - DNA, 3287 bp, Arabidopsis thaliana landsberg
  unsure (1)..(3287): unsure at all n locations
ggatcaacattttgcccggctaatgaaagagcttcaagggactgatttttggaagctgagacgtgcttattccccaggggtttgtgaaacgaataatcattcatcttttggtgcgattttggttgatggtttaactgatatgttttgtggttttgtgtaacttacaggtgcaggaatatgttgaagctgctacgttttataaattctgtttgtctgggacgctatgtactctagatgagattaatacaacgcttgtaccacttagtgacccttctttagagccgttgcagatcaatatccttgactatattcttggggtattttttagaccatctttatttatggttaatacatactgtcaaagattttcgctattgtttggagttctgaattgtgtttgattattgtttgttacttgcacagcttgcagatttgacgggagagctaatgcggatggcaattggtcgcatatcagacggtgaaatcgaattcgcgcagaggatttgtcagtttgttcgacagattcatagggaactaatgctagttgtgccaaagatggatgacagttacgacatgaaatccaagatggaagtgatgcttcaaagtgtgatcaaaatagagaacggtatgcacaaatctcatatcctcactctattagataccaaccaatacgtttttgtaactcttttgcttgtttgtttgtttannnnnnnnnnnnnnnnnnnnngtgagaggatcagagtatattccattgcttggagatgatgcaccaacatcatacctattgggagctgcagatgtcgaatgattaaaagtgagtggtcttttccgtctctcggacacattttaaagttcttgttaaggttggtgtgtttgcgacaagtaggatcgttttagtatggacttatcttcagagaattttagccacttcttacttctgaggaactttaaatttgtatgctgcaagacttttaagaaacaaatggttagaacaagatgtaaaacttttcttttgttgaatggaagctaatttataatagaatctagcaattactttattattcaagttaataattttggcccttcttcactttttctagatctttcgtaatccagaaagtacattttttggttcttgctgtttgtttgtgcttaatgaggaaacatatatagatactcttatcttttatgcagctacatataatgcttcttattatagttcgacatttggtacttttatataggattttgacattttttataaatttatatctatgattcatagatagagttttattttgaaatcataaatctttcttttgtaaagaaagtgataaaaatagagaaaaatctcacattttaagatgttcataatctagttatatatagagttatgtgcaagcaataccacaatagtacaatctgtgtgatatgattattgggttttgatgtttttcctttttatttttaagatttcatggcttatataaaggatttttatgctaatgaaaacacaacttccaacaattagcctaattctctgagagagacttgggttaaaaggaaggattgtttaaatctctctttctttcttacgttaacaccgattactagataaaagtcgaagtgttacaaaaaacgtatttagtcagggcagattctcttttattaagaccctaaagttgtcttgttgtttctttgtgcacggctaaaatcttgttgattaaatgtcagttataagttacaccttacataagtgtaagcgatccaaattggtatgttagtgatgcaaagtataccttatatatactcggaactttactgttttggttgcttatcttgttttaccatccatctttcttgtaggatggggaaaagaggcaatgtgctaagctaatgaaacagttaaatgaaggttagatttttttattgtacgtcaatgctattttcccccaatgtttgagctgttagctccttttgtttgtcttgatagtttgatttatgtggaaaatgaatgtttgcgttgtgttcttatgttagatcaagtgagtgaagctgaatctatggaagaagaaaagcagagaggagccgaacctaaagaagaagaaaagcagagaccgacagaaaagttgaaaagcgatgaagctcttcagttgaacatcatggattcagagtctatcgaagctgctgtcttggacttggaagagatgattgttcgtttcgagtggctgaaagacatcttaactcctgattcttcggaaaacaattcctggatatacgaggattatcatccatcctcctcaagaatgtgacaggtatcgtttcttctttgaacttgataaaaacagtgcctttaggatagctattaagagaagatagtgtcatgagaaactgaagttccaagattgtttacctttaagcgatctaaagttgttttaacttgttcaggtattgaacatatcaaactaaaatcttctcctctgggtgcaatttcgtacaggtaagatatatgtttccttttatcatttctgatggattcgtcgtccacactatttctaagatacattttttggcagtcctcaggtggaatatattgactagaaaatgtaaatgagcaaaaggcctcaggtggagaagattgaaaactgaacataactctgtttttgaaaatgtctgttcttttagatatttctgtttctttgttcctttgtgctttggtggttgatacttttacagcactttctctgtatcttaatggcacatttaactttgagccaactttttacctgtattgaatagacaaacctatatactatatagcatgaactttgggaactaacaagaatgatctagattttcatcaaaggccaatgataatgtagagaattggagatctctcagccatgtttggagatatctttgggaactaacaagaatgatctttgcgtgactcggcccaataatccagatcagtcaacaagttaaatgtcgctattcaacttttgttattatctctctaagttataattgccttagacctagtaacaaaaaaacaaggtaaaagtgagagggagagcgtgaaatcttgcaagtgagatacctcaaatatttttttgccgtgacatagtttcctccacaccgatggtttttaatgcgtaatacacttgtatcaatcactgtaaatcgtacttttcattcgtgataagntcgtnagctgaagattagacacttgattttgtaattctaattggtggttttatggtttcagcacaagtagagatgttttt

SEQ ID NO: 38288 - DNA, 5133 bp, Arabidopsis thaliana landsberg
cgcatcttggtttcagacgcattactcttttattccttgcattacctgtcgcttttgtatgatacaatattaaatagtaacttcttcaaaccaaaaattctactaataatgcattacccctaatctcacatggaatgaagcatattcacatttcttgtttcacaagtaccttctgagtaaccctccttgatctctactcaaggaactccacaaaaattaaaatctcacaactccaacatcttcttataacacgtcttgatttatctttaagaaccaaacaaaaaaccaaaacctagaagagaaaatgggagatcaaggagtacaacaaatgcaacagcctattgttgtgtatccaaacgcttacaataaacagtatccagacccttctacaaaaccttcttcttcctctggctcaagcggaaactttgggacggtcttcatagtcctagccgtgatctttgtcttgtcggctcttgcttgtgtctttggaaggctatgtaaccgtgaaagccgcgcggctaagcagcaacatagcaagcatccaaagcatgagaaagcttcttccaagaagagccgtgagattcggcctgtggagcgtgagccgagggagagaggtgatatggattttggtttcgatatgaaacggcctgaaccaattgagaaaccttctggaagagacggaggagaggacatagaattcgggtttgataacaagagaggtgaaagaggcgcgaaggcggaggcggaggaggaccacctccaccgaatatcaaacatgcagtgaggttcaagctaccggaaaatggagatcatcattctaaaggagagatcagacgtggaggtccttccttcgagttccgaccaggacactaatgatcttaatttgtttaagaacaaaccacttgatatgtctttattacttcctcactttcatttcttttgtgctttttttcttttctggttgattcttcttatgggtatggaacttagtgctgaagctatcaaacttcttattagtctcttggtgtgatgtataaagtcgtctctctacatatcaaaggtactaaataaaatccataatatttctgagtatattttgtaagaatcatggttaaagaatcaacaaatttataagaagaacgttttttatcagaatacagagttcttcactatcctcttcactcaaacaaaaattaagaacacagaacggagatacaaataactctttcacaacttatctaggttctatttctttcttttttctgagggaacttcgccattagagggcaaaaactaaaggcacctaccaataaatgtaatatacgaaaagaatggctttacaacgaggaggcagaggtatctgttactttcacctattgtatgatcagaaccgtcggttgttgaaaggccgagtctcagattcattccctgagaaatctgaagagcttttggcagagtagtttccactgtacaatcctgactctacgctgttatcaccaccaaacgccattttcctgaatttcataatgtcttcattgtattgccctgagtcataagttgtgctttgcccaattttgattccgttgctaatatctcccgagtctccgtcgcagtccaatgctctcacaaccttatttcgaagagtagataagttttcagatgtgagaaatcacttgttactatatatgggagctttggacttttggttagtcagaattacctgaaccatgcgtgggcgttttggaccagaatgtctaacacatgcagcggctgtctcgatcattctgaagacttcatgctccacataacgcttttcaagccgtgtatcaatcagttcgcttaaatctccggtctcaatggctttgagaagcagaggacgagcctgtgagttcatttataagtactatataagtatactagggccaagtccaaccatatattgaagaatgtcaagacagattagtatttttacccattcaaccaaactctcttctcccaaaggctgagtctggtcaacaggtttgcgtccagttataagctctaagagaacaaccccaaacgagaatacatcggatctatcagtcaattttccactttgtgcatattccggcgctaggtacctgataacaaaacatgtcatgcagccataggatcaataaagattcaggtttgatccaatttgttgcctaaagccatatataacaaacttttcatcaggcattggatcaataaggtccagttttggagtagagtttgtgatgaatgtttgcttacccgaaggttccccataacccgagttgaaacatgagtttgtgttgtatcattgagtctagcaagtccaaaatcagcaacctaaacatccaaaaaacagaactcagtctcattaactaaaaactttacagtcataagatggatttaacgaaaaggaggatttcattattgcctgagcttcatattcatcatctagaagaatatttgctgactttatatctctgtgaatgattttcggatgacctgtaaaataaaacaaggatatgattctggcttctgtttaaactatgaagtgcataaccaaagcacacaactaagaaaatgtgaaggcattacttacagtcttcgtgaagatatgccaaccctttggctgatcctatagcgatccggactctcttagaccactctaaaactggcaaaccctttcctaaagcgtaaagcgagtcagtctaacacgtaaagctaaaaaaaagtcttatctataacgaaaatggtaacaagtcactcaccatgcaaatgatgctccaaggtttgattagaaacatactcatagataagcaatctatgctggtctgaaatgcagtaaccaaccagagagaccaaatggcgatgatgaacgcggctgatgatctcaacctctgctttgaattcacggtcaccttgtccacttccagctttaagctgcttaaccgcaacaactttaccatcctgcaatgtacctttatagacacatccaaatccgccttctccaagaatgtttttgcgagcaaagccttgtgttatctcagcaagctcttcgtaactgaaatgagtctggccacttccgagtatagcagagtcaggtgtgccacttgattgcatttgatgatgaggataaccaccaccagctgtaccataactgtttcccatagaggattgttgttgctgtgaattgttatacattgaaccattaggaccagaggagtatcctttacctggatcttgaccgtataagaatccatctacatcaaaagcaaagatagtcagagagatgattcaagcacatagaagatgatcagagagagataaaggtgagatttttaaacctgatttaacagagaaattgggatgtggcaagtactgtgagtgattatagctatcaatgtttctctttttctgtcttctcactaagaacacaacgcctataagcgccatgattgcgaaaccggctacagccataccaaccatagtcttcccttgatagccgccaccaccgccaccgccatctccattgccttggtttggagtaggagttcctttgctaggggatgtgagagatggagacaccacaggtccactagaaggagttttgggtggtactgtggggaatgggctcggcggagcgttgggattagccggaggagaagtggctggtcctgatggttgtattgggggaggattggtagggtctaatggtgaagctggcggtgaatttgtaggatctgatgctggtggagctggaggagattgtaacggtggtgattccgggtttgtgggtcctacattcggcgacggcgacgatggaggaggcgattgaagatcttgagacggaggagggttgttgtcattggattcatttggtggagctggtggtgtttcggaatcctctggaggagaaggagattcgtttgacgtcggtggcggcggagaaggggttgaatcaaccggtggagaagaatcggaaggtggaggtggagaatctgttagcggaggaagaatcgaaggtaaaggaggaagctgtgaatctggaggaggagttgatggttctgacagcggcggtgttgatgatgaatcagctggtggactaggaggagaggaatcaataggtggaagagctgagttttcggatggagtctctggtggaggagcggtatcagctggtggtgctggtggtgaagaactcggcgactcgcctaagtctgacattttttttttctaaggaaaaaactagcttagtttaatttaatttaatgatggattttttctaaggcaaaaactagggtttataaaattcccaggaccttgagaaacaaggtggagagagaggagaaaatgtacagactttaatttctaaaggtctcttctctctccctcaaactttccttttcccaggaaaaataaaataaaaacgaatctaacaaaaaatcgccatgatcatagatgatgatgatgataatagtcgaaggcacgtcgtcgtcgtctctgttttttttttttttcctcatcgtattgtttcttttgggacgacacaccttgattctcgggttaccgcgtaaattcaacgaaatcttttaaagtttaatcggaccttttgcgacccgacccgggtaatctcattgaagaactttctaccacgatgatgtgaaatctagatgggcctttattaaggacatgataataaagcccattacaatggaatagatggacctttatcaagggcgtgtactactgttccgattttatgatatttttcctatcaaagaagtaaaacaaaactttagccacccgagcaaggcatagctttaaatggaacacctatcacatttaccaaatttaatacctaaaattgctatatttatctgatcatcctatctttctttttcttcttctccaatcaaattcaaccatgtatttatattaattttccatatcgtaaatgttcattacgaagatattttgttttcaatctataagcttaaaaacaaactaatcctcaattagatgacacgtcgttaaaaatgataacaacaacgccaagccataatttccttagcgtggcaagtaacgtgatcttagtttaggggtaatatagtcaacagggca

SEQ ID NO: 38289 - DNA, 3341 bp, Arabidopsis thaliana landsberg
  unsure (1)..(3341): unsure at all n locations
agtcagcattttgacaggctatttgtttgaccgttgcctgttttgttttccacttttttccttctatttatgtttttttctgtctcatgtgtttgtctttttttattgagttgatattttggtttttgttttgttttggttgttgtattgaataaaattttgtgtttgctacgaatttttcaaagtaattactgaaaaagtttttaaaaagtcagaaaggggaatggaatagactacttgaagtcttgaacattgtaaagttgcatagaaaaatgagagctgaatctttcctttaaaaggttttgtcaaagatgatgaagttggtctttaactaaaattttcatgaatctttttggtccagtttgtctcctctctcgcattaaaaaggacagaatgtatggagtttcgaagccattgttatcgaagaagatttaaagcaacaaggaacgatggtacttttgtgattcattgaacttttttaaggagaacaaaaatgaaactggttcaatttcatccaaatatgttctacacgaatacatatatactatatgtaaaattcaacaatatcatatacaacgaaacatttacatcaacagataaataaatttgttcacaacccaaaaacaactgattgaagctaatcacaaactgagatgctgtaaagaccaacactgcacactacactcgtgttctctacttagacaccccttcctgtcattaggaactgaataaatgaatctctcagaccagtgagtcttccgatatgacagtgagcagagagtatttagctttgattgagatcttgcctgcctcaacacaaagtttagcaccagtcacaacccaatatccaggttgttcctctggacctctcatcacttccttcgtgtctacaagactcagcaactttggtttcacaggcggtgatggccctctaggatacactgcagagtttatatcaatcttagactgtggcttagttgttgccgggtttggacttaatcccgtgcttagtcttgtactgatcatcgagaaaacaccggatttgcgcgagtttgttgaaagattgtcccagcacgatttacgtgtaacagctgaagcatctagtgagaaaccgagcctcaagaagagaactttcctcatccccattcctttcacttctaaccaggctttggttacaatagaggcggtgtcatcagaccgtgctccgttgtactgaactgggtaggtgcaaacgtgtgagaatattccccatttcacaggtacataataccctttttcaactggttcctcgatgggttcataggtgtcatcgtgtgagagatggagacttggaggacatgcagagaggtgctgcaaatgtattgctagatgatttcctttctttccctcaaggaagaagcgtagtccggttactggtcgctcacctgaatcaacctacacaacagttttcaaaaaattggaaagtgtaaacatagcaaagggttatcatttacatggatcaatgtgaaaaacaaatgtacctttgatgtgttgacgtatagttttggacccatcaaagagaactgaagggatggagaactttgtttcgagcggcgtagtccaagagggagatctccatacactggagcccattggcgtggaagttgaaactcaagaaactgatgcaactcttctataggtggcttatctacaacattttaaacaaccttgttacctgaatgaaccgttgagtacctaagatacaaaagccaaaaaagaacaaaatactcacatcggaggtataagttcactgcatgactaagaaatcctgttcctgggagaccgctcaagagtgaagttataggaacaaaacacatcgatataacgttgggtgcttgtgatactgttgagagccatcgttcatgactttgccccagatcaacacctcctcttctgatacaaaccctcataatctcctggagatgcaaatacacaattattttaagcttaaaaagaaaacccatttgactcactgcatcaatagtaagaaatagcgaacctcgttcttggtatgcatgacaacagcagagctaaccgaggtaccaaacggttgaagtccccattgtagaagattctcctcctgcagaaccattaaaaacatgtcaagctacattgtgatttgaacacagcgacactgatagctagaccccgactactagactctttacctttggcttccctgaataaacagaagcaggagatttactctcaacaggatcaacacaaaatctttcatcaccccaatgcttcaacgattgctgaatttcctcaggttcatgattcgatttacgcatctgttnnnnnnnnnnnnnnnnnnnnnnnnnnnnnnnnnnnncaacaacaacatgagtaccatatttctcaataaacctataaaaaaaacaaaaattcaatctcactcattaacataaactccaaatcacacttaaaaactttctaagtgaatcatcaaaaccatacccagcaagtgcagcagagtcccaagaagaaggaacctcacgtttcacttcatcacgtagtgtcaactgcttcctaacaatctctacactatacaaactaataaaccaaccatcataagctaaagtcttaacagagctcgcatcttttggccaacatttactaaacgcaaacatattattaaacatccctgacggaatcttcccggagagacacatatcttgattaaacttctccgacatctacacagaaacaaaaataaacacactcaagaattagggtttctaaaaacgaaaaacccgaatctcagtggattatttagattttaactaaaaaacctgattaaaagagagtatatcggagcgtaatcgagtacgttcgcctttatcgcacttaatcgagctcgagacgttgttaacgacgataccaccggggaagattaagtcacggttccgagtcgggtcgatttcgactaacctggaaccgtcgggtgtggttttacaagcggagaaacgaacatcggagcagagatcgtaacctaatccgattacagagacggctttctcggcggcggagtgagcatcgaggcgggtgaaattgttaaaggccatggatcggagagagacgatgatgaggaggaaaattcaaaagattgtggctgtgtgtggtggtgaagaagaagagaagcgcgaaggtattgaagtggtcaacggtgtatggctcaaagtgaaatactttaagaatagttttggaaagaaaatcgttacaacattatttagtcaacacgccattactttgactttacggctaaaataatgaatgaatttcggatatggaattatata

SEQ ID NO: 38290 - DNA, 3131 bp, Arabidopsis thaliana landsberg
tgctccaagagaatattgtgaaaagggaggattctcatcaaacaggaacggagtgatggaggcaatcttcacatgagcagcaaactcacatggttctccttccacgataaatccctttgcagggtcagtgaatgtttcaagcgacagtagcttttggcaatccccaaaccgttttagaagaactgaaacgcttaacttcaacatttacatgtttacacgtatacacacacataacgattcgttcattcatatatacatacgagagaaagatagagataataaggatttgagcatacgaaccttggattgagaggtacttgttgtctttcttgttaaagacaaagaaagagagataagcaaacacatcaatgggtggtgttgtggatgagagacattccacatacatagacacaaagccctttccattgtcctcttcgtttccttttgggtaaacaaccaatctcctgatttttacaaaaaaggcaacatttcttagttatatatgcttgtagtgaagaaagatgtgaactttagctaagaaagatgagaactttaagtatagaacaagatcacatatataccagttgtgtccaccggaagagaaaggagatgactcgtatttctcgttagcaagctgagaaagtctgacaagagaacaagacgaaggaggagtctttctccaagtcttcaacattgcagaatctgatgcatatgaacccattttctctacaaaatgttgcaaccctagagagcaaaacaaaacatacccataatcagaaatgatctgacgaaaatcgagttacaatacacaagagaacattttttttagaattctcagatattaaaaatgacacagaaagctttatgctttttcctcttaaaagactaaacaagttgaaatctagagaaagaactgaccaacctgagacaacgagagagacttgagagatttcttctgcacttagtattagatctagggtttagataccatttatatagagaaagttttagagttgcacaaaacataaattaataaattaatgtgttagaatgggcctaaagctacaaagctggcctggttttgttttaaattgttggtttcatggacattttcgacatcttcgaacatgttattttttgagactatgcaaacttgaagctctttactcgagttgaaatcgtatgacttatagtgaaattgtacatttggtttcgatttttcttttacactctttcttctttgagccggtaaatttggaatttttcttcatagtggaatcatatgctgttttttttttttatagtaaacgttacaagaatgaatggtaactttatccaaaaaaaaaagaatcatattattttgaaatgattttaagtaaattctaggttcaataacataagatttgagactaaatttaaaatttcttagtaaaatatatgattttttttataaatacctataaaattagtaattagctttacggattacgtactaatcaaacccttcgtattttgtttttcatagaaaaaagtgtagattttgggaattttgcattaattaatcatttcttgggtctgaaaggctaaaacaaaaggaaccgaaagataaagttctctctgtctttatcttccacttccacatccaggtcgcgttgcttcactctccattgcaaagagaggtctctgcgatttctgcaactcacccctgaaaccttcttaatatacttcaactgccactatacctaaaaacttcctctgtctccgttgagctatgataaagactgcagatttcactctcttcttcttcatcttcgtcttctctcccttgttgcctctagctcaatctcagcttcctgatctcgacccacaagacaaagcttctttattgatattcagagtttcgattcatgacctaaatcgaagcttatcgacatggtacggctcatcgtgttctaactggacaggtttagcttgtcagaatccgaccggaaaagttctctctctcactttatctggtctgaatctctccggtcagattcacccatctctttgtaagctctcttctcttcaaagcttggacctttctcacaacaatttctgtggaaacattccttcttgcttcggttcgttgcgtaatcttaggacacttaatcttagtcgaaatagattcattggttcgattcctcccacattcatgagtcttaaggagcttggagaagttgttctaagtgagaacagaaatttaggcggtgtagttcctcattggtttggtgatttctcaatgaatcttgagagagttgatcttagtttctgctcgtttgttggagaactacctgagagtttactgtatttgaagtctctcaagtacttgaatcttgagagcaataacatgactggtacactcagagattttcagcagccattggtggttcttaatcttgcttcaaatcggttttcgggtacactgccttgtttctacgcctctcgtccgtcacttagtgttctgaatctagctgagaactctctggttggtggattaccttcttgtttgggttctttaaaagagctgagtcatttgaatctgtcctttaatggcttcaactacgagatatctcctaggcttgtgttttcagagaagcttgtgatgttggacttgagtcacaacgggttttcaggtcgtcttcctagtagaatctcggaaacaactgagaaattgggtttggttcttcttgacctctctcacaatagcttttctggtgatataccgttgaggatcacagagttgaagagtttacaagcattgcgtctctctcacaatcttttaactggagatattcctgctagaattggtaatctgacatatctccaggtcattgatctttcccacaactcgttaaccggctcaatacctctcaacattgttggttgctttcagttacttgctctaatgattagtaacaacaatctctctggcgaaatacaacccgagcttgatgcgttggatagtctgaagatactggacataagcaacaaccatatatccggtgagatcccgcttactttagctggtctgaagtctctagagattgtggatataaagtccaataacctctcatgaaaccttaatgaag

SEQ ID NO: 38291 - DNA, 4644 bp, Arabidopsis thaliana landsberg
aacattaagcttcacttttagatttcttgtagagcaagttcctcgacaatttattataatcctcgacaatttattataaatttaggatgctacccgattgttcaaccggaagcaaatgttgggaccagaaatggttaaatgcagtcactatatcaccagtcagatggataccaaaactattcaccaccgcaaatgcaaccgcaaccacaaaattggccatctcaactccaatcgctccactgatacctttggtcaagcttattatcaaaagaagtggtgacatggatcttatcaatgagaaagagaaagaccggggacgaaacagaggctttgctgatagaaagacttggagagtactaaaggtgttgctgttgaggattcagaaagtataagagggcgagagcaagctcagtttggattcatgctttgatgttgtgagagttctttgtgaaactttggccaagcaatgtgcttgaagagagatcaatgctgatctctagaggagattgatgcaatctccttgttattgttcttagagtgtgagtttgggatatcaacaatctatcatccacccgccactactacatacttaatcgcattctcaatcacaaccacaacaatattctccaccacaattccaaaagtaacaacatccaaaattgtaatcactgccacaacaacttctatcaacacaatgagagtcacacacacaaactacttgtgtctgcggctatgtttgaagagctattatgaaatgatccatagtgtatgtagttcattgtttatagtaatctaatatttctaccaataaatatcgtgagcgcactatcttctaagagcatctccaatgctcaactctattttttcctctattttagaagaaatatagttgatttgctccattgtattcctttaaaatagagttacctctaaaatagaggaaaaatgtaaatattgctctatatatagtgtaaaaaagaagactactctatatttttctctattttagagtcatacattggagcaaaatcaacaatatttcctctaaaataaaggggcattggagatggtctaataccatataatttattatctaatatagaaatcattttctttaaccaaaaatatatataaatcattttcttaaactaacaaacttagaaaacgtgtaatttggaatttcttaaggaattgtatgtttgctacaaggttctacacattatagtcaatttatgttttatctctcgcgattttgttaagttgcatgcatagctaaatctcggtattgaattttgaggtaaaacggattaaattttgaagtaaaacggattagttgcgagaactaacctcataaaaaacgtgatatttcttaaaggtcttaaaagtaaaatagagcaatagaatgaataatctcaggaaaaataccacttgaaataattcaacacaagtatatgagatctagggtatcatcggaggcaaaattctaaagtataactaaaatatatgctaaaattatttaaataataacatacttgtaggtgttaactattgcaaacaaatgaacattcacaataacgcttgttaccgggcagatcattacaagcgcaatttttaggcatcactcttgtagtatgtgcatcttagaagtcaaagaaacacattgtttgtggattacctctgtctgagcatgttccattaaacgcatttgtccaacgacaatactctggttccttcattggttcttctgttggtgcaacatttgattcttctgttttacaagtcacaagcaaatagagtattagtaattatccatactttttcttctcaaccaaaattgtatttttccggtggacaaatatatgcatctaattaagatgtaatgtattgttgttaccatgtgataagtgggcatggataagagagaaaaggacacaagaagccaaaaagattacttcaaccttcatcttgctttgtttctcttttgactatatttttttctcttcttttaaaaattgtatgctatggtttcagctgtaaattcattatatatagctattttgcatctcacattttggaaacacaatgtaaatgtttgaccaattttttttagtcatgttaaagaatattgaccaatttactttgttttggtatatacaaccgctgtggtgcacatgtactcaagcccaacatcgtccagcaaaactttctgaacaatgaaagtagcaacctgacataaccgttcaaataaatcaatcagatgaattgtacatgccgaaaaccaatcagaaacatcagttgcagaagaaaacttatacaagttctttgtatgaagcaaagatttcaggtatttgcaactggctgtataaatgataggaaacttgctatacatttttcaagcatgtgaatctaaagagaagcatctgaagatggacaaacttacagtctttgatatctcgctgccattatccattgtccagatgcacaatgggacaattttagatagaagatagtatacgatcatttactgttgataccaccttactggtccacctgtaactaagaaactggagagccatgtcacttgtggcctagatggtcttaacaggatccacgtgcaggtctggagcatgctataatcgcgggagacgactcactactttttggatttacctttcatcttaaatgattgtttttcattgaactgttttccgagcgtttctatatgtaccaaatggaccggtgttacttgcaactccgatcattccagtgttgacgctcttcatttagcagccacgggtctacgcggggatatagagttaagcatcatcgccaggttaagcaatcttcggtttctcattcttagttccaacaacatctctggaacttttcctacaactttacaagctttgaagaacttgacagagcttaaactcgacttcaacgagttttcgggtcctttgccttctgatttatcttcttgggagcgtctacaagttcttgatctctctaataatcggtttaatggtagtataccatcttcgattgggaagctaactctgttacactctctgaatcttgcgtataacaagttttctggtgagattcctgatctccatattccaggtttgaagctgctcaacttagctcacaacaatctaacaggaactgtacctcagtcattgcagagatttccactctcagcatttgtcggaaacaaagtgctggcgcctgttcattcatcattaaggaaacacacgaaacatcacaaccatgtagttcttggcatagcattaagcgtgtgttttgcgatactagctctgcttgctatcttattggtaatcatcatccataatagagaagagcaaagaagatcttcaaaggacaaacctagcaagaggaggaaggattcagatccaaacgtgggtgaaggagataacaagattgtgttcttcgaagggaagaatcttgtctttgacctagaagacttgttgagagcttctgcagaagttttagggaagggcccgtttgggacaacctacaaggttgatctcgaggactctgcgaccatcgttgtgaaaaggatcaaggaagtgagtgtacctcaacgggaattcgagcagcaaatcgaaaatattggcagcatcaagcatgagaatgttgccactttaagaggatatttctactctaaggatgagaagctcgtggtttatgattactacgaacatggaagtctttcaacattgctacacggtatgttgataatgccaccatttgaatttatacagtatcttacatagctaagttggtctatatgtgtatcgatactcaggtcagaaaggtctcagggatcggaagcgtctagaatgggaaactagactgaatatggtgtatggaacagcaagaggagtagctcatatccactcacaaagcggaggtaaactagtccacgggaacataaaatcctcaaacattttcctcaacgggaaaggatatggctgcatatctggaacaggaatggctacactgatgcattcattaccgcggcatgcagttggctatcgtgcaccagagataacagacacaagaaaagggactcaaccgtctgatgtgtatagtttcgggatattgatattcgaggtactaacaggaaaatcagaagtggcaaacctggtgaggtgggtgaactcggtggttagagaagaatggacaggagaggtgtttgatgaggagcttttgaggtgtacccaagtagaggaagagatggtggagatgcttcaggttggtatggtttgcacagcgagattaccagagaagagaccaaacatgattgaggtagtgagaatggtggaagagataagaccagagaaactagccagcggatacagatcagaggtttccacaggtgcgacaacaactccgattggaagtctatcaggatctccgtatatactataagaaagactattccatctttccttaatgtattgaccattcagaaaaagatttcaatatttctacagacgattatcgtgattgccatttgagaaccgtttccaacaaaactagaatctgtcttctaacaatatttgaaatatacttgtaaccatttgtttcttatattgacactactggtcttgtgttaca

SEQ ID NO: 38292 - DNA, 5495 bp, Arabidopsis thaliana landsberg
ttgtggtttgtacattttttcttgatgaaaaatatccaaagtttgtttactgctccttatgtttacctttttttcttggttctgtcattagacgaattgcagtgtgcctaatactttggtcatagccaattgcgaaactgttaataggcaggtaattagtttttctctaccaaagcttgtgcttttgtccttgtgttactctctgctgagaggaaattattaaaataccgtttctttctatgctttcagcttaatgaaaaggcacactctccatttgtgaagaagtacaagaccatcatccaccctggagaggtgtgatattcctgtattctcagtgttttttgttaggtggatttactgaatctgcatttcgtttaggacttgagtgctgaaaaaagattttgttatgtgtacccttcattaatcgcaggtcaacagaatcagggaactccctcaaaatagcaagatcgtagctactcacactgacagtcctgatgtaagttctgctttctcgggtcatcagcgtgacaaaaaaaatgctttcgttattcagtatccttgtttttgaatagttccagtttcagtcatgcaagtatgatatattggttttcagattctcatttggaacactgagactcaaccagaccggtatgctgtgcttggagctccagattctcgtccagatttggtatgctcttgtgagaattttcgttgtgttgtctcactgagttaaacaacctgcttgtgcatcatcttaacaatcgaaagagctactctttttgcatcatttgaacaacttttattttcagttactaattgggcaccaggataatgctgaatttgctcttgcaatgtgcccaaccgaaccttttgttctctctggaggtttgtatcacttctatctttgtgtcatatcttgtggttatgcaagatttctcatcaaagactcttccgtgcaggcaaggacaagtccgttattttgtggaatatccaagaccatatcacgatggctggttccgattccaaatcccctggatccatcttcaagcagactggtgaaggtagtgataaaactggtggtccttctgttggccctcgaggcatatataatggccacaaagatactgttgaagacgtggcattctgtccatctaggtaacttcttgggacagtctccttttttaataagctcttaagtttacacccaaatgcagaactactcagaattttctgatgcttttggtataaaaaaatgggtgatttttttgttttgtcctacagtgcacaagaattctgcagtgttggtgacgattcttgccttatgctatgggacgcaagaactggcactagtcctgccatgaaggtacctcttttttttagccatatcgacatttgaggtttaactttttggtcttgtttcagattccgtctgtttcttcttgtgcgctggcaggttgagaaggcacatgatgctgatcttcactgtgtcgattggaatcctcatgacaacaatctgatcctgactgggtactgatttcacaaacttaaatacttgtccgaaagtacagagatgctactcgtcctctcactctacgcttctacatcacttttccaggtcagcagataacactgtccgtgtgtttgaccgccgaaaccttacctcaaatggagttggttcacctgtttacaaatttgaaggccacagagctgctgttctttgtgttcaggtttcaacaacatgccaccacctctgtttttttttttgtttttttcttttcatattatttgtcctgtaaacctatccccaatgacattgcttcgttatcaattcagtggtctcctgataaatcatctgtttttgggagttctgcagaagatggtctcttgaacatatgggattgtgatagggttagtacaatttctcacattcacatttaaaactattctcttactttcaagctcatcatattagcatatatgtgtgcaccaggttggcaagaagtctgagcgtgcaaccaaaactcctgatggacttttcttccagcatgcgggtcacaggttctcgagacttaatcctaattcacttgtttgcctttcccttttactctcttcaatagaatctataatttcctcgtgaatctcttcttagggacaaagtggtcgacttccactggagcctattggacccttggactattgtcagtgtttctgataattgtgagagtagcggtggaggtggtacattgcaggtacttttaaatgtcttgctacatttactctggaacctacctatgattaactttctcggtaaaaatgaaaacttttgatttttaaattaatgcagatatggcggatgagtgacttgatttacagaccggaagatgaagttctgacagagctagagaaattcaagtcacatgttttcacatgtacctccaagtcttgaggaagcaatcccatcatgtctattagtattagtaagttgctgcggtttagtgtcagtttttgcgaggaaaattggtttacttatgcgatttaggtgttatttttgcggaatattacttggtttatgtaggccagtaattcaacatattggtagatttaggacttccggaatcttgtatggtacttgatcctgttacttcaggttaatcctaggcacataactggcttgtactatcgacttttttttttgtgaatccaaacttggttgagcaagaccaatcgaaaacaacagattgaatcagtcaaatccgaactcttcaagtacttgacatttgactcatgtgtccttgaaccgttcagttctacttccaacaacaaaagcagatagaaaatcgtcgctcttcacctctattcggtttcatttcaagcaagattggttctgcgtaaaccgggttgaaccggatcaactcattagatctacaagggatttgtgcaatcttaagacctgacatctatacaaacttgcagacaattgaacttaatactcttgggattgtggggtgagggagttaggtagcaacatttgaggaaatttattgcataatatcttctagtagattctctctctctctctctctctctctagttaaaaacatctagtactaagcctttcatggggttttgatttatctgacattaagtacactactcatttatagatataagaccatctcataggggcttctctaggttttgttggattctcatcattgattcattgcagctataaccaaacaaaaccttctttgtcgacgcatacaaacacacacatatatacataaacacacgttttgagttttgtatcattgtatgtgtatgtgaatatgccaaactatttgtttggaagtggggagacaaatttgtggctcaaggagtactatatcttcattgttcaagatttagtccttttaaaaatcctagccattaaaccccttttctggtctgcctctctattgccccctatcgaaattgttgagtgatgctacaccattcaagccgatcattggtgttccttacaaagtaatcctgatggatcatttacctcatttcattatagcattttggctcaccaaattagtactattgttacttgagaacgatgtgtatgtggtgaaccaattttaagcctaaagtttgtctagagtgcaaagcttttaagcagtactactcttgttatgatctataaatggatacaacgcatctatagtttgcatattaactatatgagtatgaaacacgtaataacctgcgagtgtgtcattttcaagcttcgaagatcaaggaaaagtccttagggtcacgggaaataccatagtagctagatttttggagctcgagattttgactttccttctacctatctacacagactatgtatatgcatatatatagttgcaacgtcaaacctctccgtttcgtatttatatctctataatcttttggcatgtagattctctatcttacaaaaaaaataagattgatcaactgtggtatattacacatactgtgaaaatcgtttttcttctatttgaacttgatatagttatgtccaaaaataatggtggaggttgctcttgtatattatttagtgttgttgttccaatttatcgaatatatcggaagaagcaactcatgttaatattatatcctattttatactatattatgattttgtgtacatcaaagtacatagagataacacacacagcttgagaaaataataataaaatttagatgtatttgtttacgaactcaaagttgattctcttcgccgagagccagagcttcttcgggatgtgcaaactcatcgcaaccgacaaaagccttcgcacagattttgtctttatgctttgcttttattcttgttttttcacattttgagttaataaatgttttttgcctaaaaaaaaaaagagttaataaatgttgtgtcacagagaaaaaaaatgttattgtggattttacgtagaaggaatgcatatatggattatttcaatatttttatgagtaaccatagatatcaattaagtcttgatccaaaatatatattttctaataatgggtcattttctgaattttataagttaacgatatgatagcttacggatctgcactacctttgatgaagatccatttctgtgtatagtgcaaaagtttgatataatttaattttaactaaagtaagataatctacgataatatcttcatcaaaagaaaaagttgcgtactttgatcgatgaaaaaggaaaatcatttcttcatgaacatattcgctagcttaaggaattaattgatcatagcgtattggtgtgttatgatgattgcctacaaatgctaagggtaaaaaagcaaaaggaaacatatttagcgtctttatattatccactatataaatatgttttgtcttaaataaaatatattatcacgtagattgaatatcttaaaagctacaactttcaaacaatagtgttttgacccaaaaacaaatcatgcgaacaatacttcttcgacgaatatattttaaactttaacaaaaaaatatcatatatatgaacgagtttataatgtcttcatcgttttccttcaacgttgattatacatatcaatctctctttttgattgcacaatatatgtttattacatgtttatatcatatatggatcatatttattacatgtaagtctatataaatgataggttttactgatatatatttcttagaatctgagtaattcggttttgcatgcatataccgatatatgtaaattaagaatgagcaatataattataaaagatatatggaagttagagtgatgacacaatcatggttagattgatgaaaataggtatccaatcaaagggatcagtaccactgactcataatttgcatcttgtgggccttcttttgtcatcttctttcttacatgtgatctccctcttttggactctctctagctttccaaaatttataatttctttctattagtttt

SEQ ID NO: 38293 - DNA, 2236 bp, Arabidopsis thaliana landsberg
tccaagctgagtatatagattcaatatcttatgttagtgatgtgaagaacacgttgtatccatcatcgtttgacaactaaggcagaagagcctacctcgagaacccgctttccggaaaatgataagtttccggtttgtgattctttctcaagagctttaacaagatcaatcgatccttcccaaagcttaagcccgcctagattcaatcgaattcaagagttacaaaactgcttaatgcaggggcatacacatcacataaactataactagaacaaatcattcaccttcatagactccaggaaccaaatctgaattaggcaatccaaaaacctctttagtgctcacacgaccctataaccaaaccagaaactaacaaaactcaatttctccattactttctcaaagtttggtgaatgttctcgacagaaacataccttcagaagagtgatctcgccgatagtcactttatccacttcgaaatcagtggaggaagacacctactgcgacgaaatcaccagaaatcaaaaagagggaaacttacataagaaattgaagatggagttgcagaggaagtagtagtgacgatacctcggaggataatacttcaacaggaggaggaggtggaggaagagctggctctggtgaatcaaggaaccctaaacctagaccagaaccttgagaagaagaaaacagctgaaacgtggggttcgtcgccattgcacaaaacttcggcggcagctatccaaagtgtagaggccagagcacagaggagcaaatacaaaacccattgaaccggtcggtacgagattggatttatcagttcactaaaccaatcaatttttcttttgggggaaccaatcaaattatacacaattaacttttgaattaagagaaaagatgacagtatttgagtttgtttttttatcaataattaacaaaattaataatctaaaacttaatttacaggatactatatggacggcataattttagtttagttaaaaaattaaatttggctataaatataaaataatagtttcacaaatagtaaaaacatttgcatccaaagttctttacagcaaaacaaaaagttctctcttttttcctacatatcttttacagagatgaactctgtttctaccgactgaatttttcagtaaatcgccgtctcgtatgactcgggcttttgtccagcatcttatgactctgttagccaagatagttggcttccgtccggaatcaactggcttcctcagccgtgatttccgacttctcttccgacatggatggtttctttaacatctttggtcggcttccgtctggaatctattggcttcccacgcagtaatgtccaacttatcaactgacatgaatggtttcgttaacatcctttagtcggcttccgtacttgtttgctttgaataattttatgggatttctcattggtgattgcaatttagtaaattttcactaatcaattgttttcactgatttatcctttgagtgtttggttttttaatatgttgtatcccaatgatttgcaactttaattaaagagaagaagtagaagatctgaagcatactatcaattccctttagctgttatcctcttatgggctccaattttgttaaacggtgaaaaaccacaagatttactaaacgaattaatatcgacggcgactcttgtcaccggaatcggtggtgaacggcaaggttaaagtcggtttgtgatggaacctctttgtttgttctaattgaaacacgtgttagtgatggaggctttctgtattttcctcttcattaggttatgtttaggctcatgttgggctttaattaattcttgtaaaattatagttatacggcttttgtttatattagcccatattggttggttcagttcaataaaatccaacttttgtggaaaaaaaaaaagttcttacaacaacaagttaacactcgttaccaataaacccttatcaaaattcgcaaattgtttcaaaagaaaatcatcatgtgcacaacgtggtataaaatttagtatttgattagatttgaatacatatcgaaacttaaagtatattatattttgttttgaatactattatttctaaaccagaagtataacaaagggaaaaaaaatcaaacttaaatcgaattgaattccaaattgtaatcttcaacaaggacatactatttttttcaatttactttgataatataaataacatttacatgc

SEQ ID NO: 38294 - DNA, 3469 bp, Arabidopsis thaliana landsberg
  unsure (1)..(3469): unsure at all n locations
gagttaaacaagaacattcagcggatttttcaatttcaatgatgattcataaaagatcagaacaaaatgataatggtggaccttgagattcgttggtgtagcggtataagcagagtgaagagaatggaagagatcctgagcatccttactagtcgatttcaccatttcttcaaagactgaccaacacaggcacagcaagcaaacttttctcctgcttcttctttttctcttcttcacgagtctggtgctctcgctgaaatgacgttgtttcaggatttgctgattaaaacgggctgtcattgtttggggcctttgggcccaagcctttttaaatctgaacttcgaaacgtcgccgttttgttatgagatattttctaaattatgttttccacagtttgtaaatggactaccactcgagcttgttcgaaaaatctttagacgttactcgagggctcaatatgaatttggcgattaatttaaaaatcggaaataaatatttagggttattataatgtttttaaaacattttaatctaatattgttttgaaaatggtagtaaacataaaaatatatttttaagacaacattttatgtttttagttaaaattttgtacataagttgctataatttatcatactcttaatgtacatgtttgaataaaaaagaagttgttttatatttaaaatcttaaataatcaagatatacaaaattaggtacgaaataatcggattagatggaaggtaattagataactgatttcttcaagagattaatcattcaataaggcaggcagagtggatgtaacaattaaaaacggaataatcggagatacactgaaatttttagaataaacacaactttaacaaattcaaagagaacgtttgtaatttccttgtacagcgtaaggaaagtttagataaaagatgtatataatataataattgaatgcatatgtaagagatgagtttattttcaaatttaacgtaaccgaacaaaataagttttcttgtgaattccgtaacatatgttctaaccactcaaaccaaaacaaaaattaaatttttttctggtctgaaatattaaaaccacaattttgacaaaaatgaaaatttattctttatgataacaattttataaatttatattattggagcgatatctgacaaaactagtttaaaactgaaaaaatgtctatataactataatagagtagtttacaacacatttatttacttgtttatacttgatagtgaaattggccgtgtttgaccgggtcagaattgataggtgacggtccagttagaattgggctttgacgtaaaaaaaaaaaaatgtgtaactttgttctttgcctaaacgattggctttgtgtccaagagtagaccgccgacttagattttttcgccgacgagagaatatatataaatggctcgtctttttccaaacgatttcttcttcttcgtcgtcgccggtttagggtttccgttgctgtagcaattttctctcgcttctctctccccttttacagtttctcttatattgctcttgccttgcgtccaatctcaagagttcataaggttagtttaaatttgtctttattgatataatctatgatatctgtgaattggtgtgttacattcagccaaaattgttgtgaattgtgttgttcttgagatgctttggcgtcaattgccggcttacttgcataattttattaggggttcccctgaacagctgcaaaagatcgctattacataacttgttaagagtgaaactgcctcgcctaaccttctgttgatatgattcatgtattcacctaaacagaagagagcttgtctcgacagctttgatagcctgttgttatttgttggtctgtttctgtctttgaaggttaaattttttggcttgtcttacagagttgacatttgtgaacatcgaagaaatacggtgacgtttcttctctgattactttttgccaacatgaatactaatgtatttatcaacaagtgctacagcctggtaagtctcaagctttccgatgagtttaccgttctatctagtccggatttgtatctgcagttttgcttctttgttctgtcatgtttgttataagatcttgccttctgagtagctgaacctcttttttcatccttgtgtaggttagttgtcacttctttcctttcttgtaatctttcttatattgtttttcctatgatttgtaaagggattttactggtatcgattcgacagtgttgtttcaattgaaacatgatgctttgtaggaaaactcatgaataactgttcatatagttgctttctgttggtgtttatagcagtgtctttttgttaagtaggttattgcatgatgagagtcttttcatttttattttatatacagtcactgcacttttttcatatctgatgcacacctttcttcttgcagtttttttcgaagctgttggtgagttcccatccttagtactgctagacagttcggtgtgttagttgactttatattcaaggttataggtttagtgttgttagtagagaaaaatggaagccaaaatcgtcaaggtatcggatagtagttataaagatggtcttgggaagaagagaaagcatccagggaactatactccttatgattctggaaggtcatatgcaaagctgcaatgggtgctttcacccaacagttccacccagaagcttgagaaaaggagaaatttggatggtgaaaacaaagttattgtttctgagaatcatgttgagaagtctttggtcagatacttctcttattataagaagacaggagtgccaaaacgtgtaatgttccatgagaatggtgaatggattgatttgcctgatcatattctatgcgacatcaggaatgatcttgaagcaaagagagctacaattgagttcaattggtgcggtcgccattatctcctggatttcttgcacatgtatcgactagacctggaaacaggtgtaaaaacccagcttgcttggattgatattgctggcaaatgctttttccctgaaacttttgacaccctcgaaagggacggctgccatcatatccgtggggaagatccggaacaacatgatcaacgtgagatcaagctgcacattgaaattgatgtaaatagtggggagttaccgaggctgaatttgaatgtggtcactgacgagtctggtgacaatatggatgattttcaagctgttcagagatcctcaaatgggccaaatgacgaggcatcagaggatagctgcagccgtgagcttgatgatgctgttgagaaatgggacaaaacagaaactgatcggttctctggtgtcaagcctgctgaggaggagcttgataaagatgctgtcaaacaaatgtttactttgggtaaatgccactctagggcanntgtagagtcgcttgatgtgtatcagtttgcaagcgagatgacgaaggccag

SEQ ID NO: 38295 - DNA, 3455 bp, Arabidopsis thaliana landsberg
ggggcaaaactctttgattatacatagtgtgaactcatctcatttattaagatcttcatttttgaatagtaggtgggtttgacccatcgcttgccgtcaacttacaaaacgtttttgaagtatttatagaaatgaccatattaattaatttggtaatataacttcaatcagattagatatggttaatgatggaaatctaattacagtcgaattttgatgaatttacatgtcattctttttctttttcatatggcgtattttttatttatgtatctagtacttatagtgaactattcttgtaaattacgacaatgataagaaaattagccggtaggcactagaaattataactcatttcatatattggctattggccagcccatgatgtgtataataaaggtcttgacattgcagaatgaatatgacatttatatgatcacatatccaatccagatagcccttaacatacatatctattatctatataacaaatattgatatatatattacaagttacaactaatcttatccattttaaatctcaatgagaaaagtcatgtttaaggaaaaaaaaaagagtggaaaaaaatctttcgtattttgcctacagaaaaagtagaacaaaactcttcaactcgctgtaaagtgaccttgttgggcatgactcacactcctactatgcaactatgaacgtatcacgtgtgcatgtaatcttatatatatatatatatatatacgattaaatatgaactccaaagtatatgaatctcatgcattattgaagaacaacgagaagatacgcagtctttgcaaggccaaccaaaacaatggtatgtatacaaatattgaaatatttagttaacatacatacttatataatcttaaatactttgattagtttagttacaacacattgcgtttcatcaaattatatgaattagtttgttcttaagtttaactgaactctatctctatgtagtatgtactatatgattatcagtatcatttggttaactcaatacacttggcaaaaattatatctttataaatactatacgttagcactctatcaattcattggtgttatagctcttaaaataaaacctcatcttcatatgaccagaataaagggaatattcttcgaaaggccttctctgatgtttccttggagagaaaacgaaatataagccaaaacgacgagcaagaacaagaaggagaggtagaagtgaaccaagtgaaatgtgattgttgtggtatagaagaagaatgtactatgcaatacatagccaaagtcagaaacttgtattcaggcaattgggtttgtggtcatttgtggcgaagtagtaactgagagacttcggaaagatcctccaatagccgctgggatacaagaagcctttgactggcacaaaggaatttgtgatgccttcaattctactacaagggtgaaccctaaactcgacttcacaggatcgatgagagagatcgctaaacgaagcagtcagaacaggatgatgtcagacttttcgataggatccaaaattgctcgaacaatcagttgtgatccaaggctcgagacttgagcaataatgatgtagacccaagctgtagttattgttattgtaattgttctagttattcttaaataacaaaaaaaaagttatagtgtatattgttatttattaataaacaaagaaaaaatatattatgatatatctatttttctaaatcatcaattttactacaattttatgtttttgcaaatattacatcactttgatatactcaaattagattttgctagtttcttatacatctaaaattgttgaggttgtgtatcttactagattttaacccgcggtacaccgcgagaataatttattttttaaagttagtatatataaaattttacaaattgtatctatctataaaatatttttactttatagtttacaattgttattaagtaacgtccttccaaactcgtcccctacaaaaattatttattttattaatgttgattttgtttatgatatatttatgaatcgttgtctaaatattttagtcgatgcgggacgttgaacccacacatttttcgtcaattggttaatatattttcatttttaaaatttcgaatcacaagatatgacggaaaaaattttgatttttttttaaactctatatattatataatgatgttaaaaaattgtgatatattaaactttttaaaagtttaaatattgataacgttttattaagtttaaatatagaaataattatatttaagaagttaatattttttaccttttaggtaatgacataataaatctaaaagcaaggatttagaagatttagatctttaattaaatattttcattcctaaataattaagcatgacattgtaaataagttcaaatacatgatttatttatttaaacaaaaacgtttagtaagaataatatttatttaaacaaaaaactttgctttaaaatattgttaacaaatatgtttatgctaattttaagagattgatgtgaagtttgtttggattaaatttgattgataatgtgattgataatttaaattaagaatttaaagtaaaattaattattttggaaaaaagatttaatgctaatgacattggattgtaaataagtccaagtttagaatttatttgctaaaatgggtacaaaaatgtatatatagatatagcgattgatgattatttggtgttcatgttcttggcgtgtagcttcaacgtggatgctcgttttaatgacgcaatactttcatggattaatcttaacccactaggattaacccttaaagttgccaaaattaccacccgtaccattctcacagttccagtggacttgaaaaccagaaaacaaaaaaaggcgattcaaagcagagaataaatattaaaatccatcagctcttcgttgattcctatttctatttttccgattgacgaagacgccgagatttatccttcatcggcgttgtcttctcgctggatttctcaaagccctagctgaagaatctctgaacaagtggaaatgccgttttggtggccactgatcgtcctcgccttcgcttacgcgatctgcaagttccttcttatgctcattcctcccaatgttccttccattgacgttgacgcatccgatggtatctcttttcttctctgtctgtatcagcttctagtttcgtctatgtctataccccgtggaacaagcttaatcgatgtttgatttttggaattactttttgaaacagtgttggctcatggaaaagatacggaggagaatagcttcatctatgtgagttctccgatcgcatcattttctcattttcctccacattgtgcttaaaaaatttgaagtggtaggagatttaagctgttgatttggtttaggacataggtattaataattgatctcagtgttacaaaa

SEQ ID NO: 38296 - DNA, 3420 bp, Arabidopsis thaliana landsberg
cgattcagaagtaaaaatgttatctaacctggagcagatatgttaactttgagtttctgaaaggtacatgatcctctttctttgccaatgcaaatataacatcactcaatgcagacaagcttttgtttatagcctgttgaaggaaacaacaaagattagagggaaagtccaaaaaatttatgggaataacttagaagaccgtattttaaaagcaaaaacctgtgtctcctttaaccggtctccggttgccccgctccttgaaagtcgctcacttccagcaagatcaattaggttaagaacaccttgtacttgctgttcagtgctctgaaataggagagagtgttggtgttttcataagtgagaaataaatctacaacacaaaacataaacctgaaagacaaatgatattaacctcattcacaccagaaatcctaagagtaaacacgaaatgacttcttgatgattgttcattcatatgcgtcttcccaacagacctacaaataagaggtttacgatgtaactatacagaaacgacagtgtaacaatattctcaaaagccatgctctttgaagaaaaaagttcccaaaacttatagacaaacctgctctgagcagcttgttgcaaaagtgaggaaatttgtccaatgctgcatacatctactattgtcaggtcgctaacatgagtgtttccattaacatcatgtgtgattgtatattgtcttccagatgtgctactgtctgcccgcacagattctatagcaatcgttcggcttgtagacaacaagtctctgatggactcattatatatctccaacattgagacctacaattaaaattcgatcaaaacaatgctaacagtgaaagcattcaacaaaagtcagaacattcttggagaaatatttacctgcatcttgtatttccagccttgtgtactaagactttggctggttttgaatatttgttcgagtgatcgagggatcagtcctttctgttctggtgtttcaggcctgcccatcatggtataggttttgccagaacctgtctgaccgtaggcaaaaatacaaacctgtgtccacaaagatttgagaaagatgcaatgacagaagaatcagtcaaagtgatgtctgtctcatttaaacaagagttggtgcagtaacaaaggaatcagtcaaagtgtagtctgcttcacataaacaggagttcttaataaattcaactacataaggacaataaccatgagtcaaatactacttctatctaactagaatttgcatcttaggtatctatctacaagaaagtcaaaacaaggaagatattgaaccttgtagccatccaatgcgctctgcacaagttgagatatttcaaagaatacttcctcctgagaagctccgtggtcgaagaccttgtcgaaagtgaaaggatgtttgttacctgagacccccaagtagcacaaggcaataaaaatgtattaaactctagtacagacatatcctaattgagcaaagtaataaggtgggttgctgaatttaccactttggaccacatcaatgcctctaccaagagattcagttgatgtaggataggcaataacgctggcctcttggcgtcctccatcatctggtagcaaggggcgcactcggcagaacacgcgtatgtttcctttgagttcctggaataaaagctttgcttagcggccataaagaaagtcatactataactgaaaagtgtttccaaaacgacattttcttacaagaatggtgttatgaagctttttccttaataactctccttcaaaaagttgacgaaccgtgtctgcaaggcgatcttgcagttcatgcatacattgtttctgctcctcaaattctgtcattgtatgagacatagataaatccaccatctgtagaaagcaaataaacgtatgtcagtgtaaagaaacaattggcaaacttaaagagtatctgaaagttggcagatcaccaatcaaaattccaaaggtacttgatcgcataataccttaagcttttccttagcaaaagctaattcctgctccaacattttaatacgctctttttgcaacgaacatgtttcctgcagcataagattgacattgtcagaatattgaaaatataaggcaaggatgtgaaacgtcgactttgactaacctctaaagatcctgatttggctataagaatgtccaactcatgagatgactttccaacactctccttatacatcagtatctcaccagccagcttttgtgactgtacaacatggcgatcacgatcatcacggacttgttgcagctcgcttcgaaggttattaacttccatcagcaatgaatccttttgttttaccgcttcatcttgtgaaaccttgatcacaaaaggggaagataaacgaagtaagatgcaatgaaaaatcaatcacaaattaagaaatacaagaatcacgtttgtagaccagggatatttacccggctcgatgctaattgatcttgtagtgatttactgtgacctcttagtgtagtaagattctccagtatacttgacttttctttttcagcacgagtgtgagcctctctagctacttcaagatcagtctggagtttggtgttatattgttgcaaacttgtgttgtactcttgcagcctcttgtacatatcttctagagacgtcacctagaaagaaagaaaacattccagttaacacgtcatgtaaaagattgagccaagagctaagaggaagttaccagagaatgaaacaagtaaacaacacattagcgaaaagcaaatcttaagtaccttctgcttcgcagccattttttcctctttaactttgtcaagctcttctctgagagaaacctgaagcttctcagctacaactctacaatctttttctcttctgtgattttcaattgcatcctagtagtcataaccaattaagagtcaccaaacttgataaacgattctttaggagataagtttgcacaatgataaacgattctttgagcgataaatccttaccagtttactcaacttctccttggacagcttttcctgaagtgattctatgttctccttcatctctgttatagttgctcgtagctcttcctctttggtctttgcatccaactctagaaataatgagaaatcaagtccatattcagtgtacacaaaacgatgtgagaaccaaacatgtaactagaaaactaaaattcacctttatcactgtatcttttctctgcagattgaagagaagaagaaagattttccttgtcttgaacatgagtttcatccacttgttggtaccatctaacacagaccttaagcttcttgataatatccgtcatttgctcaatcttaccatattagtgccacaatgcaaatacatattaaagtgatttttttcctagaatctcctat

SEQ ID NO: 38297 - DNA, 4889 bp, Arabidopsis thaliana landsberg
tagggatctcagtgttgtacttaaagctcatcacaaaaaaagtagaagagcctagaagatggaatcttgaaacaaccaacgagagagatggatccaagagtattcaaaagagggtttttgtgagttcctactactattacacgaaacagttcaaagaggaaataaacatatcagataacaaacttttgaactccctatcccagattcccagctgctttccggacctaaacctgttaatcgaagaggattaacacctatatagtcttctcactattctccggataaagggttttatcatcattctgtacacaaaacactagtatccttcccaaactactaaagttccctcctatttttgtttccctaacgatttagagcaccaaaatatggctcccatcggaagacattacttcttcagataaccctactactccatgtttcacattctttcccatcatccaatacacaaaccaagcagaatatgcatttgtccaccataaaagataatacgaaatataaaagagttcaaagttaaaaaacgaagacgaagagcagaatctaaaagcacttttcacctgaaacccttgtgaaaagattcctacaccaccaggttacttacaagtttgtctcctgagtccacaccacagccatgaaaaccaagaattggaatcttccaagcacatggtttctctttcttttttattaacccctcacagattcagagttgatctgtccaccccttgcatgagatgccgactcactaattgctgatggtttacgaccaaagtttaataaatagttcctctggtcgtcattggtgtgacgcagactcgcacgtaaaagctcagcgggcatttccctctttatcgccagctccaaaacatccgctgcactcccttggttctgtccacggattgtgtcatacttgcttctgcagtatttggtaagaaggttgaagaattcatcaaatgacgctctccagagaccatcattagaattcccatgcatgactcgaggaaccaccactacttccgcagctctctcaagaagagatatcaagacaactgaagcaccatctccagcagaacttccgataggacggagaggtggctgctctgaagaacatactacagctgcaaggcaagcactcagtgctcgaaggtccatggcctgaacgcaaaccgtgactgctttggcaagattagatattgtctctgctgctagagtatctgaaggtaggccgccgaacagaaatctcaagtggcggaatatagccatacagacaactcgagcattctcagtacctggaactagaagttgtagatactttgtaagcaatttccgacccttggggagagtcgctatacgtagaaagacaatatcatccttagcagtcatcccagatttctgaccggttttgctgaacggatcagcaagttgaagtgctgtcgctaatccttctagcaggatctgccgctttctcttgagttgggcacctccgtcctggggtcttgtgttttggagagtcctgtcaatgtcaactatgtcaataagaactccaagagcatcttcaattgtaaccctagctgcaacgagaggttcctgttccaaatgttttcctgagcccttatgatccccgcttccatcgttaaaaccaggagaagagtcaacctcaagcaaggcatgtggcctgcggacagatggaagtgtaattttaccaagagcatctacatgaacttgtggatgctgttcagaactattacgggaccgaggctggtggtccttcaactgagcaggatagaagtgagagattgctttagatccggcagacttcttggcaagcttcgcttggtggtaataatcattgacatagggatcattgctgtgtgaattggaatgctgcatcttgagtatactctctatttcttctgaagtcatgtgctttgatctaaactgcagtccagtttcacttttctgactagctgcgtctgatgtctgttgagagagtcctctattctttcgacttctatgagatgacttatgtttgtgttccctaacttcaccaactccaaaagggactttacgtgatggcgaaggataggaactatacagttgagactgtagcgctgcaagttgagcatatgattgtctctgctggagggcaagcaaatgttgcgacataatagcatttcgaggaggcaattgttgatgctgttgttgcaccagattatgtaataaaccagaatgatctccgtgtagatgaccaggatcagtgacccaatgaggttgcaccatgttaccaagcgtaggaccgcacgaggcatatctagtcaaattaccaccatagtggggcccttgcgacaatcctgaaagatgaaaaccagaatttgacagcggggaaggtgcagaataggtcaactgagaaccaccaggaagagaaggagcgcgatggagatttccgggtgaagcctgcggagatctgttaccaggcgggggaaatgaggtaaaatttgattctggtaaaattatcggttcactattgtagtgctgcagctgcggttgctgctgaggataagaggatgtcctgtacaaaggttttgaatgagcaaatgattgtggctgtgaggaccatctcttagaatcatgatcttgttcgtccaaccagcttgtgagctctgcatcttgtgtccaatcggtagcagaagaacctataagatagagttcagtcagaaaaaagtaatcgtgtaaataatagctcaaaacaggtaattccatattttaagtactgaatttgcaaattagaatgaccacatgatttcttcaactaacacaacttatatctacaatccaacccttcacctcaataaaacggaccaggtcacaatatgtggactcagaaaggatttattagtagctacaccgagtaaaaaaagctactgagtactcacgctcagctgctggctttgccgaaaacggaaacagaaaaggaaaactgaagaacaagaactacaccaggctaaaaaataaccctaaagttataaagtagtaaccaagataggaatttaactcactctctcttgaaaaggatcctgatcctctatcaccaataactccagggtgtttgggtccggtaacaactctgtttaactacacaaaagagaataggtagatttaaaatcactgacaacaagtcaaagcaaaacgaagaagctgaaaaaaaaagcaacaagcatttgcatgaaacaaaaagaagatgattgattatcagtttatcacatgcaaccatgacatggtggtaggtaagatattaagattgtcatcatagtgtttgtaaataaaaattatgctaacctttgcgaaagttgtcgcaagatcatccatgtcagatagtgatcctaaacctgcaccctggaaccaacatgcatatctattagtaaaacatctgcaaccattacttactacatgcatcattatcaagatgttagctttcaacagagaaagcatgttacctctcctttatcaaacaagtgatactcatcatcatcagcatgtccaagaacaggagcgattactccatcatcatcaagacccccaagttccatatcatccagattttgtccaaaaaactcatattgtgatgcatcaaagagtgtactgtttttatctgcagatacaaaaacagctgtttcagaatccaacattacaaacacatgaccataaaaatctagactttaacaattcaagggattaacacaacatctctaaagacaagttttttagtatccaaactggtctatcatttgtgcattggaacacaacatcgaaaactaagcaaacccatcagatcccattagaacattaaagatgctatatagctcagtgacctaaatcatacatagcataaatctccaacatttatgtgcttaaacaaaccaagcaatacacaaaaccgaatccaaaatcagctataagcagcaaaatcataaaagagaaagaaagaaacatcctttaagaagaagactgacctaaggaagaagcgcgaacaaagttatacaaatcccttgaatcagatctctccatgatcgaaataaacgaaactttagaggtaagagaagataacagaagaggacataagagagaatcctcttcccctagggtttcagataggtggtgctttgtgaaggagatagaacaacaaaattcgaggtgggtaagtgaaatcagcagagattgctgctagggttttcgaattgataaaacaaagaaacgcaactaaagttgaagaaggagaaatctataaaactctctccgcgataaaaaagagagagagaagggcaatgaagagaaggggaagggaagaagaaagcaatggcctttatttgttcttgttctgtttccttggccgtgtgtaacatcgacacatgacctgaccttttgcccaaacccaaataaaaatccaaacttttttttttgattttttttccacatttttttcctattttgttagtatgataataaaattagtcttaaatcattaattggttcaaaaaactttaagtgtaacatatttactacaattaattataagcaaattaaaattaatttatgtaaattttgttctgaaaatatagtttttgattttttcatactaaatccactgcctaaatgatatgcatcatatgcttatatgagtcaaagaaaaaagtgtgatgctttatgtccgatcccatcccactgattcttttatgatcttgaggtttaagacccattactttacttgttccaaactcaaccaaactcaattttaaaaatattgaaaagacatagactttatttatatataactcaacgacacgtttactggtccatgtgattgcatttcatacggt

SEQ ID NO: 38298 - DNA, 4339 bp, Arabidopsis thaliana landsberg
gaagttatggatcttgcacatgcattcaaacttttacctgtatattaatccagagtagaagtcaacatttggatacagctttctcttaacaaagtaatcgtcagagagagctgccttctcaagtgcaacagcaacctgcagacatcagaatcaaacacattggctttaaggaaacatgaaaaattacactaaatcgaaaaggtgggcatcaagttgtagtataagcttgaacttcgtggacatagcgtacctcaattagaggatcctttccaacaatggaaaatacttcatcagccaggttcttgatgactttagctcgagggtcatagtttttgtacacacggtgtccaaaaccagacatcttcctcttcctaagatgtcaaagggatgagaattttaatgaaaagacttgtcacaaacctcggaaacggaagcatatagtttcaagaattgattttacctgttcttcacaccctcaatgaactctggaatattttcaacagtcccaatctctgacaacatcttaagcacagcctaatggaaccaaagacatgaatttcaaagaccatggagcatgaaaatacatcagaagatgtaacatatgaagacatgagaataaatagcatacctcgtttgcaccaccatgaagtggaccataaagcgctcccacagctccagcaacagcagtgtagacatcaacaccgctacaagaagacatttcctaatcaatatatctcctatcaaggtcactaagattccaaccaaagataagtacctagaggcaagatgccgagcagcagcggtggagcagttcatttcatgctctgcatgcagtatgaagaggatgtccaacacccgagccagccgaggattaggtttgtaggatctatttcccctgtaagaagtgtgttaatggcacgctacaagttatgtgcacagcgaaaaaataactaggctgcaagttctctgaagcgtcaagatctaaaactaaatctaaaagttgagtttctaactaattcaagaagaaagagatagcacagacatacagggaatccatcatatagaggaaattctctgaataagaaaggttggccgaaggaagaacaggaggcctgcctgccttcctcaaataagcagctgctgcaattgttggtgcctgcagacacgttatattataattcatagtccggttatacattgaggcaccaaatcacacagacagaacaatacctgtccaagaacacgaacaatctgtttatcacgaacttgttttgacttgtaaacacctaggccctgcaccaaatggggatttccatgtcggcgtggaaattttcagaagaaagcaggattataaaaacgtaacttaccataagagacggatttacatcaggataaaagatggaaagtgcactcattgcagtgacaagagctcctactggatgtacatcattaggcatggactgtatcatatcctgtgaaaacattcagataaatcatctcacctcgaagatctagagaaagttaggaaagagtagaagaaactcaccaatactccttgtggcacagctgaattctgagaaatcgcaaactcccaatcagctagctgtctttgagaaggcagattcccataaactgcatgcaaaaacaaaaaaagcagtagtaaactagagcactaagggagacaaaattttaaagaaatacccacacaaaagcaagactatgagctatacaagatgatcaagatgatcataattaagcaacaacaatgagctatacaagatgatcaagacttacttaggagataagtaacctctgtataagtacttttctcagccaactcctcaactgggtatccccgataacgtaggattccctcatctccatcgatgtaagaaatcgaagatcgaacaggagccgtgtttaagtaaccaggatcgtataagttaagccccttgtcatccttccctgtcgttatcttcacaccaaacatgaaaatccatttatacacactcacacaatatacaaaaaacaatctattcgtagtactaatggccacaatgaagaaataacttcagcataaaaactcattatatataccttcttgagatcaacggttttaacggtaccatgctctgagactgggacctgatattcattccccgtacgctcatggacgatcttcaaatttcctttaagcgatccatgcggtgcagcggttatgtgagccgatgtgcaccatggttcgatcgctggcaacacctgattcggctcagatactgtcaagtgcgcattgagaacggctaatcgagctctagctctctccgaaatctccatttgtcacctcaaaaagatcacaattcaagaaagggaagcgaataagaaaccaagtggctgttgtagttcaaagtgatatataggcatgcatggttttatagtggggaaatttgataatttcattacgtaacacttttgtcttaatacttttgtgggtatgattggcgtgaatctacagtgtcttctttagtcttcaatcagagtttggtggctttaaagcaattttaagtatgtgtctctgcgacagttatgtattgttttggttgcttcttacttctttctgttaatcagtgtcaggtactccagggtttgttatttaacgctcactttcttttaaatttgtcacacttctcacaattgttctcatttgaactggaaatactatggcaataatgcaaaatgataggaaacttcaggcaaattataaatgccgtacaaaaaaatatgatatgatgttcaatgagtggttagcttattgttatcacttggaatctgcataacatattcaccctaaaaataacattcagttaatcctaaatgatatgatttggtggttgacattttccaaaccaatgtgttagacatgtcttcagaaattaacattaacaggaataaaagcgcaatttatcaaaagtacatgtcgttccctataacaagattattattattaaatcataacattttaaaataacagacaaacaataagaatagggttgtattattaagtgtttaagaataagagaaagaaaacaacacatgttgttgaaaagactctcttgttttcccagaggtatcccaatgttttcttctttattggtgagtattaggattgagactaaagggcagatgatccagctaaacgccttcttgatgcattcgaaatggaaacttgaccaaacttatccttatccgaatcacttgataacgttcgttctctcactggctcgtaatgcctcatccacactccagtataggcctatatgcagccacacaattcagtgagctcaaactataaaccttttgatctatcaaacaagttatgtattttacctgttggggtctcatgatcctagtgtcaggatcatctaacgactcacgccagtgtgacaagtatccagccatacgcgggactgcgaacaggactgtgaagaattctggtgggaatcccattgccctgtgtttttcccccatttcaattaccaacacaaggttcaggtaaagaacttaatggttacagggtctatgtcagatgaatcagcaatgtcttacctatagattaatccagagtagaaatcaacatttgggtacagctttctcttaacaaaatattcatcagacagtgccgccttctctagagcaactgctacctgaaaacatcatccgtcaaaacaaaatttaacccacagtcatgttatataagaatttttttgacaaccaaatactaggagagatacgtgagcacaaggatctacagtacctcgatgagaggatccctaccaacaatggagaacacttcatctgccagtttttttataacttttgctcgggggtcatagtttttgtaaacacgatgtccaaaacctgacatcttcctctttctgagaacatagaaaagggatataacattaccggcatgactcaccacaattcagagtacttggtgcttgtagttattaagcattgagttacctgttcttcacgccttcaatgaaatctggaatattttcagcagtcccaatctctgctaacatcttaagcacggcctcgttcgcgccaccatgaagtggaccataaagagccccaacagctccagcacatgcggtgtacacatcaacaccactgcagaaacacaatactgatttaaacactcaaagaagtctaaatgaatatctctaatcagtgataactgataagtacctagaggcaagatgccgagcagcagcagtagagcagttcatttcatgttcagcatgcagtatgaagaggatgtccagcactcgagcca

SEQ ID NO: 38299 - DNA, 4993 bp, Arabidopsis thaliana landsberg
ctctatatttaagtaactttctcaaaatctaagagccttgactaccagattgcttaacttcccaaagagatgccttcttgagtaaatatttttcaacccattgtacccagagagatttgctatgttagactagtttccacaccaactttaagctagtctaaatcctcttttagtgagcgtaagccaagagcaccctcgtctttaggtttgcatatcatgtcccaagatattttcgctttatttgagttcatgtatgtgctcgaccaaaggaaagcagagctcattttctcaagttctcaaatgcgttgtcgaggtaaccgagaagctgctaaccaaaaattgtagatactccaaaggactaaactgataagaattaatctgcctgcataagagagaaatctagaagtccaagatgcaatccgttttttgacctagtcctgtaacggtatgcaatgtgctattgagaggcgcttattgacaagtgccagccccaagtaccgcactggtaactggctaatagaaaacgggaaccggactgctacttcattgcgagtagaggctggaattcctgctaagtacacagtggatttctccaagctaatacggagccctgaccatgttgcaaactcatcaaaaacctgaactagtccttttattgaaagaatattcccattagaaagcaccataagatcatctgcaaaactgaagtgtgttaggcccatggtcttacatttcggatgatagccaaactgtctagcagccgctgctctatccaacatctttgataacacatccataaaaataacaaacaagtatggagaaagtgcacatccttgccgaagacctcgagagctctgaaaataaccagcttgttcaccgtttacttgaaccgaaaaagaggccgtagtaatgcaaagattaatccaatgaataaaatctcgagggaaccacaaaacagtgagaacattaatgagaaacggccattgaactgattcaaatgctttggagatgtctattttgatagcacaacgtgttgagatggtttctttatgatagtccttagtgagttcagtagcaaggagaaggttctctatcaacaatctgtctttcacaaaagctgattgatttcccgttatgaattttgggagcactagtttatgcatgtttgcattgatcttagagataactttgtaaagcacattgcagcaagagatgggcctgtaatccttcatttatcttgcctgttttctttgatatatgggcaagaatagtatagttaatacctttacgcagaaaccctattgcaaaaaacgattgaaccgccaaaatgaattcggctccgataatctcccatgttgcctttaaaaattcagaggtatagccatcaggatcaggagatttatcactaggcattgagaacaaaacctttgtgatttcctctgctgtgaccgttcgaagtagactttggcgagcagcttctaagcatttaaaaggaagaagctgttggagatctctgatcgttacaccctcaaaatcgttgggaattagttgcagaaactcacagaaaaacctctctgcctttgcttctattaggacctcttttgtgttaacatttccatcattaccaagaatgtcacggatagtgctatgagcttcaggggcgggcgacggtctatgaaacccttgcgtgtatcgatctccaaccttacaccaacgaagttttgacttttgtttaagatacttctcttgcataacagccactctatcgactctagagtaggctgcattctctagttccataaccattggagacgcgtcgcgtgactttatctgatggtctcacacagaatcttgtaagccagctttgacttctttgacaagttgcctaagcgatctcgtgccatacaccttattttaggtttcaaccccttaaacttctttgagaaacgaaaaagagttgaagtggataggaaaaggggttctgtatcttgccagtaattactcaccatcggcttaaagtcctccaaatcagtgagagcaataataaacttaaaaggtttgggggcctttactttatttcatgcgtcactacttaaacttaccctacatctcaaatgatctgagcatcctcctacttcaaatacactataagattgagagaaagcttggttccaaacatcatttatcaaaaccctgtcgagtttcttcatgatgagaccatgttcccgcttgctacaccatgtgtatagcgatccatgagctgccatatatgacaaggaacaatagtttaccaactgctgaaaatctcgcattattggcgttaccgtagcttgatcaatagcttgcgagtgctctgcaatatcaagtgtctcattaaaatctccaaaagaagccacagtttatgggagaatcataatgatccctcaactctgaccataatgtttttcttccctccgcatagtttgatgcgtatacaaaggaacagaaaaattcatcctctcgagcttctagcttcaacaaacatgtcatcaattgaccacttttatagaaaggactaagccttacgttcttatgccatagaacacaaatacgacctcgtcgattatgctcatagtttgttagaaccgaccaatccttggaaagcttacttacaagctgcgctaccttattctccttcactcttgtttctaccaaacaaccaaactgaaaattagtttccttaacccacttcttgacaacaaaatgttttgaggatctgttaagtccacgcacattcgagaagaacaaggacatttaacgatttttggatttgtttcttttactctgatctctaggaggtatcctagttaattgagtagaaggaactgataccactttgtggaatgttttagaaactcgaggcaaagactcacccagtgacatctctgttgtggccggcggttcccccgctaaattttcttttaaagagattacaccatcatctcccgtaactgtgttgtcgtcttgcttgtctgtcaatataataacatcatgacaatctcccttctcactcaaaacagtgtaagcattcgagagaattgaaacttctccaaatctcaactctttgcttttatttcccggactgcggtctgaaccaggtggagtaatccagccctgatcatcgcctttattttgtgaacacactcccaccgttgaagttggctctgaaatttgcagctctaaagtctttgtgtcacaaaaaccttccttcaaaggcatcatcgcctcagacacagataagaccccttggtcagttttttctgggactgtttttggactgtgagttttcttaacaactgttgttgctaccacaagacaactatccttcaagtgatcccatttaccacacccaatacacctcggtggcagccatggataggaaaaatgtactaccgcatctagttcaccctcttcttctcccgtaaagacgtactcttttggcaactcttttgttagatccgcttcaactaagacttgtgcttcatcgaaacttacacaagcttccgtttttggatgcagtcttattggtttccccactacactagctaggaattccaaccctttatctgtgaacattgatagagggacgtcctttagagtgatccaaagtttgattgacttcatagctggttgcgcttcttcagcatatggagtccattttgagacaaccatagggatatccataatgttccacatgcctctgtttaagatccttcttctcataccttcattctgaatcctgaatttcattgttgtttcattcacttcaaatttgttttagcgcccaatctccaaattttgttcacaatcatgtgaatcttcccaacatgtgtggcctttgtattcaagaaattttcgattacaaaatcctccaaagtgtttttgctcccacaaaaacctcctttggtacaactactttctctttaccatcaacttcactcacgacaaacttttttttatgaaagatgtgttcttgagctacttgtgcatacaattttttgtcctttgtgtccaccttctttgagtttagcgtggattctctctagctaagagcatccctctgttctatacatcttggattgaacccgtaatcttatttgttgaaacctcctcactttcatgacctgaatcgatggaaacattcaactgactcgtggaaacctctaataccggaacccccctctttttcggcaccggagagccccccagatcacctggagacgctcccggctgcagcatgcgtgcgagatccgcaaaaaccctagtcgccttttttcaccttgccacgtcagcagagcaaaaaaccttttccttcaatcggttcttaaatgtgtaggttcatctcaaccaaatattcaataactaaaaacatacaaatcgttaaattgcattaaatacttgaatgaactctttcctaaatttttattcttaattaaatctttctttattgaactatattcgattaaggctaatttcttaaaaaccatcttttgacattaaatataaatattttatctttctatcactagatttgttcttatatctaatttattttgactttctatataaaatacatatagttaataaaatattagatttttttatgcatatgatgtaattcaaattttttaaaacatacatatagtacacaatcgataaaaaaaaataagtgtacaaggtctcacattaaaattgggaaatcgtttagagtcatattataaaaaaggaccaaaatgattatgaataccaatgaacatgaaccttagtttatcagacatccaaaattaaaagtattattcgggttactccggttctttattttaaataactaaaactagaaaagtttcataaaatcaagttaaatttgtttataaaaagttttaaatattaataattttaaattttatgaagttttaaattttataaatatttgaactttatacccaattttaaa

SEQ ID NO: 38300 - DNA, 2150 bp, Arabidopsis thaliana landsberg
  unsure (1)..(2150): unsure at all n locations
gaagcttccatgtagaaaaaaaccaacacaatatatgacagctctacaaaaggaaactaacaccgttcccgcaagcattccatattcaagcaccaaaagatcatcattatctgcaaacaaacattcacaagaacaacattaattctttttgagtcactacaaatgcaaaccaatacctaaccaaccacacatactcaaacaaacccatacttactaacttacaacaaccatcctaagattcgagatctagaatctccaagttcagaattttttttgacaaaatcgctaactttatatcacaaagacatagagaattatacaaaactagatttagatagtcaaaaagtagcttaattttatctccattttgaacaaatttcaccaaaaagtcagattcaagctataaacttcataagacaaaacccaactcaaaaggattaaactttaaatcccaactcaaagtttactaatttcttcaataaacaacaatgacaaaaaccaaaaacctaaaatttcaataaatgaaataaactgagaatcgaagttagcgatcttactgataaattggggaaaattacaaacacagcttcaaaaatagatctctgaaacttcttcttcctccagagattgagtagatcaaatcggaagtaaacaaaaagcacgaatctttaggcaaagatttggaatcaagaacacagctttaataactacagtaactttagggttttagggtttcagtgaattcaggtaatcggcgattcaggcatcgagaatgaatcgccggaaaacaccgtcgagaatttcggggaaaaaaaaaatggaagataaaataaaattttggtttttttttttgttaagtaaaataattttggagtgaaagtaaacggtgctaatttgttaatagtggctatctcgactctgatctatgtcataataatctttttatataaagtatgattttaaaaattattaactcaaaactaaaaaataaatcactattaacatatactaattcatatgtctatatatatctaaaatatattatattttatttttcttaaccaaaagaaaaattaaccaaaaatatttatatatgttattggtcaaatttttaatatgtatggtattaacaaatttttcatcattattattaattatgttttgttaattgttaataattttaatattaactaagatatagatttgatctcatatatatattattttgacatgaaattattatcaagctaagatgaagtgtgtagaattaaaatcgagttttttatgaaatagatagttaaattgtattacaaaattaaatgtgtaagataaaaatttgtttttttattctaaatactaaattataataaagaaaaaatgtgtatgttactatttagacttcaaatatcatcaataagattgaatgagtataataaaataaaatgcataaaactactattttactattcaaaattatatatcaaaaacaatgtatagattattattttactattcaaaatttaaatattatcgataaaaaattatatttacatcttacacctgaccttatctagtttcttatataagttgcaataaaaataccaacagattcataactttttttggcacccagtctctccactcctagtggccactagtgttcacacacagtcaaaaaattttaatacaaaaaaaattaggaatcgaattcaaaaaggaaagaaatctaaagaagaagacagagagagaaacaatctccaaaatacataaatttgttcacatccttccgttttttgttnnnnnnnnnnnnnnnnnnnnnnnnnnnngtcacaagtcgccggcacttcacaatgtccctatatatgctccgttcatcttctccaaacatcaatcatcactctttccttcttccttcttttgttcctccaaattcaaacaccatactttatctcctcctccttctcctcctcctcctcctcctatggctgcgtgcatcgacacctgccgcactggtaaaccccagatttctcctcgcgattcttctaaacaccacgacgatgaatctggctttcgttacatgaactacttccgttatcctgatcgatcttccttcaatggaacccagaccaaaaccctccatactcgtcctt

SEQ ID NO: 38301 - DNA, 4470 bp, Arabidopsis thaliana landsberg
tctccaatcccaaatctttgatttgtctgtaattggcaaaaaaaaatttgcatcggcaggtggctactcgttttctttgaacctgttattatataatgatttacaattaacacaccttacatattcaacatacagtacgtgactttttcagatttcaaatccacgatatatgttactttataaccatattataaatttttaatcctgaatcaacatcatacgtacattggcttttcaattttgtttatctccaacttggtgtcgatagcttcataagacacatttacttaccatcactcactctacatggagggagcatggactatcctttccttcaaacctactttggatgtcttttttattcattgggctcaattgggttttgttcaggattcactccttatccctaggcctgggcaaaatacccgaacccgaaaacccgaaccgaacccgacccgtaagatccgatccgaatgcactttggttccctgcctaatacccggtcggatctttctcttttgtaacttcggttctgggttcgggttcgggtaatacccaagaaccgaaagtacttttcttgatccgaacttatatacacacaatagcattaacccttacttgccttagcttgtttttcttcccaatttttgatttataaaaccctagagcgtatcaacacaaatctcaacaagctggaaaccctaactcatttgtttctgccgtctccttcttcagagaagtcaagaactcgactcgatccgaggtacttttcgtttttctacttctgtgattttgcttttgtttctttgagtcactgattcaaatatgtagtttataattgcaatttcgttttggttatgtatttctctgttgtattcttagttgatttcttctaatttatctgttttcattagttaaatttttcaatttatttgattctatttttgtatctgtggagaaaaaaaatctgagtttgtgtgagttttgatctccaaattttcatctcttaccaccaattgatctgttgtgcatcttaatttttttgaatataaatttacaagagcatcacttacccaaaagcatcgactccctcagattcgaattttggtgatttagctcaactttgggctcatctacaccacttctaactcaaacgttatattctattaccatgctctgtttttttgaagtcataggactctgttttaagcatggactttgtttcttttaagtaagctggtaaatataccttcatattttgatatataacattcacattttatcaaaataaatttatccgactctcttttatatgtatgacagttgtgtgtgtgtatgtgtttgatccaattgttttaaaattattaatagtaagttcactggatcgtgaataatatagtttggtatgtatgcatccaagagtcttatagactattaattcattaattcctagtatgcattcaacgtgtgatagattgcattattaagtgtaactagactattaagttatagtttcatgctagtgctgcaacgtgtgatagcttactttattaagtataattcttattcaattgttaaccgattattgtttatattttttttcttttgcagatggattcttcagcaaatccaaacaatactgaaagtaacacaaaaggaaacgaagatgagggtaggactcgacctattgataatagtaaagggaagagaaaaggcgatatcgctgatgatggtgataatgctaacccttgtaagccaaagaagaagttgcaaacaaggtcttgggtttgggatcacttcccgagaaagaataaagatgatgaccaatgcaaatgtcattactgcaagaggttctttggatgttcaacaaaatcagggtcttcaaacttgaagatacatttggattgctgcgagcattactcggcatgtaaaggacgccagtctcagaatgttattaatcaagagggtaatctacaaagtggagaagtttctgaggaagtgtttagagaagcaaccaatgaaatgcttgtattaggacagatgccactttcattcattgaaagtatagcttggagacatttaaccaccaaatgcaacttgtaccagcctcattctagaagaactgcaacaagagacatctatgagatgtttgtgaagaggaaagatgaaatgagaaaatggatgcgtaaaagtaagcagtgggtctctctcacaactgatatatgggtgggtagcgtaactggtacaagttatatgttcataacttgtcattttgttgacgcaaattggcatttaaggaagctgattatagggtttaagtatgtgccgaatcataaaggggcaacaattgcagctgttttgaattcttgctttgctgactggggtatagagaagatcttcactatcactgttgacaacgcaacaaccaatacatctgctctcatgaaatttgaaagagattttagggcaaagaatgggaacaatgcattcatattagatgctgagatgatgcatatgaggtgttgtgctcacatcatcaatttgatagtcaaagatggattaaaggagatcaatgagaatgtggaagcaattcggaatggagtgacttttgtgagatcctctaccaagagattaatctcatttgatgatagggttgattcagctaatttgcaaagaggaagcttgcctctagatgtcgaaaccaggtggaattcaacatatctgatgcttgaacaagctgtgaagtttaggattgcttttgagaaaatggaggctgaaaataaactatataatgactattttctggaaaaggtggatggagaaaaaaagattggaccgcctatgtcaagtgattgggataatgctgagaggttaattcaaatccttgctatattttacaagtcgacattggtgctttcaggttcaacttatgttacttctcataagatgtacaatgagataatcaacatggctagaaacctaactaccttaaacacagacacttttttgatgagcaactaaagaagaaagcgatagcaatgttaggaaagctgaagaaatattgggatccgtttggtgaaggagtagaaatgaataggttggtgatggttgctactgtttttgatccaagaaataaaatgaagtttgttgagctttgctttggaaagatgtatggtttaggtagtgtggaggttgttcttctttctgattcagtgattcaaatcttgaaggatttgtatgatgagtatagcagggcaaatttgttgagaataaatggaggcagcgattcaatgccatcatctcagtcacaaggatcatggtctcagtctcaagagcaagatagaagtggagcttatgagagaacaatcaacaaaactggtattcaattagaagatatggagaacttatttgatgagattgtgaaagaaacatgtattcataaatcatctaatgagttggatttgtatttgaatgaggttgtcgagactccacatcttctaaagggaatagaatatgatgtgttagattggtagaagctcaatagtgggaagtttccagttctgtcgctaatagctaaggatatatttgctatgcaagtatcgtcggtggcatcagaatctgcatttagcactagtggtagagtgttagatccatttagaagctgcttaacaaattacatatagaagtcttgatgtgcacagagcaatggttaaagtctgagatcagtatcaatgaaaaaggagtgtcaaccattcatgaattgcttgcagatcaagtggaggaagatgagcttatgagaggtaatctattccctttaaagtctctttaaattctggtttaccaattatagcttacaagtttgcttatagtccgtgtttcttaaattgttcatgtgatttagagtttgaacctgaattccacatccatggttttgagtaggccgagttatcgtttcagccttcaggagacaaaaatgcaaaacaaagtcatcacctaatgtcctcatcaactatcgtttagactttaaacttctacttctatgttttccattttcggattgttgttttgcttttcaattactcttgtttgagattcgagaacttctatttgtcatatttgtgttcttgtttgtgggttgccaattaggcttggatttggatgctaattttgtttctcctcatttgttacacatgattagaatatcggtttttcgggtttatgggtaacttttacccaataatacctgaaccgaagaaaacccggtttttcgggtatttaccggttcttatattgattacccaaaccgatccgaacccgggtgtacccgaataggaccgaacccaaaaatttcagtttaccctattgggtaataatttcattacccattcaacccaaacccgaacgggttttacccgaacccgaacgggttacccatatgcccaggcctagcttcaacgatgcatcctcaca

SEQ ID NO: 38302 - DNA, 4668 bp, Arabidopsis thaliana landsberg
agcagcaactgcagtcgaagtcagagccactggaatcccatacacatttgctccttgcattgcagtaaattttctcaccgtctgcctaacttttatatacctggcactcttcatatcattggtactttggacatttgttaaagttgttacccactcgctttttgtaggtttgtagagatcccagatggggtagatgttatgagagctacagtgaggatcacaaagtccgcggaagacatgacggatgtcatacttggtttacaaggagagcctccttccaactataagcacggagttccattcgttggtggcaggtaaggcttttgttaatttggttcggttatgatagccttacaaaagtatgttcggtctttcatgcgtgttattttgatagggataaagttgcagcctgtgccaagcattacgtgggagatggtgggacaacccgcggagtaaacgagaacaacactgtgactgatttacacggtcttcttagcgttcacatgcccgcttatgctgatgcagtttacaaaggtgtttccacagtgatggtttcatattcgagctggaatggtgagaagatgcatgcaaatactgagctgatcacagggtatcttaagggtacccttaagtttaaggtctgcttacttatcacaacttcaacgcacattctctgtgttctggcagtagtctttctgaatgaatatttctctttctccatgtattttatagattcttgaatagaacatatatatagcatgtgtgagttcttagatgaaggagttgattttgaatgttaattccaacttatcatctctatgatgtgtgcagggttttgttatctcggattggcaaggtgtcgataagatttccacaccaccggatacgcactacacagcttccgtccgagctgcaattcaagctggaattgatatggttagtgtttcatactttacagacattcctggactgaaataggaaattgttactcatgtttgtgttagctaatgaaataatatgcaggtcatggtccccttcaactttaccgagtttgtcaatgatcttacaaccttggtgaagaataattcaattcctgtcactcggattgatgatgctgtcagaagaatcctgcttgtcaagttcaccatgggtctttttgagaaccctttggctgattacagcttttccagtgaactaggaagccaggtcagttgcctaataaccctgagctagaatctgttgcaagtactacaaagtcttgatggaatgttctcaatttatattaggcacatagagacttggcaagggaggctgttagaaaatcccttgtgctactgaagaacgggaacaaaaccaatcctatgctcccacttcccaggaagacttcaaagatcctagtcgctggcactcacgctgataatttaggttatcagtgtggtggttggaccataacttggcaaggatttagcggtaataagaacacgagaggtacgttgtgcaactcttattgcagattatacaagttctatcatcttgtctgtgactgtttatgctttgtaagttgtaacaaatatcttgtgactgttaatagactgtaccctttcttctgattcagggactacacttcttagcgctgtaaaatcagctgttgatcaaagcactgaagttgtcttccgcgagaacccggatgctgaattcatcaaatcgaacaactttgcttatgcaatcattgctgttggtgaacctccatatgcagaaacagctggagacagcgacaagctaactatgcttgaccccggtccagcgattattagctccacttgtcaggctgtcaagtgtgtggttgtggtcatttcaggtagaccacttgtgatggaaccttacgttgcctcgatggatgcattggttgcagcgagaataccaggaacagaaggacaaggtatcactgatgctctctttggggaccatggcttcagtggaaaacttcctgttacatggttcagaaacacagagcagttgcctatgagctatggagatacacattatgacccgctatttgcttacgggtctggtcttgaaactgagtctgttgcgagcattgttgctaggtaaaatacttcacacagcttcctgtttcatctgttgcagtattctctgacacaagattaagattcttaacccctaagttttggttgctaacaggtcaacctcagcttctgctactaacacaaagccctgcttatacacagtccttgtttctgctacattgtgtctgtttatcttcccaaggtatcatcaccagtttcaacttccgttttgatttctttacagaaattggtgagaatctgacatttcttctggtaactttttttgtgtgtgtagcttaagccgacttttgagaagatgaaaagttacaaaagcttggagtagatagattctttcgattatctgatctgatcaagtgagttcttgttagcctagcaaaagagaccctgaatctgtgtcgtgttatgttcagagttattgcaacctgaaacattattggatattcacaccagaacgttcttctatttaggttcttgaaaattctaatagacaaattctcttcttgaaattaagtcacataacttctcagaaaaaatgatacatcttctcaactgattaaaactgacgtcatttggggaacataacttacaagacataataaacttgtgaagaaagcaagagaacattatgctttctttgtaagagaagtaacatatgaatgatgacctgagacaaaagaagagatattgatgatcacaagacatagccgcaaaactaggaatatccattgcataacagtagagaaaatggctaagtattgcagaaattcaaatcttatttatatgcagagcaataaacacctaatagtatcatcaaagctcagggttagggagttcataagaaagaggaaagataagtcattaataatggcagcgagacagcaacaaaaaggaacaggcttcggggttcaatacgaggactttgtccccaaatccgaatggaaagatcaacctgaagccaccattctcaacattgacctaacaggttggtatacaaaatagtaactttggactacttatggtggtttaattataatgttatgatttggttttaaaaggttttgcaaaggagcaaatgaaagtgacgtatgtgcacagctcgaagatgataagagtcactggagaacgtcccttggctaatcggaaatggagccgtttcaacgaggtgttcactgttccacagaattgtttagtggataagatccatgggagctttaagaacaatgtcctcaccatcaccatgcctaaggagacgatcacgaaggtggcttatcttccagaaacttctagaactgaagctgctgctctggagaaggcggcgaagctagaggagaagagattgttagaagaatctagaaggaaagagaaggaagaagaagaagctaagcagatgaagaagcagcttctggaagagaaagaggcgctaattaggaagctgcaagaagaagctaaagcaaaggaagaggctgaaatgaggaagcttcaagaagaagctaaagcaaaggaggaggccgcggcaaagaagcttcaagaagaaattgaagcaaaagagaaacttgaggagagaaagctcgaggaaaggagacttgaggagaggaagctcgaggatatgaagcttgcggaagaagctaaactaaagaagatccaggagagaaagtctgttgataaatctggagaaaaagagaagatactaaagccagaagtggtctatacaaaatccgggcacgtggctactcccaaacctgagtcggggtctggtctcaagtccgggtttggaggagtaggcgaggtggtgaagtcagcggaagaaaaactaggaaacttggtggaaaaggaaaagaaaatggggaaagggataatggagaaaataagaaggaaagagataacacgtgaagagaagacgttgatgatgaatgtaggagtggctgctcttgttatctttgctctcggagcttatgtttcttataccttctgctcttcttcttcttcttcttcctcttcgtctccttcttcatcatcatcttctaccaaaccagaatgatatatctctaagaaagaaaaatgttgtgcaaattgaagaatgtgtatattatatactttgtgatatatttctacagtctaataaagtttgatgatgtcatatttaagacctatatatcatagttttattgagacaggattttaaaaaaaaaaactcaataaacatatgaaacaaatgaaaaaatatccataaaccctaaacccttttagatttgaagacagagagacctgaaagcttttagttcaatcgatcttgtctgaccaaaaatctgtgtataggagagaacccagttgaattgggaactgagagaagcagaaagtaacttcctttaccggagaacgagaagtgaacggtgaaggcggcgaggttgagaaccatgcctcttcgctcatttcgttttctagaatgcgtttcacaaaaagaataagcctcttcttggggcagacgaccaggattcatagtcgctctctattgggaaatccgactttatgcaggtcttatatcgttggtccggtctctact

SEQ ID NO: 38303 - DNA, 3315 bp, Arabidopsis thaliana landsberg
  unsure (1)..(3315): unsure at all n locations
gacacaaagtatggagtcaaggaagtccattggcaatgaagaatctgttgtttagaacagtagcaagatttatgctttattgcggtgagcactcttctctctgcgcttttaccnnnnnnnnnnnnnnnnnnnnnnnnnnnnnnngcgataagcacgttccctcttacattcatattagcgaatcacatgtatcttgttgctatgaatgatgagcttagtcttgtgcaaaagctatggcattggctcaatgtttgcttctttggattaatgtctcttgctgctgctattgctgctgttagactcatctctgttgactccaagaacttccatgtttttgctgatgtttgattaaaatgtcttcgacatttttaacgatgtaatctttataccaattagaaaaaaatcgtaatccttttgttgctacttttattatttcaaatgaaagaaattttttataacataatatatatatttatttttcggtttaacacaaattttgtttttaacaaaacaattcaagagataaatggatataaaaaaaaagtcaagtgaaatgaatcaagttagtcatattcttaagcaaagccatattcattaagaaaataaataatcatttttttatgcagagtcatatttgggccaagccgtataaacgtttgggccaacttgtatgagatagcatataagcccaatagagttttgttgctgagcttatttgtgaatccatataaagtcttgacctaataacgaaagctagggttttttctctgtgaaatcgctcgccggcataaaagagagtcagaagaggaagaagagagttacaaggattgaaaatgaagggacgtcaaggagagagagttaggtaattagggtttcgaacacatatttctctctattttctcagctgaatctccgattcgaattagttcgttagtgctttacattagtctgatgacatctttgttttgctgttttgcagattgtatgttcgtggaacagttcctcggttacaagaggtactttcaattctcagtctttctctgtatgttcttagatttttcagagttcaatgttgcgtttatggttggagattgtagtgtttagtttcattattcttaagttatttggatttgaatattcatctatcgttttggatatcaatataagatctcgataaaagtttgtaactttgccacaactgatagatttcaatgataatgctctcagatttgtaatcttattccatggtttctgatttatggttgtgcaaagtgatgcatttttgctattgcttcctttaagattagcttttaagcagttggttgatagtttgattgcttatataaagcggattaaagattgattactaacgattaagtaatgtttcaggtccaagtcgaaccaataccctaacacttctctcgtccagattgaaggtgtgaacactcaagaggaggttaattggtacaagggtaagcgtttggcttacatctacaaggcaaagacaaagaagaacggttctcactaccgttgcatttggggcaaagtcactaggcctcatggtaacagtggtgttgtccgttctaagttcacttcaaacctaccacccaagtcaatggtactttatcttcttgagacataatcatggttaattggattttttcctccagactaatcatttttgatctgctgtgtttactctcagggagctagagtcagagtcttcatgtaccctagcaacatatgaggtaataacaaactcatttcagttttagttttgatccaatagtctcattattgcattcatttcagtagaattgaacaacactgactctggaacttgagattaagattagttgtttcattttgcttctctaatggcgaaaccttgtcaacaaggctatatctatttgaaaggttgtgcattgtagttaagagcaattagattataatcctttaagtataatagattgtccaagatttatatactttagtgaacatggatcctgattcgatttcctaatgcaggaggctagatttcaacaagtatcggaaggaatcgccattatcatttctcaggagctgtagtttatctactcacttttgttctaaactctctgttggttttgattttatctttagacgaagtaaaacatttttcttcttgagataatattaatggaacttcagaaaacctatgatcccagtcatttccttatttattgggtggataggcatttggagttgcaagtagcttctcacttattttttccactttgatagattcgtgctccttttgtttctctattttttctcttttggcttctgcaattttctcaatttcagcaaggcaatatcaaaatgtgaattctaacaagaacaagtaaaagagatatcgagatgctttagtataatggggcagatctagaaagtgacttaataatggaaagtgatggcttcaaccgcctcagctccaaacgtctcttccgctctaaatcaaaagctcccgtctccagatctgagccttcttccttcagctcaaatgcttcttcctcttcctccatcaatggttttggttttagttgttgattgcgaggggagcgaccagaagatttgaaaccgaaagatctcatgaaactctaaaaagtaatgaccttctagcttttgctatgactcttatcaatttcttcttttttgaaaccggaagatctcatgaacctctagcttcggctaagatctctttctgtcttggacatgaaaactcacaaaataaacatatgtaaagaagaagctttgactatcaaaatttccaacactaccaccacatttcgtttttttggtcttggcatggttggatttactatatcgactccactcgttctagccaagtctagatcctctataatggagagaaatttctaatcagtcaccaatgtctatttggcagatcggaactcaagcttctccgatatggatatgaactgagttttattaaccataacaatgtttctagagatctattcgagatcctctcttcctgccaccgtgagttatctttccggagcagagaatttttcttgtgccgcataaccgccacaccaacatcgcctctctttgctacatcatagctaaccctaaaattttcatgggctcggtccattttcttttttgtgatctctggccattttgctaagcccaactttagtttagtttttgtattagcctgactttatgcaagttgtttcgctgactcatatgttttgatttctttctgtaaggagagacttttctcacatttcttttttttttggaaag

SEQ ID NO: 38304 - DNA, 4037 bp, Arabidopsis thaliana landsberg
  unsure (1)..(4037): unsure at all n locations
attgagattacgagaaaggagcgctagttcttcattgaaaccttgagagttatattgctaagaacgtatggtctttttgtattgataatgacaaagcttttataatgtgaaaggagattacaagtgtaacagtatgtgtgtgaatataagcagaattgaatgtgtcttccaagtcgtccttgttcccttatataggtctacgcacgtggtacctccgtccgggatctgcggagatcgtcctggatattcggcaggtcagttccgagatatcaggtccgcttcgcgaatatctcctcatcagttcctaggttgttattcgcttatctcccttcatcaggtgactgggcttatctggcccaagtgcccattcgcgtatgtgggctcgtcagctgcgtaggtcctctacttgatgggcttggtgggcttttgtgggctaggttggtattttcgcaggtggattcctataggggaatccagctccaacacatatcgaccgtttcaattacataaccggccggttcacttttccaatcttctcttctcttgacgtcttttgttctatttcttctggacgtctttttgtcgaaaacatataattatcgatacttttccaatcttctcttctcttgacgtctttttttctatttcttcttctagacgcttaaattcataaaaatgtccaaagaccagaaaaatactaaaaagtatcgagaactatatgttttcaacaaaaagacgcgataatattatattaagataacttataaaaagttataaaaatgtgacttaacacgtctcatcaagaggttattacagaagaaaagtgaaagtaaagaaaaattaaaacttgttttcttcatagaaaactcgtctaaattttggagaagtaaacttttatgagattatccacaaagctctcaatcatcatcgattgaaagttattaaggtgaatagaaccgaaacatcagatttttgggaattagcaagaagtaacaaatttccgattgaagaacaccgacgagaacgaatttatgtcttggaatctcggacttttatgtacccaaattttaatgaagaattctactcagcgagaagaaattgagagtgaaaacggataggagtatcgagtcttagatttgcatgtcatgaacatcgcctgcaaacaaaagcgaaaggtaaggttgctttaatccttattcccaatcataaaatcatatcatcatgtaatcttatactacacaatcagatctaagcctacatatcatgcgtgaagaagcataacaaaagaaaatgatgatatgtttcgcaaataccaccctcaccttggcctagtgaagaggaaaactcaattctccttctcttttcccttagacaatctttactataaccatgatcataagctctaacttgattctccctcaattaggacctgaatccatgagtcataaaagctcctacaaagcttcagctcaagccgagttcatttgcgtcatcaaacaataaaactcggatatgatttactctatataaatctgtctcgaaaacatacgcagaagtcaaagactaaccgttagaaaccttaatccacggttgaatatgtagccagtagtatcatgaatagactcactaagtttcatctcgatcggacctcacatgaatctcccacgttcttctgaatatgatgcatcataactgatatctaggtttctgcaccttgagatgattctgggcaacctttcaaagtcaaatacggatggagcttaaatctgatggtcaagatgtcagctactctaaattccttgaagcaagatctttccatagacgtcttgatcgtgatctaattccttttggtccatcgggaaaacgcatcgcaaaaccaatagtcacacactgttctggatttatacttagcacagatttggacatcttctacagttacttgcccagaaggaaacactcataacttctttaatataatctcgattctatctctgtcagcggccatggattcttaacattatgattattgtaatgacacctcacgccacacttgattctctctgattcaacgggaatgagtctcccaaaaaccccatcttgaaactgttcttcttccttcttattttccttcttcttctttctttgctttgcctagcttcgatctggatcagtcttcttcacttaatacttctgattagtgttaagaacatgaatcactttcccactgtttctccttcgtggtggtgatgatttatcctccgtcatgtttccgccttcatctccgcttccttctctttttctctttcacgatcttctcaatttttattcttctcctttcttttctttccagatcatgggcagtttggttatagagaaacaaaacacattgatgttggaagaagacatgaacaaagaggtggaacatcaataggttctctcgacgttgataatgcggagattacgacaacgataacaaaggctcacgaactcacgtctcaacaatgatgatggtggctgacttagtttaggacttaaataccccaatatatatgacacttacaaaacccttgttgtttgtcatcaaaaagagattgggccatttatgagctatatcataatgtcaaaacaaattggcccaactatgtgggagtggggtgttacagaagtgagaattcattttgatctctagagnaagctttgttctccacagattacttggcgtagcatgtcaacatatttatattgatattaggcaatgcagaaactaaatgtgtgggtttggatacaacaagttattttttgtaatgagtagatcaacatattcagtttgctttcatcatatccaatgaccatccttttcttattattattttatggagatgccagggaaacactctcagccatgagaccctgactctacaacagaagttgtacgacacagactaacccttctgctttcatctacatccaagattaagactcggttaggaggcaggggtatccgtgagttagtagggacacataaagggtcagactttgtgaggtaaatgaagagatcgcccatgtcttgagtgtaaacagcatttgcttcttcgtctagcttgaacaccactaaagcttttgttttcgatttcccaatacccttgatgatcattctagaggactttttataccacttaaccaagaacatttcactggtggttcttaaccaagtgttcgctcctgcagctcgcgttcggtcttagtcagtttggaaagattttagtaccgcagcctctgaaacttgggatttggtttagcattgtagagatcccatgatccaatgaggtggcctccggatccaggtatgcgaaacaagccattctcagaaaacacaaccgaaaaagagaagaagcaagggtttttaattttgatattggtccacttggagtggctttcatcaggtctgcaaaagctgatttgaggtaccaagaacttgacagccacaacacagttttcatcctcgggagaagatgaggacattgacacattggtgacgatttgagtttggcaatgaggcagagttacaagaggaggcaagggaatgcgtttagggtttgtatccgatgcagccgggtttagatcatcttggagacgaagtattccgtcgtcctgactcaaagtagctacccaaccatgggacgacccgatcgttaccattggattatccaccaactccagaggcaccttcttttccaagtaagtgaagtgaactgcgttagcattgtaaatgacgagttttccgagatcctctccacatggaacagcgtcgatgatggtacaaggcggagtttgccgcaatgaagatgataaaccattagagagaagaggagaggatcttaccagaacagatttcctccggaagcatagtagcttcgagggctggttgagaagcagagacatgtgactaaaatgctttttcagagaaagcgaggctgcaagagagtaagaaagaaaaaaaacctaattggtgagattgatgttcacagtaaatacct

SEQ ID NO: 38305 - DNA, 3986 bp, Arabidopsis thaliana landsberg
  unsure (1)..(3986): unsure at all n locations
tatattccaatcttcgggctatctcccaaatggtattctcgctgtcagattcatatgagcatgaaacgaacgagctcatactcatgggtctaaaaagctttctttaaccgatttcgtgaccttctcgatctactggaatcatgtacagtgaatcaaaccttgtacaatatcatgaaaggaaatgggtatggatcatcatcacacgatttgggtaggatctactggttaaactccatgtcagattcatatgatggtgcagctctggtgatggaagaactgatgtgtgtcaagaatctcacttttaagaatactcgtgagctttttgatatgtttgaattagtatcagtgaagaccatcaatgaaattatgaaggactttgnnnnnnnnnnnnnnnnnnnnnnnnnnnnnnnnnnnnnnnnnnnnnnnnatcttaggggtttgctaaaagaagccaagttagagaagaaaggagattgttctgcttccatggttttgaaaagggtcatgagttctaggcatgaaagaggagagtgtatccattgtggaggaaaaggcatgtcttcaaagactgtagcaacagaaagaatcaaagcatgaatgttggtcctgtgacatttgatgaggatatgtggatactatacagcaataccagtaaccatatgactccatatatcaagtatttcaccactttagacagatcacgcagagctcgtatacaatcaatcaagtctcaaggaatgggagatgtgaagatcatgaccaaggaagggaagactaagatgatcaagaatgtgctttatgttccggggatggacagaaacgtgttgagtgttcatcagatggtagaaataggctacagtgccgtaatgactgatgacatatgcactataaaagatcagaatgggagattatttggtcaagccttgttggaaaagagaggtttttttctgcgtttgcaggtagttgaaggtaatctcacctcttaactactggacttactagtaacctgtcgactatgcggtcacggatttggtaaggttgattcagttttcaagtttggaccatctggcatcaatcttagtttagatgaaacattttttggatcactgttcatatgctgcgactgtttttgactttttgggatatgaacatatatctagtgcttatcagcttatgtgaagtctttgtagtaaatcatcttggcgtggtcacaagtcaaagccatcaatcattcttgttgactagcgttggagagaaacttgcattgcatgtggtgtaataactttgaccggattaacccagttctaatcacaagtcaaaaccatcaaggcatcaagcattcttgttgagtagcactggagaaaagacttgcatgtgatgtaccgtgtacggtttataataacttaaccggattaacccaagttaaattgaatcagacttgaccaaatcggattccccttaaaataactcatcccaatttccaaaccgattcgtaaacaccgtaccaacccaaattttagagtgtatataaaattataaatagacggacgagggattcattttcttcgagagaaccaaagaaaaggttgtaagaaaccctaggagtagcctgctatgagggcggcgaatcctatgactctacaagacgttgtttccgatgacctaaactatgaaatctgggctcatattatgaaaactagcttagtggagaaaggactttggtacgttgtcaagtacggaatcccgccggatttatcaaagattcgagagttagctacgaagattcaagctcaagacctttcaatatatagagattctgcggtaaaagacacgaaggcacttcaccttttgcaatcttttctcccagattcggttttccgaaagacactggaaaccacttcagccaaacatctttgggatttgctaaaagaagattacgtacaagccaagttagggatggagaaattacctgagtaccacatgttcgcaatcaatgttcttccggcgacatttgataaggatatgtggatgatatactcagtaccacttctcatatgactccatataagaagtatttcaccactttggatagaacataccgagctagggttagtttcatatttggaagtactctcatggctgaaggaattggagatataattatcatgactaaggatggtaataagacgatcaagaatgttctttacgttccagggatcacaggaaacgcgttgagtgttgttcagatggagatgagtgtaatcttcacagcaagaagagaaaaataacatcatatgaaacttagttttagaggcaggacactgggctagctattttattaaataaagtagacaaatcgatggattgtgttcggctaattcacttttcattttgtttatttttatcggtatgcggacttgtagggtttatggtcgcgtcttttatagcttgtggtatgtagctcaatggttgcttcattcaaatgcattgcaccatcttgaatggttaggtctaataacaagtcaaaaccatcaacgattcttgttgaccatatatttgtggagagaaagctgcgtgtggattacggttagtcgatttaaccggatcaataaatttaaactgaaccaacacttaaaaacgttatttggctttcttctaaggaatatatgtttaaagaaacatgcggatacgacggcggcgaatattcagtttcgttgatttcaaaattcaaattataataggatttagggtttgtagtgatgcaactatgaatataaataatcgcttttccaagataaataaaaacagaggaaatcctatgtaagtaccacgaggagatggtagttatgtatgtggagacaccgactctacaagagctcatttccgatgaccttaactttgaagtctggtcggcgatgatgaaaaccacacttattcagaaaggactnnttagcnaatggaatccctccagatccatcgaagaatccagagttagcggcgacgattcaacccgaagagctttcgaaatggagagatttcgtggtgaaagacgctaaagcgcttcagatcttgcaatcttctctcacggattctgttttcaggaagactctctctgcttcttcggctaaagatgtttgggatttgcttcgaaaaggtaacgaacaagcaacgatacgtagattagaacaagtaacgatacgtcgattagagaagcaattagaagatctcaaaatggttgacaaagaatctggcagttcctacttggataaggctttggaaatccttgaacgattgggccgtgcgaaacttgagaaatctgattacgagatttgcaagaatgtgttcacgacactctctgggtcattcgatggtctagattcaatgttggaggaactcattgatgttcataagatgactagtaagagtcttgttgagtatttttactatcgtgtacatgaatcatcgacagagaaagctatctttggactattgaaggatttgaggcttaaatcaaagtctgagaagtggtgtggcttgtgctacaagaacaatcacaaccaagaagactgcaaatttaggattcatacagataaggaggagaaagaagatgaaatcgtagttgattatcgtctggaaacggtaccaaatttaggggcaaaaacatatgatgatgatatttggataatacacaagatggccccgattaacatgactccatatgtgaagtatttcaccactctagacaggacattcaaagctacggttggaacggtcgatggaacagttcttttggttgaaggaaaaggagatgttaagatcaggatgaaggaagggaagaagaagacgatcaggaatgtgatttttgttcccgggctcaacagaaacgtgttgagttttggtaagatggtatcaaaacgctactcaatctcaacgggaatgcaaggcgaatgcatagtcagcgaacggggtgagaataaattggggga

SEQ ID NO: 38306 - DNA, 7214 bp, Arabidopsis thaliana landsberg
attgttgtcgtacgcgggcactgtctctcttcctctacacacagagtctagtccagtctctcgtatttctaatactgccaatcacatccttcctctctacgcttttaggggggttttaggggagcgtcgatcaggtgcgacgagcgtacgtttagctcgctcgttgatctctcaagtctaataagttgactaggtttgactagtcaaaatgtgtgcgagtgtatacacacatctggagagcttgccgcgaattacctaggtcccactaaggaaagggcatatatatatcatgggcaaaaaagcgccgccaatcaaaacacttgaaaaaaagcaaattataagggaaaaaaacttacaaatagaaccggcccactcatagcccagtaataaaaaagtccattaatggatatctcgggtcatccaaaacccgaacccgaaccattttcgatgaagttgacgaacctgtctggttttgttgcgttcttccgatttgggttggagaggaaatggcgtcgggatggggaataacgggaaacaaagggagatgctacgatttctggatggatttcagtgaatgtatgtctcactgcagagagcccaaagattgtacccttcttcgtgaagattacctcgagtgtctccaccattccaaagaggtaggtacccacttcttttttccggtgatattgtttgaagaatttcattgatttgatggttctgatgttcgccactgtttccggctagatcagtgtgattgtgatgtctagatcacttagttgtcgaaattccaaaaatcctagatcaggtcgagcaattgggaaatgagtcccatgcctttgttgattggccattttcggaatcctcagctgcagaatcaagatgccattgaaagatcatgttctcttgtttaagataggatgtatcgattaggcgtttctggaactaaatcatctctgtacatgttacaactgtttcttctgcaattacacggctctcttagaacattacgattgacaccagtggtttctttactttgaatgaagatgctgtaagtttaagtttttatgtgttgtgtacctgttgttgcagtttcaaagaaggaacaggatatacaaggaggagcagcgtaaactaagagcagcttcgaggaaaggtgaagaagccggagatgggactcacacccatcactagtctcaacaatcctccttcaagcttcatccgattccagagaagaataataaaaggttcatggaagattttgtatcttggaatctctaaacgctttgattgtttttcagttttcaattttatccaatcatgttctgctttctttttatgttaaatcgtctctttgagacgtatacttttccacctgaattatggacatgtggattgtggatcatttacttcttcactattactccatccaaccaggaacaatggcaacattttgtcgataacttgtgtttaattaattataacaattgttcttggaaagctcacaatgtacattggaaaccagttatagttacatcataaacaagttttgatcgatcaaacaagtccccagttttcttttatacattgatcattaagcctgatagaattctcccaggcgactgtagagttctgacacaacttctctcagaagtgtctatgccacaagctagggatcgtgcgatgattcgatgggacagggaaatgtgggaaccaatctctctcccatgcatgaatttgatcggtttctggttcatggtgtccacctggataaatgaagaatccaacgttctgatctggcattggtgggggaggtggcggcggcggtaatccccttcttgtcatggagatgagaggtgatgcgagagtgggaccattggcatgatgttgttgcctctgatgattataagcatgatgctgttcacgcatttgggtgctgcttccttggtaactgttaattgctggtgaggacctttgattagacctacaatgcccaattccaaaagaatattgtaaaacactctgcaagaagttgagagcaatagggagtttgagaagctaaccggtgactaaaaagaaatggatgcgcataaggtaggcctcgtgctgctgaagagtcaacttcaccatcaaccacatgagcagcgggtagtgaaaacgatggggaatggtgatgatactggggggcaacaggaagctggtgaaagtgatcgttagagtggctgttccagggatgatcatcagtgctgttattgtcgctagttctcggggtagcggctgggccaggtccaacatatgcaagatacgaatgattcacagcagcggcgtgatgtccatggaactcagtatgatctaaggaagaaatatgggttttgacattataaacggattgctagacaaaatgaaatgattatatacagaacaatcagcgtctaacttacatgtagtggttgcaggttccagttccctgaaacacagagcaaaagtcaattctagctttcgcgtttgaaggatcaaaagccttagaaaagagagataatagcaaaaaccatccatggtaaaggtgttgtaggcttactcgaaagaagctgctgcttgagagagttcaccaaacgggcaccaatggacccgatattgctgcaaaccccgtaaaaatgtcaggataagcgatctctcataaggaggttatatgataaaagcacagttctcatgtacacgaaaagaaagcatatcgttgcacaaagtagtgagcttttaccatttccggatagcttaaaccgtacaagtcttcttcagggatccaatcttccatggaaaactctggaaaggggcgagtagaaccgtttgcatacaaccactgacccttttcgacattgcgacagttagggcattgcatggctcctttcatgttaaatgctgatccaatgcaatctgcaagaaaccaaaaaacaagctgctaaagggaaagccgaaaatagcaacaaattcagcagccagataatagaactagcaaacctcattctctatctacgaaagagaagaaaccgattcacatgttactagacacatttgtcagaactggatacagtcatacagacatcatttctaggatctaccaactggagcaatctaagcttgtaaacaaagcaagggattaggaatccatctatattctcaaattcattcaattatcgtccaaatctaccatcagataattgcacaaaagcttgtacaagcaaaaagccatcggatcatcaaactgtgatggaggaaacgcaaaatggtaagagatggaggaagggaatgaaatacccaaatggaattggtgaccacattggagcttagccttggatctggtaccatcatcgagcaccgattcgaggcaaatcgagcacgagacttcgacaggagacgaggaatcctccgggttcccgcgttttccagggtcacatccaccagcaattcggagatcatcatcgcaacccgaatctttagctccggccatatcttcaccagcaggccaaatcggagggaaccaacgaaaattttcgtttttcgaaagaacaaaaaaaaagaaaagaaaggattgtcaaacaaaaatcaatgagaaaccatgtctcgctatcgctatctgtctctctctttctctccgagttcgtctgccttttggaacgccgatgcggtaataatcttactcccaaataaatctatccttcctcttcctctctctctctctctctctctctctcgtccgacctgttagagatgacgtggttcaaaaccggacaatgacattggactctcccttttcttttctttcctctcccattgtggataattttttattattattttattactttagttttggatagatgatcatcaaaccatccatccatctgaaccaacaaccaaactataaatttgttcatttaaatcattaatctctatttagttgatttgttttcttctctagtctctttcatatgaagtttattataactttcacatccattttgttatgagaaagattagcatattataacacacgaatattgattgtctaaggataccaaaacattgtatgtagtaaacaattacacatcaagctaatattatttcactttattcttctgaattagaagactatgcagagactttgctttgaccgagtagccttcccttaggtttcagaccttgatcttaggcttcttcacgatcatcaccgagcaatgagcatgatgagcgcagtagtcactcgtactcccgagaaccgccctgccacacaaaccgacaagtgaatcagaatgggtgtatagttgaaagattgatcataagaattaaggctgaatgaaataatacctcttgatagctccatatccatggcttcccacaacaagaatagaagcatgatgcttatctacaacttcacataggatattccttgcatcaccttcgaaaacttcgatcaccgcaccatgaacctacacaacaaacctaggaatgatgattgaaaagaagaagattgttgctaaccaaagatagatagttgctataagaaaaaccagtgctacttagcttgaagctcttaaatgtgctagagattcacattcacatttttaccaaactcatctaatatagtccaatacaacacatgatgatgattataaaatccaagaaacacataaaaggaatttgaatgtttgataatagcaagatcgtaccgatctgctctgacaaattgctttggctttctcgacaaccttagcagcggtatgcttcagatcagcatcaacataaggtacaacctccgcagttcctaaaacacacagattaacaaaacctaaacgatctcatcgctgcccaaaacagaacccctaaaagagtagattcgagagtgaaagcaaagagcgtaccgggaccagcgagaccaacggcggagacggcgttaggtttggcgtggacgatgaagagcttaaacggataattgggagcgtaaggagcgaagaaacgatcgagcgtccactccaaggcgtaagtgctctgctcgctgtcgtcaactccgacgaccatcaccgatttcccatctccggtggccatgactctgacgttgttcgccggcgtgaagaaaacgcgctcttgtgtttgtggtagaaagaagcctagaagaatcctccaaagtgtttgcacagaaaaagagagttttggtatcttcttcttctattatttaatttctttaaataaaaagaaaagaggaatgtgatactttgatttgatgacgtggctggtcctcatttctttatgcctttccattagtaaatttcccaatatttaaagttacccacagattttaaataagaagaacccacagattttacacaaaatttattctaatttgaatattacccataaaacaaagtacataaaaggattttgcaggttaacagttattagctttttagtaacaaactgatatgaattggtttgataactttcgattttacttaactattacaagaaaaatctaatttcaaatagtggaatgatttgagttgggtaaaatccggctcagatgataacaattacaaaataaaaaggagacggccgcctgtagaataatatgacgacgtgaagcaaaagcaggagtgcgacagaaacctctctaaccaaattgcttttagttatattcttcttcgtcttgacgctactctttaccttttttatctgatttcagatttctccagaatcttcagattcccatggccactgttcatgttgtcggtctgaaaatcaattctggatctccagggaaggacacatcccgaaaggcacctgatgcaattcatgctgctttatcaccgtcatcatctctatcattactcagaggtacatataccttaaaccccaaaccagtttctccgtagcattttgagacgtcatcattcttatctatcatcaaaccttgctctttgtccatataggagtgttaccaaagtatttcagctcagagttgtcagtggctcagttccggttggtcgaaggatcttaatacatagtggcatttggacatgagaagaacacagattcttgggatggatgggagctaagagaaccataccctaaccttaataatgtcctacaagtcggatcagcagctttgtttgattttggggtgttttgcagcttctacaaaggccagttttgatccagtacacggaggagagatgtctcagctcgagtatcataactgtctgaagccgccttctgtgttttgaaacaacaagtcatcattctcttacttcctttatatatattaatcttgttgagattctggattttaggcttgtgtctttggtaacatatgtggtttccggttagttatggaattgtcggtcaatctcgaggcaagaagagagagtatgtatatatgtaaatgttgaaccactaatcacttaatgattatttagttaattacgttggatctcatattgagaatactattttgcatatatatttttctgaaaaaaacaacaaaaagaaaggtcaacattacaagagtaaaattgcatatgaagagagtgataatgaaagttcaagtgtttgtttctgaattcttgacatgtatataatcaccatataactgtttccaaattgtagatggtaatgcaaaaatctgatgaggagggagatggttctgtttccagcaactagatttagttataacataaggggattgattattgttattgttattgatccttcttctcctgttgaattggattgagagttagttggtcaaaaggtgttatgggttttagaaaattaataaaaacaggtgggctttgtctgtacatgtccttaaattattagttttgggagtagtttaatatcgattgatacgtttacacgtaaaaagtcttttcttttgagtcgtcgtctcaggaaagatgagattcgtttctaggagaggttgactttttcaatccacacttataactcgagaatcttatgtcattgatgacgacctcctctacactttcggatttgtatgtttacaaaggaaggaaggattaccgtagaacagtttatgtgatgtttgtgtctttctatttttattcaatgaaatttctttacatgtacatagattagctatattgacatgaatctaactgaataatttgattgcaaaataacaaattagtgaggggaattttgtt

SEQ ID NO: 38307 - DNA, 2888 bp, Arabidopsis thaliana landsberg
tgttaaattaaatagcatccattatacgacatgtagtttatgaatatgtcttacatttgagtatgaaactttgaaattgtcaatttaaattggatactccattatattacttcttgtaattttaaatatggatgttcaggtattttttttttttaattttataacaaatttccaaaaatgtttcgttcactgttcttctgttcttcttcatttaactaaatgaagaacttcttcatttaactataattgaaaaaaacaaattgcttctttatgattacataattttaatatattttcatactatatatttcaataaaatttattgagtttattagacaataaaaatggaagacaagcacatcgatctcttaattaaagagttaaacaacatcaaacgaagcaatcaaacaacaaaaaaatgcacctggtttgtaaccaaagatatacatttcaattcttacacatatgataatttagataagaagttttatttcatgaatatgatggctgatatatgaaactataattgttcatcatttatatatttgttagtatattggaggagggggagagctataactatagctatagcttggaggtggcggtggagacttgtaaacgtatggaggaggtgatggcgacttgtagacatagggaggtggtggcggagagctgtagacgtaaggaggaggtggtggcgacttgtaaacatacggaggaggcggtggagacttgtagacgtatggagacggtggtggagacttgtaaacatatggagatggtggtggagagctgtagacgtatggaggaggaggggcagacttgtatacatatggaggagtcggtggagaactgtaagcataaggagcaggtggtggcgacttgtaaacatacggaggtggtggtgcatagctatatacgtaagcaggtggtggtgaaaacttgtaaacatatggtggaggtggaggagatctatacacgtaaggaggaggtggtggcgacttgaaaacatatggaggtggtggtggagaactgtagacgtagggtggtggtggcggagacttgtaaacatatgtaggaggcggtggagagctgtatacgtatggaggaggagggggagacttgtaaacatatggaggtcgtggtggagagttgtagatgtatggaggaggtggtggtggagagttgtaaacatatggaggtggtggtggagagctatagacgtaaggaggtggtggtggagacttgtaaacatatggtggaggtggaggagaactataaacgtaaggaggaggtggtggcgacttgtaaacatatggaggtggtggtggagagctgtagacgtatggaggaggagggggagacttgtaaacatatggaggaggcggtggagagctgtaaacataaggaggaggtggtggcgacttgtaaacatatggaggtggtggtggagagctatagacataaggaggaggtggaggagatttgtagacatatggaggtggtggtggagaagagtagacgtaaggtggtggaggaggcgacttgtagacataaggaggaggaggtggagagctatatacgtaaggaggtggtggaggagattggtagacatatggcggtggtggtggaggactatagacgtaaggaggtggtggaggagacttataaacatatggtggtggtggtggggaactatagacataaggaggaggtggtggagagctatagacataaggaggtggtggcggggacttgtaaacatatggaggaggtggtggggagctgtagacatagggaggtggtgggggagacttgtaaacatatggaggaggtggaggggagctatagacgtagggaggtggtgggggagagttgtaaacatatggaggaggtggtggggagctatagacgtaaggaggtggtgggggagaactgtagatatatggagggggtttgtaaacatatggaggaggcgatggagagttataaacatatggtggaggactgttgtaaacatatggcggaagcggtgaatacggtgttggtgttggagagtattgagcacttgtatacgcaaccatggaatacaaggctaagaccaccataagtaaagatggccaattaggactggccatgttgagaaacttgtgtgctctattagtttcgtttaagactctctaaccaaattatttttgaatgtgttgttaattacaaactagcggtttatatagccggtcatcactgcaactggtatggttgtttatttaagtttatgtatatatgtttcttagtgcaacatggttatatttttaaataagtcaaattaacttgagaaattgttaaaggtaaaacttaggaagaagtctttggtagctaccccttaccatattcctaaaccggatgggtagactttgaagttttcaatccaaattggacgtcattagtgcagccctagttgctataaggaacaagcaaaataatttttccatattctctatcattcgacttgtaaatataagttatctattagatttcgttccaagatacacaaacatatatattgtcttaatacatacagattttataattgaccttgcaaaacctttgctttatgttccaaaaccacgtttcaaatatgttttccaggatgtgtcggttcttttctctctaaataatatcagaagactacaacaacttgcttgcaaattcaaaaacaattatggtcttatggatattttttttatatacatattttatagaagatttctcctttcacatattcaattaaaaattatcggcacccatgacagaggagtcgttttggtttaaactttgaagtatgtcaacgtaaattccatgttttgtttattgatttgtatagtttt

SEQ ID NO: 38308 - DNA, 5970 bp, Arabidopsis thaliana landsberg
gttgttgatcttcgacagacattcgttggttagactcaaaagaccgtctatcgactgcaaaaaagaagataaaaaaataagttttaaggtgaaacaagaagtgaaagaagttttgtgtgttttaacaacctcgcagactgtttgctgaagtagaaggcataggttgaggaggctttaagctaggtggttgaactgaactgcgtagaggagcagtcatgggtgcagaacgagaagctgatctcattgtttgaatctttcctttggaaatgatataaaccgtgcagaaatcaggagcgttttttgttatgctgcctggaatatctgtaggtttgttgaacctgcaaaattttcgtaatccaacattacttgagaatcaagattcagcaagagagacaaagaaggcaaggaagtggttattttttatacctgagaaaaccacctttgctggaggaaccaactactaaaacctcaatggccgcttggtttacgtattcgaccaaagctttggcaacatcggactcctcaagcaacacatcttggcattgaatctggacagttttcattgcacattaacgacataagtatatatacaaaagaggaaaacaaaaaaataatttaaaccaagaaactcacgtctttgcgtgtgcagaagcaacggaaaggaaggaatatttccttggacatgccttctggatctctgcatactaatgaagaatcttggctcagctctgaaacaaaatcacaaaccattagaaccgagaatacaaaagaaaacagagaaaatacagaaaatgatagaagaagaagataaggtttgtttacttgcagaggaagcatgaagagaagcactattattcaatggagaaggtcgaagcttgacatggacgagaatgacggattggcctcgctgcaacaaattatcaacagcccatttaagagcgtgttggctgcttttgtctttgtctattgcaacagctacaactccgctagaccctccttccttgactcccacgttattgtttttgggcatccacatcttcgtctctctttcgctttctctctttcgctttctctccttcaggattcaagattcagagcaataaagaaacttgagaagatgaaatcgaaagagagagagagacgtgtttcgaggtaggttcaaagatggtttctctatttttcattttttgttaagaaagcgaaacaagaggatgaagagaaaagagagtttctataaaaatatgttgtctcttgtttcgtctctatctctctatgaacgcttctccttcttctccgcctctccttcctcttgatttctctttcctattaactgaaagtttcttcgacgatttgcaataccaatttgtgtatagattaatttccacgcaagtaacatacaaggtgtgtccaaacttccaaaagaagtaaattatataaaatgaaaaagaacacagaaggagaaaccagaaattccaaaacacgtgactggtttcttatggaacaatcaaaacatggttatatactgttaatacataccatttgcatgaaagactctgtggcccaatggataaggcgctggtctacgaaaccagagattctgggtttgatccccagcagagtcgatttctttttgctaattttttattgcgaattagttgaaggctcgaagcttaaaaaggcccaaagaatctcatgaagattctgtttttggtctctctcactcacaagtctcacataatcgaaagctcgcagaagtcaagaggaagaagatgagtggtacagtgacaatgcacagtgtcttcgtctacggcagtctcatggcggacgacgtcgttcgtctcctcctcaaccgtatccctcaaaccgcttccgcaaccctccctgatttgtacgattccatctctgcaaaatcgattttctttgttgaaattgaaaaaaattgattggtgattttgagatttttgcagccatagattcagcatcaaaggtcgtgtttatccggcgattataccagctaagtctgataaagtctctggaaaggtcaggatccgaatcagattcttactcatgccttaaggattgggaaattttgatattgttgttgtgcaggtgttatttggaatcacagatgatgaacttaatgttttagatgagtttgaggatgttgagtatgaaagagagaatgttcaagttttgttaacagtgagtcattctcagattcattctccatccatttctatagagagaaaaaaatgtgttgttgtttttgcaaagattcaaagatgcaagaacaagaacaattcatttgttctctatatttgatttgaatgcagagatattgatatatatgtttacaggatagttcagacgagaaactgcaaacaaaaacctacgtttgggccaagaaagatgatcctgacctatacgggacatgggatttcgaggttagctatcttaacttgttcatagattaggctctctggatcattacttgtttgaattgtgtatgtatatatatgctttccattgaactttccacaggaatggaagcaacttcacatggaaggtttcttgaagatgactaaagaatttgctgaagagttgaatttaccgaaatccgagatatgactcgccgctacattcgggtcagtaaatgaaatctggtatagtttcctcaatgaattggtcaatatattcatggtgttctctctaggaagggttagattcttcttcatgaatacacatacatgagggggatttggggttttgtggtattacttaattcaactgataaggaataagaaaacagctacagattcttgtgcggtatgttattatacattacacatatagacatgtgtttagcttcgattgtttgttcgcatttatcttttacgagagctcaattgctactatgtttgagacgaattgtgtgaattttccacaatactagtaagtaataccaaatcaagatgttattggaaattataaagcaaaaagtggacaacaaatgtgttgtagatagcatcaagttttattagctagggaaggtcatatgttgtagacaatgtgcttctatcttagtacagaagatagattattaactgaagcatagtgaaagcgagtggcaaccaaagcttcaaaacaaagaccctgcaaagtataccaaatagacttaatagaatttaaactttgggctggacctcccaaaccttgagaaactatggaccaagtcccggatttttaattccacagatttgtcatttgtgtatccgccacttagttgctgttgagctgtccatagcctgtgtgggtacggtactggtccctactaataccagcaataatcgaaattaatgggccttcctacgatccattatcagcccactagttactgtagcggacggactttgtgtgaattaaccgccacggaagttggattgaggaattcaggaaagagcaaaaaaaaaatggcgacttggataacgttacagcctccaatttcatgttatttaaggctgatgccatcatcagcgccgtcgccggcttcatccacgtcgcgtcgaaaacaacgtcgtctctttaagccatttcgatgcgttccacttcaacaacaagagcctcagctcgatcagtcgcagcaggtaccaaacaaaaatttggacattaaaaatcgatgaagttgaaatcggatctgacaattgattgaggatttttcgtgaagggagacgacaatgctgtgattttgtgtgaggattgtaacgggaaaggatggttgctctgcgatttctgtaaaggacagaaaacaaatgtgaaatctgagaataatcgtatctatcgacgatgtccaacttgtaaagctgtgagttttcgtaaatttcgattaggttaaactgttgctaagtaatgtatctgtgaaactttggattggttatctaaatctgggaacttgaatgatgtgattataggtgggatttgtgttgtgtagaaaatgtaaagtgttcaagtgtgtcacatttcctaactcagaagacggcgatgaacttttgttctaagagctccttgttctagcaacactcttcttctccaactaaggacaccatttgagttttcaggttcctttctttttccaattgttatatatatattgtctttactcatatgtagccatatgtatatgcacattgtaacattaatcagactagtgaatagtgattgcattggcttctttactgatctctatgttcatcgtgtgaagctttcctgattgtatattgttatatgtattgtctttattcatatgtgtaataagcacattgtaacattaatcagactagtcattgcattggcttctttctaacctttcctggttgatttttgtctgtaatgtgtctcattctcatgtagatatttaaatctatttcattgattattcttaaaaaatgggatttccttgtcgtttaacgtataacctcgacacccatctttagagcagaaaactattgagtcaatgtcgtacactcccaactgtttttatgattccaaggcatatggtttgttcttgttaatcttctgctggatcatgctgtctttaagtttatagaaacctgcaattcattattctcgatataaggttcaggagataagtgcacatgtattaggcgattcgttctagatggtgttaaatctcaaggtacagatgtcatgtggtgttttccgttttatcagatctctatgttttctgttttgacttttgactctcattaatcattttggcagagaactaacatgtaatgtgattttatgaacatcttactcttcctttcttgaatcctgtttggtttaggggattgtaaagtcagtccttttgatattgccgtactcttttgagatgaacgtatatgcatgtgatcacaataatgtagctagttagtttatgtaagaatttttctgtgactctgctattagcttattatattactaagcatccgtattttagctttagtttttgtaagagaagcttaggataccgtacttttgcctttgaatagtttaaaaacaacattccacttggtgattaaaagtaccattccgtaattattgttatccttacattatcatattattttaaacctctgattactttaacataactctgcaacttccattcacatggttgttccggaaagaacgcaaactgcccaaatagaaacatgaaccattctttctattctttttttgttctctctctctctcttcttatttcttaataggcgtagcattttggcttattatgagcttgatttctgcttagagttaaacgacaaagtgcaaatgtttaattcgtatgactcattatacctctagttgcataagggtctatctgctgaggttatagatcaacttctatagtattccaaactaataaaatcttcggttactataaattatcttgcctacgtgatatgtttctactgacttgtgctgcaaatgcagacgactggattacaaaggatctatgaaaatttgtgtaaaagttcaaatagtgtttttgcttgattcacttattcagtatttgattttttattgtaccacgagtctactgcatttgtcatcaggaatagatggttagatcaatgggctggtgggttcttgtgagaaattccaccagagcagagaaatatcaaagagccgttttaagttttcatcagtcagaggtagtgcaacaaaaattgaaatcagtgcagagaaagaataaagagtctccaggaacagaggtccacatcacggtttcaatgatctgtttgtacattccactatttagaaatctctccccttactcagaattaagaaattttaaagcacacaaatccatattcctagagaaaaagtgggaataagcagaatggctcaaattagcacaagaggaggaaaaagaagatgcagaagcaagcaatgaacaaaactatc

SEQ ID NO: 38309 - DNA, 4246 bp, Arabidopsis thaliana landsberg
  unsure (1)..(4246): unsure at all n locations
tcggataaaccctaaaagcttacccaatctacgaacatacgcactacgcagtttaggtaaaattgcatactgtcctgtgaccggattacatatcataggcactgtatccttatcatcatcttttgagaattgtataccttggaaaaagagcaaaccagatgcatagctaaatctacgactgtatcgacatatgtctccagagattttgatatgaaaatcggcagctagtatatgagacgacttctcattatacggattctgaatttcttaggctgaggcgatgagaagaagagccactcaggatattgtgcgacgattaataagagacgcggccaagccgacgacctggtcaagaacagctccgtgaaatatggatggaaaagcatgtaaccccatagcttcgacacgcaacaaaacctagcgattgactttgccggcaatctcaagaatatctcgttaatgagatcacttgggatggaatcttggccgttgataaatcaaagggcacacgcagattctcgagtgaaatatgagagatataggctaacacacgaattttgtcaatggacattcagaaaggcaaagaaaatatcgtcagttttcgtttttgtaacaattgaaatatttaatttcaccgcatatataactatttgtaacactcatcaacatatggaattttgataccatgcatgcatccagactttgtggaggctgtgatatgaagttttgagccttaaacctaaaaatgtagaaagttctttcataggcttcaaagtgtttgcaaaaattagagatatcaaatttttgctattttgtaatccagaaaagcatataaatattcttaccattaatttgtttgatatgttattaaagttctagttaaattagaagaacataatagtatgtgtaaaataaagtttcataatgccaaacaaaaacacgctactctataatatagttcgatctacgattacaaaccaaaaccatttctaagtcctgatcatattttatgtagacgtgcgatttcatttctggcacccttgagtctctctttgggcggttgcacctttttcttagtttctaccatgacctccacaaacatcaaatcggacaacttgggctagaaactggagttgtaatcattaagaatatatatgaattatagtatctaattatagtcttattattaatatgattgcattgatatgttacagatcaaaacttgattagtcttttacaatttatgttacacaatatgtaatcacgactactattatacaagcgtgtatgtgtcaggttaattatacacatatcacatatgtaagaattatggctccttcagccttgaaagaaaggtacattgtgatcaatctcacgaggccggacgcaatctgatttcatccatccgattctccgtttcacattgtcgtacacgatcaagtgtccacgcatcgagatatctgcaataagaaaacaaaacatgtatctcataagtttcaacttaattgtgattattcagataagaaaattatgggttttacagctagaatgttatttttacctccaagaataatagtggaaccatcatgaacactgcttccatctaatatcccaagacagacatttcctttgttctgcatcaaaactcgaatatatataaagccaaatcgaaatcgaagaattgcaattgttagagcttataaaaagtgcttacgctgatgatcaagtaatcctcgggttgaatcaaaagttttcttgatatgatcaaccatttgctccctatttgcagagttattggtctgaagaacttcttaacatccgacaaggaactgcatattatcgaaacaaaaaaatcttcagagatatgatctttctttcaccacagaactcaatatggttttacaaaagatcaaattttctcaaattacctaaacgggaagttagttttggctcgccagcagataggcagtgtttagtctgaatcatcgcgtgttagttctaaaccagaaacttcttgaagctttcaccaacaaaaatagtaaaacaccattgaccagaagaacttcatctaaaaaaggctgattttagtttctgaatttgaatacttactgatgtgaccaattgggagtaagcctggttagggaagtatgtataggaacttcctgtgtcaaataagactttccctactcttccgttttccccatctaagctaagcataccctgcccgtagctcatctttgtaacttgcatctgataagcatccctgaaagaacccaaaaatgtacattaccttagcatatatgcaagtgacaaagattgaagcttttgggaatatattcagataagaatccaatcaagcgattctaagctgctaggtttcgcagattaggctggttttcgttaagcacttacaagcgggaatcgtgaagcataggaacccatgtcattccgtgtgatggaaccaaatcacttcccatgaagatatatccttcaccgtttaaatcagaggcaaggcaatggccaaccacattgctgataatacctctgcttgcaagttgagaaggtaagctaattttagctctgcttagaccgagaatcccgtctgtctttagcagagtattcaacagtagtccttgctgatcatacccgcaccttaaagttcaaatcacgaaagccaaagtcacaacatgaaacactcagatattccgtaacagaatcacaaattgttancggagaatgatatttacccgaaaactatatctgactcggctagtgatccgttatggagtttgagatgaaacttatctttggtgagaactcccatggagtagctatgatcagcatattcaatctcgtagtcacattgatgacaattttcacaatgttctgtcagttgattcctttggacttctacacaaaaggcctctgaagatctcactaagttatcttttctaggcttatatagttgatttgctccctaaaaccaaaatccagaaagttcatcactaaattcacagagagattctcctaaaatctaaaaaaacttgatctttattctttaccttagcacaactagtacaaggagcatcacattggatccaagtcaattcacttcccgtatcaatatcaagatgatagtattgtccatcttcaggctttccaacaagaatgcgtgtataatacagcctgcaacaaaagcaaaaaaagacaatctttgtttacttgtgctttaagaaacaaaccacacatacagattacagagtattagatacaatgcatacatacccatctggatacacattaccaccgacgggaaaaatcgtagtggaggagtcaatagaaccggcacttgtagataaaacatcgttgacttttacagggttgaccagctctaaatccattgattccacaaagttttcattctctaaacctaaatcttcctctaagatccgctcgtggaactctcgagctctcaatttgtgatatacagggaaaacaaacgacgtcgtttcacggagattatcgtcgtcgtcacggctcctctcatcaggagaaaccctaaacatttgaacagagttgggaaaaacagaggcgtagaaagcaaccgcgagaagcgagattccgagaagacccagaactaatctcggcgaattcattgagagatccgagaacaagaggcgagattgttggtttcggtgaagtgggtcgggttgaaaactcgggtttgggttatcctcgggtgggatttcgagtgggtaatcgtggtcagtgagagtgaaagcagagattgttttgccttgtgaaggatcatcagatggtgggagagtgattatgactacgctgtggactcgttgttgttgttgctggtcatgaagatctggttccattctgtgatgtctccgatcgaattgggctggttttgatcggagagagaatggaaacaggacgagaaagaaaaatggcagactaggagtggtcaagagtcaagaggcttttgttatacgagacggaagctgcgaggaaggagagggttattttatttgaagtaaatgtttgaaaaatatgaattacacttaccaaaaaaaaaaaaaaaaaaaaatgaatttcacttacacataaaattcatttttattaaaccctccctataaatgttcttttaaaaaaaaaagtatatatggaggacaataaaaataaacattttaggaaaaaactttaatagttttaacaaattttataatttcttgct

SEQ ID NO: 38310 - DNA, 14110 bp, Arabidopsis thaliana landsberg
gtagtattattccatgtgttgttgtcaacaatcacagttctattagccatagctgtcgcctgataaccatagtcccaccatgatgccacctaccaagattttatttttgcaaatcaaactcaggcaacttcatatattaaagacagcttatacctctaccaaaggatgatgcttaacaggaactaaaaactgacttgtttttgttgaaaaaacttactttatcatccacatcagtattatggcttaaccatgcataagactctctaaaatcatcaaagacgtgtaggccatcacgtgactgagatgtcaaaactattgatggagctgaatatgcttctgcagctgcccaaacacaatggatctacaaaacaaaggtatgcatttcgaactcctatcatttgaatgttgacgacaaaactaactgtaaaagatgggaccataaaataacaactcgaagaaagtctgcataccacatagaaagcacccaacattataaggagaagaagcgcaactatagaggcttcaagaggcaaaacaagagccttctttttaatcttggccttaacagaaggtttatcagccggttctctctctttcttcttgccctttttggaagaccgctcttttacaatctcttcacccttgtcagtcttaccagcagaaacatcatcttttggggcattgttcgtggaagtgttgtcctctgcctaacagtcgaaacacaaaccatttttgtccagaacttgtcaacacagatgattcaacagatcagagaacaaagtagacagagaagcatacttacatcatctgtggaattagacgatgcgcctaactggtatttgatggaacccgtgaaaacatcaaaagcttgagagagcgcaatcccagacatgatgcatgctgctggagcaagcacgagcataagacgaacctaagagaacaggaagacaggtgaatacatggttcaataaaataactaggcaacagaaagatgcaacggcaattcatagacacacaacttaccataactccagaaaagtatacagacattacaatgtaaaggaccacaaaagagctggcatcagatagaggcgaaaagcacgcctaccaacagaagataagaaaagaggaaagaatcaacacaaaatatatggacaaaaaatgttattcagcacaaaatctaattagtaactacaatcaaaatttaactcacaatgatgccagcagggaccaagaaagccaaaacattgatatccatgaaataagatggccaagttggaggttgatgttcactgacacttgcaataattggaatatacttgcttgcataagttctgttgtacgatagataaaacaaagaaaaagagtgtcaggtatgttaataattataaaatgataaagcggaatacctgaaacgtggacaaagacataaaataaatggctaggagaagaaagattgaaaaactagaaccactcacggatcaagtaaacttaaactcctaccactccatcctcatgttggacttgaagccaccaatgccacaagaattgccacaactatgaaacacacaaccctgtaaagaataaacgagcatagataaacattttacccaatgatgcataatccagaaaatctagaggttatcccatctgtactagctttgtgaagttggataagaagcagataaactcctcttatcaaggtgtggtaattgtagacatgtagagagaaacagtataagaaagcgtacatgccgatagacacaacaagtgtcacagcaactttgaacattttgggagaaagaatgcctttgatgtagtatacgagagctacaacgtggatgatgataaaaacctgcataagttatagacaaaaatttcttaacaaaagtagaagtaaatgaagagaataactagtagaaatttttttgtccatttgcagaaacattaagtttaaacccaatattcgtacatatattaacttatctcacaagtgaaaacttagaatttaaaaaggtttcagttttttttagcttgaataactctacaggcatcaactagtaaactcgtgtccagaaaaacgatgccccaaaaaggactaatccatggtcagttcaacacgcaaaatccgattcaataaactaagcactaaatgaagaggcatacataacaaaataattgagaaataattgagaaaaaactcaccaaaaacaaggcaaaaagttcagaagtcaaaaccgcattgaaaccaacaacaggggccaatgccgctaacaacgtgcctaacacaacctgcatacgcatgagcaaacctggtgtcaataactttcagtattatgtaattttagctatctttcagcatcctacgtgatatatacaactactggtataggttgttataataatttttatctgtctccagaaggaagaagattcttaccaaaggagcataggcaatgtacagtcggggagagtatcgcccagttacaatgcacaaaagcacgtgcattggtatcagattgataatgaaggtgtaacctccccatgaacatacctaatgatggaaaaaaaacaagtaaaaactgagcagaaaataatactgaagaggaaaaggagaaaaaatggtgaattatcgcaggtcgtaccatgtaaaagtatgcaagagcattcagggtggcataaaataaggaacctgtatttaatgtctgcataaaattcatgataaggatcactggaaaaataattaaaaggaattggcgactaagaaacagagatttacaagagaaggtttgatgttggttgctgaaggaattttcttatacacatgctccaaagggtgaaaaaatcaaaacaactttacatgccattggagaaaaccctaacctttatgtaaagataaaaagtgaagatcaaagcaaagatggcaacagcttcattgtcatagctaccagctacagatcgggatatatatgagggaacctgcaaaagtaaccattcagtaaaaagaactaacactctaaagaaacacatcaataaaattttgtggtaaattccagtaaacaatgcaccaatgctgaatagtgtacatgacatcaaatcaccaaacgctaacctattaattatcatagccatgatgttctagaaacttaacgtttgctgttcagaattttcccgaaacatcaattgaagaaaaatatcacgtatactaattgactaaattaccatggccaaaagagcagcagctgcaagtccagcaccggagcccttaacttcctgttagaatgcaaatatgtacttatcatttattggttctaaaatttactagagaaatcatgtaagaaaaaagacaaacctttgtcaaaaggtaagttgcccaggatgcaaaagctgaaaatacaggtgcagtgaagacacagacagtctctactgacagaggaatgtttaatgaatttaatcccctgtggcacatagatataaataattaaaactcaaaactgacccatacgtgtgtatcaaataattgctgataacagtgaaactacactcaccaccagatggttccagcagtcaaagttaacccagggtaaacagttcctccaatcacacggccaagaggatacctaatatcaaataaaatgggggaaacaaaataagtacaatgctattgaagacagtaatagaccaaaatttctgatcctcaaattaccaggtcctatcatcaaaccaattccagaactcgtatattccattcttcgataagaactgaaataaacaacaaattaaataggaccgcaatctcagaaattaaaaggagaactcgcccaaagctaagattaacatcctggaaataagaaaagagagtgaacctgagtgactctataattgaagtaaggatcaaactcatgaatcacactttcatactttataacctgaaaaataaatcaagaacgttaccaaaagcaataaaaatgaaaagtatgagatgattgctagaatcaaagaagaattagcctcttctgcagagtagataagacattactgaatttactagagtctagagaagtaaaattaactaattccaagtattttcctaactgtcaaataaaatggaacaagcattgatttaacacttcaaagctaaaacacttaatttcactcttaagatacatgaaccatcactacgacgaggaacaatatctctccgacgcagcgttaaataacaagtaacaacaacaatctgtttctttaacacagagacagtgaggagagaaacgaagttacaccaatcaatctcaaatcatgagatcggatctagattagttggatctaaactagtccgatcggatctaaagcctaacaaattgaagaacactgaaatgaatcaaccaagcagaaacatcagtgaactcacagagaagagtcggatcgagaaagcgaggacaccaatgaggacgaggatcaggactgataaaacgttgccgaaagcattcctcatcgcagtcggcgttcccggcagtgggctttctagagccgccattttacgcggcggaaggtgagctctccggctcgatgaatcggattaaagagagtgaggaactactatctccggcaaaggtcgaagggtttttggagacgcgaaaactactatctccggcaaaacaatctctcacgggaattacatgtttgagctgcggtaactagtaaacaaacgactgacccagccttcgtggaattaacacatgtcatgtgttcattcgctacaagtcatcttaagctatatgcggttgtcttgcgtgatgtaaatatcaatcaaatcaaaccggtgagcgactataaaagagaagttgactttccaaaccgatgaaatatcaggtcaaccaaaacctcaattcaaaataccaccattattataaacattttcggttcaaatcggtttagtataaacatagactacttccattaatattttggtacgtaagataatttaaggtgatactttgcggctaactctctagagaatgtgattgcagaagtgcagatctgtattggtgaaatgacttttttctttttcttttataccactcttgtaccttcttttatacggcaaatttcttcagttcattaacaaaaagtacttctgtcggaaagaaagattagaagcccaaaacttgtaacaagttaccaaaaagtagtaaaatatgtaatatagcaacctttcaatactgaacaatcacatgaaactataaagataaaaaagcaaggggcaaagtcaaaaatatggatcaaagtattcaagttagtgttctcggttgaaacttgaaacaaagacaacttcagactcggggattcccttttacagacacagtccacatactattacagaccaaaaacaagaattggtttacttgcaagggaacactagaatttcaaaaacgttttaataaatatccatgacgagagcgatttaatttgctcatttgcacttctttatgataaacagcagacacatgtatattttgaggaatccgtgttgtacctgatttcctaaattcgatgcccatgcccatgggatgaggaagcagacattcatacaaacagcacgacaaggaatatatccatctctaagcaaataagttagaatcaatttgctccacattcgggaagatttgtctgaccgcagcaacataatcagaagacttggcctgagaggagatggacaacagaaaatgatacacttatattagataacgtttaatggctctcagtaaaataattacttttcacatcttctgagccaaagaaattgataatttatagaagacactgggactcacccaaataaatgaattgacttatgcaaaaaactacaaccaagttgtggtactcaagtttacttaaatgcataagaaactttatagaaaaacccaaggtttcttatgcattatcaatatatacggaaaaaaaaaaatctaaattacgatgcacattgaacaagaccagcaatgggatcactctgtgtaccattaaattgacattccatatcaaaaagcaaaagcaaaaccaaagataggagatcctacgatactgagtgacaagactttgatgaaaagtgactaaagattatgattaaacttacacaagggttattttcgaggtagatagtggtaagcttctctttagatcctgtaacagcttctgtgattgcttccagtgattctatctggttgtcattaagccacaaatcttccaacctataggttaagttaaagtcaggatggagaaaacaaatcaccaaaagacaaaaatcggtctgaagcaagggaaaggtgaaatactttgtgaggttctgaatgtcatcaactgaagtaagcttgttgttcgacacgtccaatacccgtaggttgaccaatgcactcaagccttccattttggagataccattatggctcaaatataactcttcaagagcaacacattcctgggtacataatatttcaagcatcagaagaaataaaaatgctggcatgaggaatgagtatatctgcagaaaggtaaatgaagcacacctcaaatcctttcatagaggtcaatcgattgctctgcaagctaatcttttttatgcatttgagcccacacaggttaacaactttgatacggtttcttccgagccatagttcttctaattttgtgaagttttccagattttccatcacctgaaacctcaatgctttcaaattcattgctgaagcactggaaagagaataaaaaaatatcaaagaggagggagggacaaacccgcaatctattagaccccagttcaagaatctgcaagttgtgtaagtgttcaatctccataatcttgttaacttcatttttagacacatagagttccttcagtgtgctagaggccttggatattccttccaaagaagtgatttcattgaaagatatgtcgtaaaccaaaagcttcgtgaatatgctgacatctggtacttttgctagcttgttatctctgagaactaactcctgcataaattatagcaagaaacactcttctttatccactgcccacaaataactatgcctctcagactatcaatgccaattttcaattctagtgaaaatcaaaagtgaaatgcaaaaggcaattagccaaaatcataacgttccacggccaaaaacaaaatcagatgcctagatatttcaccatttacaaaatcactcaaaagataaatcagagagtcgagaatcacctcgagatcggacaaggcgtcccagtgagacaacggttcgacggcggaatcatcaattaggttttggcggagagaaagcttcttaagcgtggagagctgagcgatcctcgagtccaatcccgacaaacggttcgccgtaaggtccagctcaatcaggttcggcggtaactcgaccgtatcgagactgtggagctgatagctagtgagatcgagaacattattcgaatcgccgatctcttccaatggctcgtcttccttctcactgttcatgatttttttggttcaagctcgcgcgatgacgacaacgagctttgtggggaactggtctaaactctaaagcgaagttctcttaaacttaaacgtcaacgtttcaggcacacttgtaacattgttgcctgtagggttgttatggtgggcctgaaaacctatgaataggcccaacatcaagtcgaattagaacaaaattatgagtcaatatttacaaaggtagagtcaactttgtagctattcattactcacacaacaaacaagcacattgggtctaaactttcaccatcagcactccatagtaacatcatctacgctttgcttggaacactctgttataccaaatagaatgcaaaaccatatgaaacagatcatatttctcaggtttagcatgccacagaaagtgcctttgcgcctttctcaccgccatttgcatcttcacgtatttgtcttctggtattgataacaagatatctttcaacctcgggatgtctttctccgcaacaatgaccgagaacgcactccaatcaagaacctcgaagaaaggtggcacaaagttgtcggagatgatcacagggacacactcatagaaaatcgattcaaccaccctcgggctgttgacttcgtaccctttaggacaaatgcagtacttgctgcttttcatctgctcgatgtaattcatcttgctcgccacaccaaatggcattcgcccgaagattttcatgtccgggtctttgtctttccaatgctgtagcagaatctgacgtaagtaaccgtgcatgcttccagcatagaaagccagggtccgcctctgagacggcggttttccacccaaatcacgaagcggatttttggcggctctgacatatgtttcagggagtgagatgtctcttccaatcttaaagcctgcggttacgtctgcattgcataaagctttaatgcaatgctccatgtggtgcctagtctcatatggtgcctgttagtgaagccaaattcaacatagaaaattgttacctatagaaaaaatgattagttaactttaaaaaatgaaacagatgcctacccaatcatgacaagcaacaagaaaatgatcggctccatcggttctattgaagaaagggtacttggaactgatgtgctccgtatattccttaagaaactggcgtaggttagtgcggttgtgagaattacgcacataaagtgtgtattctagcatccgtgcactaaatggcatatagtacaagtgagcctttcttgggtcctttacagtgtactgcttgtttccttccatcaacttcatgaaccatccctctgatgcatacaatcccttgagtatcggagtatgaaagatggggcggttcccttccttatatacgtaaactttgagtatccgttccataagttcgtaactcctgaggcacataactgaatcggatatgtcaagattaccttttataagaagacactaccaaacagaacgaatttgtgaactaaacatataatatgaactcaggctttcttttcctttttactctcttcacagtactaagttccgaacagaaaattatctcaacataggaccatatgatgcggattttacagtaggagtagtgctaaagtttcatccacataggactaatgatactactgaggattcatcaattcgtgtatataccattactctttttcattaccagcaaatttaattcagaattagctctaagttctgcacttttaccttttaaacatggaaacattacggaatattggagggtagagctcccgttcaagttttgcaaccggagcattctctatctccttccttgcagtcaatatctcctcatctctcctcgaagaccaacgcggtcgctacattggaagtagtatatctcttaattgcatcataactaaagttccacaggtgaaaagaaaatagaaatgacagctgcacacataccattgctcgtgaagttctacggtgccttgctaatatccgattcatctcatctattgttgtcacagattttggtggaagatcacaccgcattttcttcttcttacttactttcttagaaacaagcaaggaactatttccagatgcaggactagcaatggaggagcccccacttaaaatagagcttttgacgttcttctgactttgaaccgtcacattttgcacctgataaccattattactcgttgaaacactctccttttgcattacagtagtctctgaaggaaaaagattatcactgcttccagcaacttctttgatgatgatactgtctttcacatcttcaaagctctcaaaatcaacatttccaacaaacccttcatcatcctcagactcattccttagaccaaaacctgaaacatacccatttttctccaagacatgaatccccgagactgcagaatcctcagaaacgttaaccgcaagtgtgtttcgtgatggagtcatcaacaacgcattgttctcattgggaagtttcagtcttctaccatcaggcaacagatatcttaaggcgtcaccatatgaaagtaataacaagatatgagtaagagccacaatcccaactaaaatagcccatttcctctttccacttcgtgactgttttcggagctcagatctaacctccatgacagaaggaactatacagattcaaacccacaaaaccttcaagttcaagtatttaacaacaagcttcaaaaactaatcctgccgacacattcacgagaacaaaaaaaaaagctggaaagacataaattccaacgatcttgatcttaaattggaaatcggaaacattcgttgctcaattcagagtaaatttgaaactcttgaagtggaaaagacatgaagatgcaccaacggtagaatcttcaaaacaactccgacccaagtgaagaagtgtctgtactgtatttttggtgttggtctcttctctttgacgacctttgactaatttggcgacgataaaactgaaaaagaaagtaaaaaaagcaaaccgaaccaaaattcatagatctgaacaataaaccgaattgttgaaaagattataccgaacttaagaaccggttgcttaagctaaaccaacaagccggttcaaaagtcgctccaccatcagagtatgttcatcagaggtcagaaaatcaaattagttacataggagtgaagcaaatttcccccggcgacgacatggacgtatgtgaatgaatctcgctatcaaacccctaattcaaccatcgccatgaaggtgctcggagaagcttcttcatatccttacagatcctgtatcatcgtcgtatttctctccgtttctctcttctggctccgtcccagcacttaccatccccagcaacaaaatctcaatccagagaacgtaactcgtttggagtctgagaatgaaacgaagactaactatataatccgatttaagcagtataagccggcgaaagatcatcgaatttacctcgaatcgaaggtccgatccggtggttggggttggatcgagaggattaacccagcgacgaagtatccgactgacttcggtgttctatggatcgaggaaagcgggaaagaggccgtggttggagagattgagaggctggagatggtgaaagacgtgaacgttgagtttaagtaccagagagttttgcttggaggatcttttcccgacgggaagaaacgtccggggaagatcttcacttctatgtctttcgaagaaggaactgagtcctctcctatggccgatacaagtaacaccacgttaaactggagtcgacatcttctcgctcaggtgagaaattgtgaagtaacatagtcaatatctgtttttctctgctcactatcgatctatgtgctaatttttggtatcgtaaactgtaagtgaggtctttaataagttacatttgttttctaatttgcagaagactcaagtcacgtccatgtttggagcagatcatctctggaagaagggttacaccggcgctaaagttaaaatggctatatttgatactggaataagagctgatcaccctcattttcgtaagatcaaggtatcactttttggagaaactgataaaccatagtatttctcaaagatttctgagaagtgtgaagtgtttaaattactagttttcttttatctacttgccttgttaagctctgaagctggtattgacggagtaactttcaggagcgtacgaattggacaaatgaggacactttgaatgacaacctgggtcatgggacatttgttgctggtgttattgctggtcgaaatccagaatgtcttggttttgcctcagacacggaaatctatgcttttcgagtgttcacagatgcccaggtaatgcatgatcacacaacagatacttcttctcatgcgggataaggtttaacattccttcaactaaactaaatccactcatggtccagtaaattctgtttctgtttccctaattacacttgctaagatactgatattggttacacagtgatctttattttgtcctcgagacactgtaattgagcgctataaatctgtgtgccttccttttctctttcccagatacgcaagttgtcttaatcaaataggttatgataagtttgcgctcagcttgttgcaggtatcatacacctcatggtttcttgatgctttcaattatgctatagcaacagatatggatgtattaaatttgagcattgggggaccggattacttggatctgccttttgtagagaaggtaattgttccttaatctcttggttggagtttacttatcctgttgagtcgagtggtggggatgtttctctctagcatatatgaacagtcgtgtgttccagaggcactgattttcttctaacaggtttgggaaataacagccagcaatatcattatggtgtctgcaattggaaatgatgggccactttacggaacgttaaataatccagctgaccagagtgatgtaataggtgtcggaggtattgacaatgatgatcacatagcttcattctcatctcgtggcatgagcacctgggaacttcctcatgggtactgtatttccttgctgcttctacattcccttttacaaaccctacaatcgtaaagatacaaaatagcttgttttcttgcaattcctaacttcaaagttttgcttacagatatggccgtgtgaaaccagttgtggttgcatatggccgcgacattatggggtccaagatcagcactggttgtaaaagcctgtctggaacaagtgtggctagtcctgttgttgctggtattgtttgcctacttgtaagtgttattcctgaagctagaaggaaggatctgctcaatccagcaagcatgaagcaggcattggtcgaaggtgctgctaagctttcaggtcctaatatgtatgaacagggtgctggaagagttgatctgtaagttacttatccatattggttatcaccattgtactctttatttttattttaatcctagttcctttatttttgtagtctctaatttttcgactctttgtcagattagaatcatatgaaattctaaagagctaccacccccgggcaagcattttcccgagcattcttgattataatgattgtccatattcctggcccttttgtcgtcagccgctatatgccggggctatgcccatcattttcaacacgacaattcttaatggtatgggtgtcattggctatattgaaagtccaccaacatggcaccctgcaaacgaggaaggaaatcttctgagcattcactttaagtacccggatgttatatggccgtggactggttatctagctctacacatgcagatcaaggaagaaggtgcacagttcacaggtgaaatagagggtaatgtaactgtgaaagtctatagcccaccagcctctggagaaagtgggcctagaaggagtacttgttctcttcagttgaaactgaaagtgattcccactccaccacgagcgaaacgtattttgtgggatcaatttcacagcattaaatatcctcctggttatattccaagagactctttggatgtccgcaatgacatacttgattggcatggtgatcacctgcatacaaactttcacatcatgtacaacatgttacgtgatgctgggtactatatcgagactcttggttcgccccttacatgttttgatgctcagcaatatggaacccttttgatggttgaccttgaagatgattactttccagaagaaattgaaaaactcagagatgacgttatcaatactggactgggtctggttgtgtttgctgagtggtataatgtcgataccatggtgaagatgagattcttcgatgataacacacgcagttggtggactccagtcactggaggtgcaaatatcccagcacttaataaccttcttgcatcatttgggattgcgtttggggacaaaattctgaatggggatttcagtattgacggtgagcagagtcgatatgcttctggcacaaacatagtccggtttcctgctgaaaggaaattgcacacttttcctttattagacagctctgagagtggcgctacccaaaatctaaagctaagta

SEQ ID NO: 38311 - DNA, 3413 bp, Arabidopsis thaliana landsberg
acgtccttattactatttcagacaccacacgtaaataaacttcgataaatgcatatctaacaacacattacgacagaagacggagaatgccaacaaaactgatcatgtactattctaaatactcaatcataagaatagatccttctagctcaaacttgacctagctactttatatctacaactatttatatagttataaaccacaaagagaattgaaaagaaaaaatagaagctgagagaagacaacatgaaggtgagtactattactatacatcccaatttccaagtctaatcaaaatattcttttctttttgatgattaatgagctaaaattgtacttagtctctcataaactaatcattcatgttaacgaactctctctctatctgtgtcttgcagctgctaagttggatgcgaacgataaagcctaatggcttagactcatcaaagaagttcaaaggtataagtattgtatattgatcccttaaataacctatcttcgtcttcatacaatgtcatacatatatgttagtatcggtgtgcattgaataatgagcatacactctctaaactttgatcatcataattcaaaaatcaatctatctttcaggtggtttatgtagtctaagagctcaggttttctctgatgtccaagacatccgcacaaactccttttccttctacggacacactcatgacccgaatccatccaaagttgaacaggatcttcggtttgatgaagacgaattttgcggatttctggccatcgggacgcttggtacagaccctgagacaccaaagttctcagctatggttgcagaagaagatgcaaccggagaaatcaaggagatggccaagctcattgctaagaaactagaccagtttcttaaggaatatcctgaggatactagaagtaagcgggtaaaaatatcgaatgaatgtcctctacaagattatgatctctttcgatcatccattgagcttaccaagggaagcaatggaagagtaaagaagaaaaagagtttacttacgagtctcttcaagaggagacaaacagtacaaggagaaccttacatagagaaacatagcacaagagatgcgattaaaagggtatttaaaaagcttcatggagcttcttcaaagacaagaaatgatgatgaagatgattctatgtccaagaagaagaaagatctcaaaaaggtttagtcttctttagcttaaagcattttcaaatcttacccaaagagattggtctgaagaattctgaatgttaatatggtttctgttttggctatagaatgttcaaacctgccgacgtaaagtccaccctgttctctgtacaactgcaattccacaagacgataacgagatagatgacagaagaaaagtggatctcaaggtccctagtcttactggagggttcctcggtgcaagttccatctccgaagcgaacaggaaacgagaaaactggatcaagaccgacacagagtgtaagtcaagatacacaaagaacactttgtttttacacaaagaaaactggatcaagagttttcttatcatttgcttgctttctgcagatcttgttctggagctgtgaagatatattctcactgcaacaaacctctattgatgttccaagcaaagctctctcctatcaaatccatatataatacacaaaaatcagtatctattaatgtgtagtcaaagggttatgtactctagtttaaggcaatgtaaaagaagctcatgtatgaaaagtattgtacccaaatttaaatagcattcgaagtagcacctattcatgatttggccacaagtgttaaccgctaataaccgtcatatctctgctccaaaccaatcactgatgaaactaaaaagattagaacattttgaaaagatgcatagagaaataggtactatatactgaatgcttattcgaccggattcaatcggataacaaaaaaccgaaaccaaaccttcattgggtccactattattcaaggctctacagtaacaaacaaaaaggcaaaccaaactactaagaaaacaattagggagtgggcacatttcttgatatatcatctttatgcagtaatctactttatatcaaatcctttaacaaaaagcaaacaacaccaaggagcatagaagcaattgattgaacaatcataaaagagaaagaagaagataagttcacaaaagcaaagccaataaagaaacacaaatgcctttcctcgtaatctatcactaaacttagtatcttaacttcatataccttctccttagccaccaagaaaagccaaaaagactcgtcactcacattcttctacataactcttcacttgtctccatcttcttctgcaaaagaacaacactcacacaaccatacttaatacaaaacaataagaagaaaggagatcaaaaccattatatatgagcacggattggggacctgtgattgtagcggtgtctctattcatcctactctcaccaggactactattccagcttcccgcaagaacgagagtggttgaattcggaaacatgaccacaagcggtatagccattttggttcacgcatttatatacttctgtatactaacaatcttggtgattgctatacaaattcacatccatttctaatctctgctctttatatcatgtaaggataatgtaaccaacaaaagaaggcatttttatgtacaaatctctataaatctttctaaatgtctcctcttctttagcttcattgttcgctattgctaataaagttttgatctttaactaaattcaagcaaataaagacatatactaaaggaagcaaaattgatacatttgagtaacaatacatcacaatacaacacagccgtttagaccaaatctgtttgttacaacacatgagaacaaaagctctaattttacagagtttcttctagttgtagacccattttcaaaaagggtacctttatttataacgacaacgaaagagagagagagaagagatacagaggagatcagattcagccagtgtagatgtggagattgagggcgaggattaaaatggtgtaaatggcgaagaagatgagagtgtgaacagcgatggctttgccgttggttttgaggccaccgaaatctacggtgcggttgttaccaggtaatgagaagagaagtcccggtgagagaatcacgaacaggaccacgccgacgagaactggagcccaatccgccattgaagtagaaaaaaggttacaactttagaaagcggtggagacgagaagaaactagaaaaaaaaaaaaagaggaaagtttttggtaatggctctgttttttctttgatatacatatatttggtgcttaaggaaaaattaaactaatattgtgtgataattaattaatgggttccttaacttaga

SEQ ID NO: 38312 - DNA, 10323 bp, Arabidopsis thaliana landsberg
  unsure (1)..(10323): unsure at all n locations
atgttttatggagcttattggactagccccggttccaccaacatttttgatttctgaaaaacatatcaaaacgaacaaaatgaaacttggtggcagacacaaaatgagacggcacaagaacatgggagtaacaagatgcaatgttatattttcaactttcaagttacctgtatgatatcggcattagcctttgcaactccggaggcaactgttcctattccagtttctgcaactagcttgactgacacttttgccttggggttgacctgattataattttttgttaagagggagcccagattctaaagttggcaatatatttacagccaaagtaaaatacctgatggagatcaaagatcaactgtgccagatcctctatggaataaatatcatgatgtggaggtggagaaataagcggaactcctggtttagaatttctaagtctagcaatatatgcgctgacttttttcccaggaagttggccaccttcacctggcttcgccccttgagcaactttaatttccaactggtccgcattaaccaaaaacgtcggagtgacaccaaaacgccctgaggcaacctatgataatataaaaggtcattttgaaaactggaaatcattagaaaagtacaaattgataatgtctatgaagaaaacaaaagaattcccaataacttccttagagtaagcaagactgtacacatgaaaatatgaaatgtccacaagtcaagttgacttccagtacctgcttaatagcacttgtagccgtatccccatttcgaagacctttaagatgtggcagagttgaagaatacccatcaacaacatctgttagcggcttccagcggatcggatcctagcaagatagacggtgaatctttagctaggtaaatgcgttttgaagttgaacaagatctgaactagacaatgaacaactacctcgcctccttcccctgagttggattttcctcctaatctgttcattgcaatagcaattgtctcatgagtttctcttgagattgctccaagagacattccacctgtacaaaaccgttccacgatagaggaagcaggctcaaccttcccaacagggatagggttacggtcacttttgaactcaagaagatcgcggaaaacctacaacaagaatatacaaagaatcatattcacttgttccagaaaacagacaatcagatttgaagatgagattatagcactcaccgtaataggacggttggctaaatgctgctgatagactgcataggctgtctcactcttttcgcggacggctttatgaagtaatttagacatttctgggttgtttccatgatattcacctttcatataacaaaatatactaaattagagataatactggaaagctttatagggataatgaatggtagcaatttaatccactaaaaggacagtaaaatagtgtagaggaaatgtgtctgtgcatatgcaacatttatgtaagaaaataaacacttcaaaagctctacttaactagacatagttgtacgtatgatacacgttttttttgtaggcaggagagtatgtatttgtgcatagacatgcaaggtcattaccaaatgcatttccagtccagaaaagtacctccaggcctaaactgaatgaaaccgaagttctctagccgtttggctgtatcctcagaaaatgccctcacccagaaagttaacgtcttcctagccagctgcaaaatatagcacttacgagttagaggcccatagcatcgttttgtaatataaactattttgcattcgaagaacatataatatgagaagcattcaacattagactttaactcagacttttatcagaacctttgacatgcaggtattcacaaacaatttagggagaaaagtacagttactgccttaatttttttttcactgatttaaactaaagcaattccaagaagataaaaagaaaaacaattccaaacatataaacctataacagaagccaaaaagtacacacatttttgagaatgtgtgcatatattatatgctgctttaaggttataacatatatagatgaaactagcatctaaactgacgtccagaaccttaatatcaaagaggtatttagttaatagctgaaaaattgctccaataacatatttgtactcaaacaaggcaactagtcgagtatcttagtatgaaaaactttgggggatattcttacctcatctaaagttaatccaccaatttgagatgcactaccacggaacgaaaattccacaacctcatttcccaatccataaatttcaaatatttgtgctccacaataactgaaaagagagagctcaggtgttaaatcggaagtaaacagatacagtgataaggtcgaaaaacgaaatagatagttcagaaactgaacctagagaataacgagatgcccatcttagagagaaccttaagaagaccagtgttaacagcctgcggaagcaattcaaagaatcttaggatgtctttcttccaatacggataaagacagtagcagtgttacaatagggaaatattacaatctgtttagcaaacactataggcatgcaagaaagagatcgaacggcttatcaacactcaaaaaattcttgtcaacgttagaaccattaatatgtcctgaccttgcggtaattcttctgagcctgttccatagttacagtaggcatttttccgtttctcatcatgttcacggtcttgttgctcagacgccactgtctacacgtctccagtgctaggtgcgggcatatagcactgaaattggttatggacatagatccgtatcattttctatagatgcaatgtataacagttgaggaaaacagtctcatatcattacctaaatttaaaattaagaatgtaggtgtattataaactacataaaataaacatgagtctattatagagagtgctattatttggcatgaagaaccgcaagagacaataaacaacatacaaattccacatgacttgctttggtacgataagaaacagcctaacaaaatgaaagattcaatgaaaaaagtcgataccttgctccatatccaatcaaacaggcaaagtgatgtgtactaaagcactgagctgtatctgcaattatcgaagctgacatccgaagaccgttctggatcagatgttggtgaacagcacccacagccaacaacattggaattgcaggtcgagttggttcctgaaaaaggataggctgctgaatcaggaatagacagtgaagttacaaagtatgtaaagatagatagaaaagaaaatatcatccaagtgagacacaaaaacacaagcaaaatgagcttcaatttaagggaaaatttacaataactcaaggaaactggaaagtagcagcgcatacaaagacttacagcgagaatacataatagtgcaccattgtaacgatgccaccaatagcactttattataaagaaaccaactatgccaccagttcactaaaaagaaaccaacaatttatggcaattatattttcacattttaactttcttttcctcaacagttccaatctttgcatgagaaaagacaataatgttgttagtccagaatgagagcctagagcatagttgttagtagaccaaaacgtagatgtaaaaggaggacactgtaaaaggtgataatcatacatctacatattatatagttaaaatcacaattgaaagcatacacttggaaactggtatgtaccggattatcagatctgtctgagagaacaagtacttgggaaccattacgaacagcttcatctgcagcttcacaaagttttagaagacccttcttcaaagatccttcaattcctctacgaatgtcaaaaaatgtgggcaagatttgagattttaacagtggatcaccaagcaaaccctcaagctcccgttcatttagcacaggaccagacaaaacaacctgcttatgaaatcacaagtcttgataaatacaaaatcttgcaaaagccaaataattctaagccagtacaaaatttaggcactccgacctgtgaaacattctgaggcccaacctccaatatatttccacgctttccaatattaacttcaagggacatgactaatccttcccggagagggtcaatagctggatttgtaacctgtaagtacaccatgtgaagaaccacaaggggaatcatttcaaggacagttcattaatttctataaatcatgtaatcagttaacctagatcaaaggaaacaaccagttcaaatcgtgcccttctaatgaggtgaacaaacctgagcaaaccgctgcttgaaataatcataaagcatatgtggcttttgagacaatactgccactggagtatcatcccccatgcaaaacgttggttcttttccttgtgcagccatcgactcaattaccatttgaacatcttcactcgagtagccaaacgccctagtccatcaaagtaagatacatcatagccaaaattagtgtcttgatcgggaaaaagcaatcatcgtcaaaaatgcaaaccattgaattctactggtgaaaaccattgataaactttgtagtttgaaataatcaacttatttaccctcacaccagatgtatgtcaagtatacaagaagataataacagttaagaaaagttaagtgttttcataaatcaccatatgatttgcatgtagcagatgatggaagcatagaacaagagaaacaaaaaggcttactgttggcgtcttaaggtctcatcagtctccaggatcgctgacgagagataattagaaggcttcaggtttcgcaggttttcactaacccactttccatatgggttatatgatgcaacccgcttcttcacttctgtgttctcatatacctgaaaatatacatattactaatgggatgcaacataaacaaaaattatttgtcagtgttaacaaataaagagaataatcgaccatgatctggtgcaccaacctgtccattctctaagtcaacagatatcatcataccaggtcctagacgacccttcatggtgactttcgattcatccattggaagaactccgacctgtataaaggcatgacttaacaattcttctgagccacgatataaacaagattggtaacagatccccttctatccaaaccaattctctcgctttacaaagtattaactcggtttccatatgtcacacaaaacgatcaccatgaaactatcttatacttggtcattttctcccaaaaatcagttcgtataactttgtcacactaaatcaaaaaagaaaaacgaaaaaacctccaaagtgattaaacgaattggtttttctaacctgtcaggaccaagccttaagattcaagcataagccaaatcatctgctggcaacaattaccaccatgcttagatgataaagagcacatacataggggtaaaagacaaaacgcacctcagaggctacatagacaacattatcacttgtccgccaatatctagctggtcgaagtccattgcggacaaggcaagctccaacagtctttccatcactgcaccaaacaaaaggtgacgatgttttggaatgtgcgagcagacgaaagatatgcaacagacttgctagcaaaactagctatcactttgagcgacaaattatcaacagggtcatttgctctctcgtcgtccacaactatggataccaccaaaaaaagagcaggaaagctctgagtgatcaagacttacgagccttctagaacagttgtaaattctcattattcttagttaagtatttatggaggaataagggcaactgaaagcttaaaccttacgcacataattaaaattctcaagggtagaaaatctccaagcaaattacctgaacaataccaaagcaggtccatcccagggctccatctgccccttgtaatagtcatagaagtctacagcctacagttggaaagaagataagggaagcacttgcaagatgcaaacatccataaagactaaaaaggcaaacacaaagcaatacctcagggtatttaatcattaaagtcgggtgatttttatacgcctctgggacaagaatcataagagattcctctggagtccggccacttcttatcaatagctgcacacaccacaataacataaaacacattgaattcttgcagaaaaaaaaagaagactataacttagggtcttgaggttattctgaagagtgtataaatgtatgtacttgcaagatgtattgcttttttcatgaaatgctcgttacatgtctgagaagtttatttttctggtcaacagaaagacaagtattatgtatgcagaataggactattgcttagttccaaacgcaagaaacacttatgtgcctcttcaattttcctccaaaaggaaataccacaaagagcatcagaacagaaaaaatacaagttaggaggttagatgactcgtacctccgccgcactgtcaaggttagcagagtctgaagcctttggattgctaattggacgaatgtcattttcacgtccatgccagacaggtgatcttagagatgcttctcgagacgtcatccagtttaggttcccctgcaacacttttccggtttcagtgaaaaggacctagcttagtctaagtttcaacaaaccaaatgaccagaagagaagcataacctgtatggtattgatctccccattgtgcccaagaaacctcatgggctgagcaagatgccatctgggactagtatttgtgctaaatcttcgatgatagatggcgaaaggagatttataaagatcattttgaaggtcggggtaaaataacccaagaacttcagaacgaagcattcccttgtaaacaatggtctgattggacaaggagctaaagtagagctcagaggcccaactttcagaagcaactgctctttcgatcagcttcatgcaaatgtaaagttctcgttcaacgtcgtctactttatcgtctttgacaattctaacaaagacctgttccgtgtttggcatcgtctgttttgcattatggccaacaatggacgcttccacaggaacatctctccatccaagcacctccaggccctctttctcaaaaatacttgtaatcactgaagagaagtttcaaacattgacttagcaaggaaaatattacatgttatatacatcggaaaaattatagcttggagtggtatgcatacaactattctatgttcacctttcttggcttctttcctaatgttgtcatctctcggtaggaacagcattccaacacccgtatgcgtcctatcaaaagaagcgattccttgcttctcagcccattcgttaaatagatcccaaggaatggaagtcatcaaaccagaaccatcaccagaagtattatcagaaccacaacctcccctgtgttccatacaaccaagtgctataagagcatcatttacaatcttatgtgtagccttattctccaagtttgcaataaacccaacaccacatgctcccctttccgatattatatcttccaaataagccacctgcgacgatgcaaaacaaaattaaaaccccgcaaaataaaaacaaacgtccataactaaacctcttgcaaatgaaaatttttaagtatacccaatatatacacaccagaactaaaagtgcaaaagtcaaaacctagatcaacagcagataaagatgcaagcttttatctgattgcagagaaccacgattacctgaggtttcagatcagaaaaggaagacgatgcatcaccacggctcggtcagaattaaggatcgctttcaccgaaaacggagacctcagcgaggacttgagcagtggactgtagccgcgaaagccggagagttcgttacgccgtttggttccttagaaatcagtaggatccgcgagtcaacagagaagatagtcttagtagagcttaatttcgcggaagagagaagccgggaaacggaagatgaagctccggtagctctcggagactgtagagccatggaatgaagctnctgagaagaaacgccgagagagaaagcgatcgatcggatttcgaagtttaatctctctgcgactgttgtagttttattttcaaaaagtcaaaatggaagcagagatttatccactgcggtgaagtgtacggtgcaccggaatcgtagagaaaacccaaccggtgatgttttctcagtctcagatcacggcacgagctaagagtgatcagtgagcacgactacgcaggactctctaatcgccgtcgcttatttggttgttgttgtaaagttgatgaaagtgctagttttattagctttcttttgtcttcaaacgcgatcgcgattttctaagatttagcggtgcgtttggtgacgcatgtctttatttacagattgtactttagaacaattgaatgaatatagactacaaatctaatgttgaataagtagttaatatgtaaataaatggcaagtgcttggctcaatttcaagaatacgtaatcaatttaaaataattaaatagcgtttgaagagtcgcaaatttaattttgtaaggggacaaatggcagaagagaacaaagagattctctatacgtttaccacataaagcgacaacaacagcgagtgttaaccttagaacaattattggaatcttttactcttatttctttattgaagaaaacaaaagatatcatcatcacctacgtaactaacattgcccaaagttgtctatcttttataaagttttgcttcatgtctttattcagtatctaattacctgaccaagaaactttccaccttttagagaaataaaaactctagtttctttcaagaatctcttttgtttttgaacgaatctttttgttggtgcatcaaatattctttgttcccaatttagaatatacaatcacatttgtaaattctataaactttaaaccacttcaattttttatgtagttgtcgatgaagtatttttagtggaaaagtatctgtaaaagaaattatgcaacttgttttcttttatgttaactacgtcacattgacaacactatactgcaaatgtatagttaaaatataaaatgaatcaaccaccacgataattaaaatcatttcatttacaagaatttccagacaagaaaatcttaatcatattatgaaaggttacataaaaagtatacaagaaaaaagaatattcattgctatggcttttagctgattacaaagcttgatacaaaatctataaattgaaacaaacgaacaaacgaaatgggattcgtcgaacttcatatttgcaaggtagcctatttgcagagctcttacttgggaatcaagaaatctaaaaacgccagagacaacttgagaccatctcaattgtcatctgtgaagaccttgaagataaagtcacggaaacgcctagagtattgtctcggatcaaccgcagatatagaggaaggatcatactgtatgctcttgtaagcgtgttcaagcttcttgctgatatcataatcctgaagaatgtcaattataccaaatatcatcaccacttcgtagaactctcctgtaggctctcccacaagctgcagctcgctgtcgttttttctcatcgttctctctgcacgtgctggcatgtttgtccccaatctaatacttgcccacctgcaagaacacaaccatattcaaaatccatgtttctgtgtttcggttttgagttttgaaagtgttgttaattgatatcttatgttgtgttaccttgagggatctgaaagaagctcatcaacctctgctctagaaagacgagggcctgattcttcttctgattcacctgtagataaacaaacaattactttgtttctgtgaatgatacatttttgctgatgggaaaagtagtttttagattggacaaaagcgaaccaatgggcgttcgagctccagaaggaatcagctctccagcgacagaagcttctctgaagtgaatcccaactagaagactgtaatccatgattctctcctgttctagaaactcgcagtctttatcgatttgcctgtgatgtaaacaatgaaccatgagaaatgaaacaagcacaaacaaactatggatagagtaaagtataatggtttttacctgatgaattcttggtaccatgctttctgcaatctgaaaatgaaattcaggtcgaggtcttttaagatcgtgtttgaatcgatttctgattcaggtttgtcagttgtacgcccaaaagaagctccttttagatcaaagagactgtgaacagagaacttagaacaaaacagattacccataatgacgaatcggacctgcattatatcaaa

SEQ ID NO: 38313 - DNA, 3424 bp, Arabidopsis thaliana landsberg
aaaggatcaatggataaccacatggcttctcatttatcatttatcctaataaatcttaattaactctttaatgtcaccacaatctattaattcataagtgcaacttggcttaattacataacttatcttctaaattggagcccatagactctttactataatgttgcccacaagtagtgatatatagtagttgttaataaaataccctcttttgtcttttctcgtttttatattctattgatacaccaaaacatcactaactctagtcttaactggatataaataacaagatatacataaacaaattttttattagtaacattcaaagtctaggcgaaaattaaagtttatagctgtaacatgaacttcataataatcagtttatacttaatagcataactaatcgatcattgacttcgaccaaaaaaacgaaacaactcgactacaacgctttgtcaagaatgttagattttgaagagaaaaaggacgacataacataactataaagaaacaagaccaaattctcatatatatgagtttccacattcctcatacaagtacaacatcctctgacttaactcttcgcaattcagcttgtaattttcaatcttctccacttgtaaatgcaaagtgtagaaaagcctttctccttgagaccttgaagatgacatgtccacaagaacaaacctatcttcttctaacccacttaaaacattagatatcgaaaagttatgaatcttggacgatgagatttggaccatcacttcgttgtcaccaagcctagtcgcagaaacggtcgagatataattcgcgacggcctttggtggctgcttaacgtaacattcagtgtttatttgacctgaaatttgcaccaagagctcttccttcttttttattagcttcttcacttgctcttgcagctctggtatgtacttcaagcttcgagaaaccgtcgcaggaatgcttagcttcttctgcaagaaaggaaagaaaaaaggtttaacgcagtattcttcttctaaattgtatagatgcataaactataacaggtctaatcaatgagtcggagtagcttcttaccgattggccagaggcaggaagacatgaacggagagatgagaacaaagagttaattttcctgcgacggtcacgctcactagcattgtgattaagcttcttgacgaccaccggattgttgtctatttcatttccctccgacgaaacagaaacaccaaagctattctgatgttgagtcaccgctgtaacagctccataagtctcctccggtcccggaaaatcaagaaacccgccgttgttgaggatatctccggcgaggtagtagctgtcgtactctcccgttgatggccacccaaagtttggaaacaatggaggtactaatgcacacatttttgcttactaaggacaagtattgtagattctgttttctctagatgcttggaagctgctttggttaggattgttctgaacttaggtagaatattattgtccaacgtatatataatgcggatatatacaattcaatatatcaatctctatggttaagtataaattaacaaactatactattatacaaccaaaactttaaaaattcgcaaactatattataagtgttatacgacttgtactataaagaagaatgtttggatctgaggacgtaggtcgacacatgccaaagcctatgtcccacgggtgaacaaggtctagtcacaagtagactggctatataaaaaattaaagaagaatattacatgtattaagtattagagtttacatattgagagatgactcagcctgaagcaattgtggaagacgcgtgtaaatcagattcaggcgtcttcctcgtcccatacattttttatgttgtaagcatatacataagcattttcatgttgtaagcatatacataagcattttatttatttgttgacctcccaaaaaaaaaaaccagaagcatcttctttaattactttattaaatcaatgttagctttgttaatttagctattaacaaccctcggtcggtgatttatcatgcggattgataaatcattatcgaactagggtcaactttaggtcatcctctttccaatcaattacctttagcctcaagtaagcaaattctgttgtgctgattgaagaccaggtcaaaaatattccaaaattgtatatgtgatcaattaagtttcaagattctcaatagtaggtgacacatttttcaaatctaataaagcccctgaaaagctacatttatcattgccggcctcttccacgcccaccaccacggccaccttttccccgggaaccgccgcctcctctccctctaaaaccaccacctcctctacctctgaaaccgcctctaatatttgttgatttcagtccaagagactgaactcctctcctcttgtttctttgcccatcttcatcctcatcgtctctatcttctttgtactttgatgaccctctcgccttgaaagaaaactcccgagatcctccaggaccgaatttgatatctttcgagcctccaaagttgccacgccggttctctatagccttgacacgctcgcccataggaagactatcttctttagccagtgaagtgcggttgtgataagctgcggcatgccgctcatctttcacttcatacaacctgacaccaaatcatccacatcagaaaacaaaagaatcaagatagaatgtgtcaaatgtacatcctgggatgcagtcaaaagacactgaccacagcgctctcgctttcttgctcgcccttgatgcctttccatcgtcggcctcgtcatctgaaggctgtgatgcatcagaatcactgttctcgtcatcatctgatacagcttcaaagtgttcatctaacagagaaggttgcttcttcgaagaagcaacagggtgtaggacaccatattcatatgagtccttatcaatttggaagtcctgaaaaccaaaaggagattcccaagaataggtttgatacgatgtgaaatagagcaataaaaagatcaaacaaaaaaagttgaaaagaatatgttaataccggattttggaacatcgaaccaaaccgaccatctacgaaatgctcgtcagtaagtatgggtttcttctttttcagcactttcttggtggcctccccatcctcggcagttttattttcctcctctgattcgtccccatgaagccttgctgcaaggtctcggttaacctttggcaaccgtctctttttctgaaggaagcacaagagaaacagatgtgtatgtaagtagccggtaaacaaacaaatggtgaacgtatagctgctaaggttttaaatactaactgtgattctctgcgtacgctgctcttctaacttctcttgcttcctacgttctaagtaatcatcaaatgcaaaaggttcaatc

SEQ ID NO: 38314 - DNA, 3411 bp, Arabidopsis thaliana landsberg
aacaatgcagacgagaaaaaaggccgtggggttgatgtaactctaatcagacaacattattgcgtgaagaaaacaaataaattatacaagcagagatcttctcgaagagctagtgtgaataccaaccaaccagtagctagctctatgaagaatcaatgacctgaatcaggcaagtaaattatgccaaacgcatgtatgtttgagtctttttaagctgcgtttgcttcaccattgagatcttgaaagaaagatttgactgtttcataagtggaccagcaaatcgcagctgctggagcatggaagagcattcttggtagccatcctctagcaagtcctctataaccgtctttcttcactattgtacggaacacatcgcttattgaactgctcttgaaacggtcacaaccacacacaccctgaaacatcaccacaaacaaacttctcagaacaaacaaaacaacccaaatcctatgaaatagctattgaccaagtattctaaaccacaaatatagaaacattatctatgcgactttcacatgtaaattcagtaatattaagttttatgaccatagttctaacaatgcttgatgcaatctacatgttacctataaaatcatactcgtgaaatcacaaaatatccaaagagaagaaagaagatatctttcttcattcaagtgatctataggatcaagagacaactacttaaagtagcttggccaatctataaccacattagctatcagatacttaaaagtcagtagctttagagatatttcaatcacctgacattgcaactgcgtcttaacaacatcaagcggagtagttacagcagccgctaacccaccagccgcagctccagcagtagcataaatcaaccaaccttcctcatcctctactccaacagcatgctcaggcaacatctccatcaatcccttcttagcagcctcgtaagtggcaaagtgaacagccgtaaacggcgcgttcatcagaaccgtcgtcctataagaagcataaaacgcaccaatcccttcctcacgcaaaaccctcttaacacaatcccagactcctttataagtcccttcacccatctgcaacctctgcttcaccatatccatgggagtgaaaacagcatcgcttgatatagtagcgaatacgccggacatcgcatgcgcgacggaattgttctgatccccggcggataaatacttcttcgatacttcatagaatgagaagtaaacggcgtgagcaggtccagcgccgagacccatagcccagatcccgcgatacagagctgaaggtccttccttttggataatcgaacggaaagcttcccggattccgacgggttttaagggacatggtcgaagcgcttgcatatgggtcttgatggtatcgacgggaaacatcgccatgtgttcgacggagccagcaatcgaaccagcaatcataaattgccagaacttaagaccatcgtgagcgatttccggtttgaaatccggtgtctgagaaacctgccggagatcaggttcctggaatttgggtacggtgtagcctccgtagccatttagggattggggcgtagatcgggaggcacttggtactcggcggcggagacaaaatctcgagtaaaagtagggtttttgaggacttgttaagagtaaaaaagacaccaaatcggaatgtgaatcaccgacgaagagagacggtgaagggggaatttggtgtggtggtggactacattatctcatatcatagcttttgtttttatctgtagcttaccaaatcctcctccttgatgtcgtcaaagatttgatctttcttccacaatttttatttcaggtggaaaattcgaaccggaactctattgctataaatttcgagactttaattggttgacctcgttgacacgtcagcaagttgtttttgttttttttgtttttttttgtaaagctgatgatgagaaagtaagagatcatgaacaaagaagttaccaatcggtaaaacaagctcaaatgcagaacaagaacaaaaccatacaacatcattatcgttttatgttttgtaactattcctgttatctttgtttacctccttctcaccactaggaaagtagtcggaaatatacacataaatatatttgattaagagttcttggattagcatctttactgatcaagattacaagcagttttgagctttttactcgttacacatgtacgaggcatgattgacatatatccaaagccgtggctactatttgctatcacccggttcgtcgggaaagctgctcctgaaatgtgctctcgaagatcttgtcagcatttccgacctcaaatccatcacgtcgatgagactcttgtatctgcgttttgtaggtttcagaaatgtcattccacaatgttggtacaccatctttacattagtggtatctaagaggagttctccaggcaatgggaaggaaaagatcgcatcgattcacagtaaccggattctaaataagttaagattcaatcagagtggtttcttacctcgctttcgggtatattttggtactgcggaagtacaaggcgttcagcaaactcaatgtatgaacaagggatagatttggtaacaccatcagcgaacttgaaagatatcgaatctgctacagttgagctttgctgcaaaccaccatcagggctaactgtaaaagtagaaagacaaagattagcttagaatctaatttcttttaaattgagtgataaagattagtaaccatacctttaaggactcctccttctgagttcaatttgatacctttttcttcgaggaactgatttagcttcttgattttgtttagatgagatttaagccgatgaacagaaatcgtgacatggttaagtgcatatccattgacaagggtccatgctgcgtattcactttccctgttaatcaatttaacccaacacaccttaagtcaactactctagcttgatctagcaaaagaaacaaagagacctaggatcatatgtacctagccaattgctcaaactcagaagatagaggcttttcccaagttaaagtacccaaagcactagaaagtccagcatactttttcccattaggtgatgcttccgtgtattttctgattacatcctgaaaacaaaagaaattgccttcaaagctcataacataatctagggtcaaaaccaatgacagtatattattacctgagtctgtgaactcatctggtccactaggagctctgagataaaaactctcggtaaaggaccgttaacgccgctgccaccaggaacagcagaagcattaggaggtgcaaaccacaaagctctaagctttttggccggaaattttagctcatccatcggtgtatatccatagtcaaggaaaaagcttgcaagcgagtcaatc

SEQ ID NO: 38315 - DNA, 7446 bp, Arabidopsis thaliana landsberg
tcatgcatttgattccttatctgtatcaaccatatacaatcaaatataagtctctgttgttaacagatttaagaaaaagaaatgatttttttataaattaatataatgatgcagatcgttgacgaatcgaaaatagtcggtttaggcgtctagcaacttatatggaacaactttttaagcccaagtgaaaaagcccaataacaaacttgaatacagagtatatatatattctagggtgcggtttcttccctcgaagatcgatttccattgaatccgtcttgtacgcttttagatcacgatttgctccgtccctctcttcttctccacgtcacggcgattctcgcggcggtgctattccttatcggttgagatacggtatgtttcttaggtcaattatgctcaattttgattttcccaatgtcatcagaatctgatgctaatgtgttttttttttttgctcgctgcagaaaatgttcaattcgatgaagatactaccactggaggctcctcctgctgacgggaatttaggtccacttcctccgtcgcaattaacggatgaagaaatcaaagagaatgagtttcaaggagagcaaaacaattcaattcaaactcccatagctgtggctactcatacgaatccaatcggaatcatttatccacctccagagatccgaaaaatcgtcgagacaacggctcaatttgtttcgcaaaacggtttggcgtttggaaacaaagttaaaacagagaaagccaataatgctaatttcagctttttgaaaagtgataatccttatcatggcttttaccggtacaaggtcactgagtatagttgtcatattcgtgacggagctcaaggtactgatgtagatgatacagaagatcccaaacttgatgatgagtctgatgcaaaacctgaccttcaggctcaatttagggctcctcgtaagattttagaagcacctgaacctgagaagtatactgttagacttcctgaagggatcatggaggctgagcttgatattattaagcacacggcgcagtttgtggcgcggaatggtcaatcgtttttaagggaattgatgcgtagagaggtgaataattctcagtttcagtttatgaagccaacacatagtatgttcacttttttcacttctttggttgatgcgtattctgaagtattgatgcctcccagagatttgaaagaaaagctgagaaagagtgttgctgatttgacgactgttctcgagcgttgtttgaatcggcttgagtgggatcgtttccaggaggaggagaagaacaaagaagaggatgagaaagagaaggagagagtgcagatggttatgattgattggaaagattttgcagttgttgagtctatagattttgcagacgaggaggataaagatttgccaatgcctatgacacttgaggaggttattaggaggagcaaagtttcagccatggaagaagatgaaattgttgagcctggaaaggaagttgagatggatatggatgaagaagaagttaagcttgttgcagaaggaatgagagcagcgaacctggaagagtatgttggctctgtggagattgaagaagaagcaccaatgagaattgttaagaactggaagaggcctgaagataggtttctgacagagagagattcgagtaaagttgttatatcacggattactggtgagctgattcccattaccgagatgtctgagcacatgaggatttctcttattgatcctaagtttaaagaacagaaggatcggatgtttgctaagattcgtgagacaactctcgcacaagatgatgagattgctaaaaacattgtcgggttggcccgcctccgtcctgatatctttggaacaacagaagaagaagtttcaaatgctgtaaaagcagatattgagaaaaaagatgagcaaccgaaacaagtaatatgggatggtcacactggaagtattggtcgcacagcaaaccaagccttgactcacaactccaatggagagcaaggcgatggcgtttatggtgatcccaatagcttccctggtccagctgcttttcctcctcctcgaccaggtgtcccaactgtccggccactgccaccacctcaaaatctcgccttgaaccttcctcgtcctcctccttctgttcagtaccctggtgcaccaaggccattaggtgttccaatgatgcagcccatgtatcaacaacaccagctctctatgtctgggccacatggacatccttcaatgatgatgagtcgaccaccacaaatgcaacctgttatgcgtgtgccgcctccaccgggatctcagttttctcatatgcaagttcctcaaccttatggtcagcttccaccgctttcgatggggatgatgcaaccaccacctatggctgagatgcctcctcctccaccacccggggaggcaccaccgcctcttcctgaggagccagagccaaaaagacagaagctcgatgagtcagcccttgttccagaagaccagtttcttgctcagcatccggtaatattttcttcgactcttgattcattttcttatcttttatctttcttctttcgtttgagttgtatcttacctgttttacacattttcagggtccggctacaatcagggtttctaagccaaacgagaatgatggacaagtcatggagatcacagtgcagtcgttatccgaaaacgtgggaagtttgaaggagaaaatagctggggaaatgcaaattccagcaaacaaacagaagtaagtggaaaatctggattcttaaaggacaacatgtcgcttgctcattacaatgtgggagcaggagaaatccttacactgtctttgagagaacgtggtgggagaaagagatagagacaactggtggattcagggaaatgccttttaatctcttaattcaaattaggtgttccttaatagatgttttttattggtggccaaagctatatgtactgcctgctctttattctagctcattatatctctactgttactgacttaggtttgttttggatttgcagctagttttggggcaacgctttgctctgtaatcttaaaataacatattggatactttggtttatgcgttcttactactgttaagcatttttagtgaagctttgtttctcttctttgtaggtaccatacgaggatgctgccttgcttgttttctgcgggatcatcattgtcgaaggtacacacgcaattagaatagctaagatgttagttgaaacattgagaaccttgtaggctttaaaagataggttatcttttctggttgtagaaattgtttggttctacgctgatgctgccacctcctgagaccagaagtccttgtctcggctaagtttgtttccaaacacggttagagtagagtatgagaagaggattataaatattatcgtccatagtgctaaaattttaactttttgagatgctcagatcaagtttttgatagagttcctctaaaagatacggttagacttttgtgaagggatattatcaagcttacagtacagtcagtggcgcttaaatgggagatcgttcttcaagagattgatcacgagtagagagattaacaatcgttggttttactttttgaagcaaactcatagattgtttgcatttttcactgatttggttgatgcgtatacgaaattattaatgcctccccaatagtttgcagctgaattggaacagatttgaggaaccgtggttaagctttctgaattccttactcataataataacactgtgcataagctttttagattaggttgtccggttaaaaaacaacaaaattggtttaagttctctgttttgcattttcgtgctttttgttctttggccttttcccccttagcaaacctctttgttcttttaacaagaataatcgattgaccctggccttatcctgaaaatttagatggtttataatgtgacgcaacaaatcatctatatattcttaaatttgtgtttgttcacccaaggtttcaggtgatattccttccacaggttcatttgactttaactcatgaagtctctaggacttttttcgaaagtgtgatctcagaagagcaaatgagttttgcgattgagtcaacgaatagttaaaatgtttggaaattggaacactgttatgatgtagttcaatagcactcccagctttagagtaaaaaaacatgatcatgcgactttgcagagacagcggaaaaaaacagagaaaactttgtcatttaagtacctagttttgttgataaaaaaaaaaaagtacccagtccttccggatccaaaactttcaagcttgtattacagatcggatccaaaactttcaaacttctaccattattcctgtctaatcgaacgaaattccaagcccgttaaaggcccattaaccagctggatacgaagtttggttcataaatcctagggctcaatttaatctgtttcattaaagagagtatcttcttcttcattttccttctactgttagttctatcgactttcatcaaatcgtccgtcttgtaagcaagcttcacatctccaactggttcgtccgccggttcttctcgacgtcgcggcggaactgtttcttcccgactgaggtgcggtgtttctaatccctttctaaaaccctcagctggattcctttgccgtttcctcttttttttttcactgtcgatctctttctctcgcatcttagtttccggattttatccttgtccaatcggaataatcataggactttaacttttatcaaccgatttcagtagatttgatagtttatactttctacagctgagttttaaccaatgaattaggtctaaaagttatcatgaactttgatgtttctggttgcagaaaaatgttcagctcgatgcagatactgccactggaggctcctcctacggatgggaagttaggtccacttcctccgtcgcaattaacagatcaggaagtcgaagagagggagttgcaagcagagcaaaataattcaaatctagctcctccggcggctgttgctactcacacgaggactatcggaatcattcatccacctccagatatcagaactattgttgagaaaacggctcagtttgtctccaaaaacggtttggagtttgaaaagaggattattgttagtaatgaaaagaatgctaagttcaactttttgaagagctcagatccttatcatgccttttaccagcacaagctcactgaataccgtgctcagaataaagacggagctcagggtactgatgattcagatggtactacagatccccaacttgatactggagctgctgatgagtctgaagctggtgatacacaacccgaccttcaggctcaatttaggattccttctaagcctttggaagctccggaacctgagaagtatacagttagacttcctgaagggatcccgggtgaagagcttgatattattaagctcacagcacagtttgtggcacggaatgggaaatcgtttctaacgggattgtcgaatagagagaacaacaatcctcagtttcattttatgaagccaacacacagcatgttcactttttttacttctctggttgatgcgtattcggaagtattaatgcctcccaaagatttgaaagaaaagctgagaaagagtgctgctgatttgacgactgttcttgagcgttgtttgcatcgtttggaatgggatcgttcccaggagcagcagaagaagaaagaagaggatgagaaagagcttgagcgagtgcagatggctatgattgattggcatgattttgtggttgttgagtcgatagattttgcggacgaggaagatgaagagttgccaccgcctatgacacttgacgaggttataaggaggagcaaagcatcagccatggaagaagatgaaattgttgagcctggaaaggaggtcgaaatggaaatggacgaagaagaagttaagcttgttgcagaaggaatgagagcagcaaacctagaagagaatgttaagattgaaaatgtacatgatgaagaagcacctatgagaattgttaagaactggaagaggccagaagacaggatcccaacagagagagatccaactaaagttgttatatcaccaattactggagagctgattcccattaacgagatgtctgagcacatgaggatttctcttattgatcctaagttcaaagaacagaaggatcggatgtttgctaagattcgtgagaccactcttgcacaagatgatgagattgctaaaaacatagtcgggttggcccgcctgcgtcctgatatctttggaacaaccgaagaagaagtctcaaatgctgtaaaagcagagattgagaagaagaaagatgagcagcccaagcaagtgatatgggatggtcacacaggaagtattggtcgcacagcaaaccaagccttgagtcagaacgctaatggagaggagcaaggtgatggcgtttacggagatcccaatagcttccctggtccagctgctcttccacctcctcgaccaggtgtcccaatagtccgaccattgccaccacctcctaatctcgccttgaacctccctcgtcctcccccttctgctcagtaccccggtgcaccaaggccactaggtgttccgatgatgcagcccatgcatcaacaacaccagctcacaatgccagggccaccaggacacccgcagatgatgatgaaccgaccaccacagatgcagcctggtatgcatgtgccacctccaccgggatctcagtttgctcatcatatgcaaattcctagaccttatggtcagcttccaccatctgcaatggggatgatgcaaccaccacctatgcctgggatggctcctcctccaccacccgaggaggctccaccacctcttcctgaggaaccagaggcaaagagacaaaagttcgatgagtcagcccttgttccagaagaccagtttcttgctcagcatccggtaatgtgttcttcagtcttttgaatcattttcttagccattttctttcctctgagttgtatcttacctgttttgtacattttcagggtccggctacaatcagggtttctaagccaaacgagaatgatggacaatttatggagatcacagtgcagtcgttatctgaaaacgtgggaagtttgaaggagaaaatagctggggagattcaaatcccagcaaacaaacagaagttgagtggaaaagcagggttcttaaaggacaacatgtcgcttgcacattacaatgtcggagcaggagaaatcctaacattgtctttgagggaacgtggtgggagaaagagatagagagacagctggtctacgcagggaaatgcttttccctctcccattcttctctagatgtttaaattaatggccaaaactatatgtactactctctcgttcacacatcttact

SEQ ID NO: 38316 - DNA, 8006 bp, Arabidopsis thaliana landsberg
  unsure (1)..(8006): unsure at all n locations
gctcagagaacatcctccgtccgggagaccaagactgtaccaaaacttccgaaaatgcctccgttcaattattttccgccgccttacaacggtccatctacggcagagatcatcgcaaaccggcgagagttcctcagccccgctatttttcacttctacaacacacccgtaaaacgacgttccgatccctatcatttttgttttctagcatagaacgacgacgtttcttagtctgttttctttttaaccgttgatgataacagttaaacattgtggaggcaaagatgcagtatgtgttcgacgagaatggacgtcgatatttagatgcctttggagaaatagcgacggtttcgtgcggccattgccacccggaagtagttaactccgtcgtcaaacagttgaaacttattaaccactccaccatcctttaccttaaccacaccatctccgatttcgctgaagcccttgtctccactcttccgggagatctcaaggtaaataatgatatatcttctttttgagttgtgcaatatagttttttttgtattaaggttattcgatgacttgaccggcaagtcaaatgtacatgtgttatcatgtacgtaggtggtgtttttcacgaattcgggtacggaggcgaatgaacttgcgatgatgatggctagactgtatacaggatgtaacgacatcgtttcgcttaggaactcttatcatggaaacgcagctgctactatgggtgccactgctcagtccaactggaaattcaacgtcgttcaggttcttttccatttcaatctacaccatctgatatagcataattgattttttcttaagatcatagtagatgagtaagacagttaagctgtgttgaccaaacaaaaattagaatggaatcaaagttcaatatgacgtttgaatcgattagcttggactaaatgagtttatatgaagaagagaagaagtaaccaacccaaatttaaatttgacaaggcatcatctctgtaacagagtggagttcatcacgccataaatccagatccttacagaggaatatttggatccgacggtgaaaagtacgcgagtgatgtacacgatcttatccaattcggaacgtccggtcaagtcgccggtttcattggcgaatcaatccaggcgagattaatttgtacttatttcttatatcaaaaaggtatttatgattatgataatgaatatgcatgtaatgtagtctatatcctgtaacagggtgttggaggaatcgtagagcttgctcccggatacttaccggcggcttacgacatcgtgaggaaagccggaggagtttgcatcgccgatgaagtccaatccggttttgctcgtaccggaacccatttctgggggtttcaatcccatggtgttatccctgacatcgtcaccatggccaaggttcatcattatcatgattcatgcatcgttatcaattaatcatcatcaattctaatttggattttgcaggggatcggtaacggtataccacttggagcggttgtgacgacaccggagattgccggcgttttaagccgtcggagttactttaatactttcggcggaaatccaatgtgcacggccgcaggacacgcagtacttagagtcattcacgaagagaagctccaagagaatgctaacctcgttggctcacatcttaaacgtagacttacgctactcaaaaacaaatacgaacgtgagttacttcttgtccaaattaaaatcaattttaaaatttttctttattgaatatcttatcctttctctaatttgtttagtcattggagacgtgagagggagaggattgatgctaggagttgagtttgtcaaagaccgcgacttaaaaactcctgcaaaagcagagacccttcatttaatggatcaaatgaaaggttagttgtgttcaatcctaaaccaagtgaaattgatcactctcatcatataaagttgatacttatgcatttaagatagtgtttaatacaaatcttttggtatcaagaaatgggagtgttggtggggaaaggtggattctatgggaatgtcttcagaatcactcctcctctctgcttcaccctctccgacgctggttagctccttagtttaacatatatatcttcaaattggtttctttttgtttcatttttttattcatgatttatgttgtttcaaatcttgtattttgtagatttcctcgtggatgtgatggatcacgccatgtccaagatgtgatttactatctttatccgttctctaatgatcactcacccttgtatgtgtatataaataacacaatacatcataaagtagaattacaattggtgtttaccgaaatatatcacagatgcaagtatatgtaactaaatgtacagtactgtatacacttgatagaatctacaaataaataaaaaactcgctgctaatgatattccacaaatacatatattgatccgaagtttcgagtttagagtaaaacttgaatgatacacctgtggggcaaaacagttggtcatcaaagacgaggaagtggtagaaatggcggcgccgcggcggagtaggaaaacgatgtccggagagctgtcctgatcgcggaaacgagactcgtcagcacgaatataagttcttcaagtatgcatagtgtctttcttatcatcgaatcttcttgttttctcgatgcgagattcccaagtgagagagagggagttgtgatatttttctgctgacttttagatatatatggcctttgataatgttattcagacaaacaaagtgtcagcttgatgtttgtgtccaaaattgataatataatggaataattgcaaaacggaacctgaagttttgattaacatggaatttgaacccaatattttttccctacaccaaatttttagtttttcggttttcatttttttaccaactacaataaaccctagatgaattcggtttagaagaccagacattgctatgtaagagtagaaaaaccgttggtgtttagattacactaatttaaacgttataacacaaaactgattaaaacataaatatacttatgaagcgtgtgcaatgatgatcccttcatgtaccccgttgtacggaatcctagaggtgattcgaagaatttatggtaactcacgtaccaaagtgtcagctaagtaatttatggttacgaaaatacaattgtctcgtttaaaaaaaaattaatatagtttttaaaaatctaatatcgtttttaaatttaatatcatttctctgttactagtttagtagcttgaatttttgttttcgtaattaaactagactgattttttaaatttagatttagaccgtgattagaacaaaagtgagttttaagttgcattttaatcaaagaatcagattgaatttgcgattaactcctcagttaattagtcgatccattgatggtgttctttgaatttgtttctcaatgatgcatacaaaatttcaatttccacatttaaacataaattaatttttaaattatagatatttagtatacctctcaatcttataatattagtatttaataacattgcattaaagttagtaattaattagagtggatttttgatctgaagagggtaaaactaaaaacggaaaggagaaaaagaatgaaagagaagtggaaagaaaacgcaaatgcattgaagactttccctttgtctctctctttgacaaaatcccaattttcgcatcctcactttctcctctgccttttttttttctcttctgccgccaccaccaccaccactgttaattcgccgccgcttccacatcaatcgccgtcgtagccaatcatcatcgttcttcatcctccgcttctcctgattcttagggtttccgcttccgcttctctgtcgagggtttttcgagctggattctctgctcctgcgccgctggtgcagcggctttgttgattgatctggatttctccgtcttcctttctattttattttctgtatctcgcccaatccaaacaaaaaagctagggctgaggatttgatttgcgtgatttctgggggtgtgttaattcgggggtgtgttctccgatttggatggcattaggagacttaatggtgtctcggttctcgcaatcttctgtttctttggtctccaatcaccgttacgacgaagactgtgtctctagtcacgatgacggtgattcccggaggaaggattctgaggctaagagcagtagtagctacgggaatggtacaacggagggagccgccaccgccaccagcatggcttacttgcctcagactattgtgctctgcgagcttagacacgacgcatccgaggcttctgctcccttggggacttctgagatcgtattggtccccaaatggcggcttaaagaacgagtaagttttcaatcgaacattgttggtagctgcaagtatgttagactagcttgtttagtgcaactgacgatgtaagaggcgggtagaacaactacattttctagaattcattataaaatctgctattgttcgctactatgttaggtaatgttaaccgaggagggttgtgtacttgtgttaacgtttttattgtggagctgaaccttaaagatacatgtttccgtttcgtttcaatctcaatgtctcttcagaaataattctatttctcgtcggaagctaaatcaggtgttcattggatctgatagctaggggagttcttgcaagtctcatattctttgttaacttttcttcttcttctttgcagatgaaaacaggatgtgtagctttagttctgtgtttaaacattactgttgatccgccggatgttataaagatatctccttgtgctagaatcgaggcatggataggttgaaactttggcctactcaatcctattacactctttcttttctgtgtttatcccttttttttgtcgccacagtcaattttatctctattttttttctttctgatggcagatccattttctatggcaccgcctaaagctctcgagacaattggaaaaaatttgagcactcagtatgagagatggcaacccagggtgacaatttttttccctgcaccctatcattattgttttgttaagttacgcttttcttatttattttatgatttctcaggcccgctataaggttcagcttgatccgacagtagatgaggtgaggaagctgtgcttgacttgtcggaaatatgcaaagaccgagagagttctattccattataatgggcatggtgtgccaaaacctacagctaatggtgaaatttgggtatttaacaaggtctgttttttactagcgttttcttttctctaccatgttcttgttccttctcgtctgttaccacgagctgattgattctctgtttgagcagagttatacacagtatattcccttgccaatcagtgaacttgattcctggttgaagacaccctccatctatgttttcgactgctctgctgctaggatgattctgaatgcctttgctgaggtaaaggaaacaaccacttcacttatagaacacatctcctgtcgagtttaggactcgagtctgtaattttcgttccataagttgataaaattcatatactctttacgccagcttcatgattggggttcttctggttcctctggatcctcaagggactgcattctacttgctgcttgtgatgtacatgagacacttcctcagagcgttgagtttccagctgatgtttttacgtcttgcctgacaacgcccattaaaatggcgttgaaatggtaaatcatcattccatctctgactttttttgcgtactcagatgtcatgttttcttcctacaaaatgtagtttaagttccgtctagctaagtttataaaatcttagctagtatgttctcgcttcatcatgaggtaagatcaaaacttttcggcagcatttcggatgggaccaaagatggatcatagagttttgtttagaagaccttgtgcatatgttttagttttgtggggtggtaaaacagcatatcataagagttgtgagataaccaggactgataatacctttagctgccaagtcactttgcatatggaagtttgctgatgtatggtttgcaataattctttctgtcctggctaagtatttttgatgataccaaaagattcacgatatcatcctgattgatagccttctccttctgtgatatttattctataactaattgctactgagtctgtgcggtttcaattctgggcttctttttaacctttttccagtaaacagatcaccattttatgtagttcagtttagcttgcagctttttcacaagaggatttcattgcaggttctgcaggcgttcgcttctgaaagaaattatcgatgaatcacttatcgacaggattccaggccggcaaaacgatcgtaagacattgttaggggagttgaactggattttcacagcagtgacggatacaattgcttggaatgtgcttcctcatggtacttctccaaactttctgcataatttatcaagggtaaatcttcttcaagttgacttcttttctgtgtcctcatgaatgatagttttaccctgcagaacttttccagagattattcagacaggacttgttggtcgctagccttttccggaatttcttacttgctgagagaataatgcggcccgcaaactgtaatccaatatctcaccctatgctgcctcctacgcatcaacatcatatgtggtattcaacaagaaccatattcttctgttatgtaaaatgttatgtgtctagattttgactcagctatccgttgcatgcttttcagggatgcatgggacatggctgctgaaatctgtctttctcagcttccccaacttgttctggacccaagcacagagttccaggtttgttttgttttgtatagtttcctgcaattgtataagacggcgcttgttttgcttataaaacgtgttcctatcctttttctagccaagtccgttttttactgagcaactgacagcttttgaggtgtggcttgatcatggatctgagcataagaagccaccggagcagttacctattgttcttcaggtgcctagatttctgtacttattttcccttttgctgagagagagagggagagagagattcatattcatttgccattttctcactctgggttttgtgtggatatggcttaggaacattctttggcttccttcaggacgttctatcataattttgtttgcatattgccattttagcgtatttatagaatctggtttgtttcaggtgttacttagccagtgccatcggtttcgtgctcttgtacttcttggaagatttcttgatatgggttcatgggctgtggatctggtatacttctttaaattttaatttctctctccctttggcttacacagagtttctcctttttatcatgtatatgtctttacacgtgaagtgaacattcttctaggccttgtctgttggaatattcccatatgtgctgaagcttctgcaaacaacaacgaatgagctaagacagatcctggttttcatatggacaaaaattcttgcacttgacaaggtacacgcagtttcgtatgtctctgcttgttcgtttcttgttatacctctgctacttccttttggggatgcattattaacgtgactctgttttcttcatgatgagaaagaccaagataaatgttgttcatataattattcctaagataaattctaaatgccataaaaattggnnnnnnnnnnnnnnnnnnnnnnttgctcctaatctgtggacattgggacatgttccttatctttgtcgttgttctattgtgctactcgttttcattctttgaattttgctaacgtttgagagatttttttttttttttatataggcctgtcaagttgatcttgtgaaggaccggggccacatatataacattaaaattttagatagttttgatgcattcccagaacaacgtgctgtgtttgggtt

SEQ ID NO: 38317 - DNA, 2502 bp, Arabidopsis thaliana landsberg
  unsure (1)..(2502): unsure at all n locations
attcccttaagttatatgaatcatagggaaatatatttttagtaactatcggggcttctgcaaagattgtgcatggtaccatgcgtccatgccaatacagttaaagtttacataatacaaatttttacgtatttctatatatcatatatgacttacagattatcatagcttaatatagccagtattgccaactttccattcgtacctagaacttataagaagattggaaaggatattaaaattgaaaaagacgtaggttggccatgtatcttaagatagttaaacgatatcagcaatctatcaataatcaatctatcgtaacaaatatttttgtcataaatgtatttgtagatttttttttttatacttttagatggttaaatgttcaagaaatctaaccaaatggtggaatggttccgtttgatcgtgctctcatggtacaaacaatgagaccccccaaaaaaaaaaaaacccccgaggatgaaattaaaacaaataacacagcttgaacaaaacatcaaaaacagaggatcatcacagtaaatattaatacttgaacaaaacatcaaaaagataggatcatcacagtaaatattaatatgcataaagaagagaatcaccacagtgaaaaccctaatcattttatattcctacgtgtcaaattatgaatggtcataatcagagtagagaaaaagaatgtcgatgaaagaaaaagtttgacttgttaagtcccaactgtcaatttcccagcaagacacatatcttcttttacatcacattacatctacacataaatgctttattgcaaaaatagcgatataaaaaaagaatatacaaaaacctagtatttattttctagattctttactgttgtatatatagaagttgctcgagtggtcatttttacaataaagcaatctgctcaaaagagtaaagaaagagagaaaaagagagtgatagagagagagagaaaaatagattatggatcctgaaggtttcacgagtggcttattccggtggaacccaacgagagcattggttcaagcaccacctccggttccacctccgctgcagcaacagccggtgacaccgcagacggctgcttttgggatgcgacttggtggtttagagggactattcggtccatacggtatacgtttctacacggcggcgaagatagcggagttaggttttacggcgagcacgcttgtgggtatgaaggacgaggagcttgaagagatgatgaatagtctctctcatatctttcgttgggagcttcttgttggtgaacggtacggtnnnnnnnnnnnnnnnnnnnnnnaacggagacgattgcaagaagaggaggaagaggaatcttctagacgccgtcatttgctactctccgccgctggtgattccggtactcatcacgctcttgatgctctctcccaagaaggtacaataattatgaatacatatagaaatatcaaatatcgcacgttttataaatatgtgtatatattgttctcaacatttctatgcccgactttcaagaaaaagtatgtatatgttcacgtgactaatatagataactaatttatgaatcttaccatatgtatagtagttgctacataattttatgtttaagctttttttttggttaaatatattggttaagcttttgttacataatacaagataatatatgtcatatttaatttatatgttggatatatttacttgtatgatattgatttagagctactgtgtgcatagagtatgcagtcatagtctgatatttattaaatagacctagtgcaagaagtacgaggattaatgtcatgcacaggtattcaatgagtatctacgcctacgcttgaatgattacctgtggttgtgacaatttatatgtagatgattggacagggttatctgaggaaccggtgcagcaacaagaccagactgatgcggcggggaataacggcggaggaggaagtggttactgggacgcaggtcaaggaaagatgaagaagcaacagcagcagagacggagaaagaaaccaatgctgacgtcagtggaaaccgacgaagacgtcaacgaaggtgaggatgacgacgggatggataacggcaacggaggtagtggtttggggacagagagacagagggagcatccgtttatcgtaacggagcctggggaagtggcacgtggcaaaaagaacggcttagattatctgttccacttgtacgaacaatgccgtgagttccttcttcaggtccagacaattgctaaagaccgtggcgaaaaatgccccaccaaggtatcttttgatttatcttctaagaactaatcctgaccgttcattatcttgaaatttatgtttcaaacaaaagtttaaaaaatggtgtcggaagttatggggtatggtaggggaactatagctataatcatggacagctgttctaaaagcaagtttgacaaaatacgaattctcagggttttaaaatttttattttttt

SEQ ID NO: 38318 - DNA, 1967 bp, Arabidopsis thaliana landsberg
agaatagctagaggaattttctcgttcctaataatgcagagtattttgtaattagttggagttttgttctaagaattagatgctctgtttcgagtaaattagtataagaaaacatccctttcactaccctacttgtaatttttctctcggcagaagattgcatcattcatcaataacatattttataaccttgatttatcagactgctattttctcaaaaggtacttatcaaactactatggtaaaaaatatgtatggtttctataaccaccactagcattattaaactacgagatatcattaagttaccataaaactaatgaaagaaatgataaaaaattccacactttgatatttttttaaaaggtttaatatgattgaccaaaacgtttaataattttgaatggacatgttacccttattaacagcctaacgatgctcacattttaataagatacgactcaatacaaaaagcttcacggatcgaaaccatgacagacgaagtgatccttctcggtttctggccgagcatgttcggaatgaggacgatgatcgcgttagaggagaaaggagtgaagtatgagtatagagaagaggatgttatcaataaaaagagtcccttgctactagagatgaatccgattcacaagacaatcccggttctcatccacaatggtaaaccggttaacgaatctatcatccaggttcagtacattgacgaggtctggtctgacaagaaccctatccttccttctgatccttacctgagagctcaagctaggttctgggctgatttcattgacaagaaggtatcttatttcctttgtgcccttgattgaataatgttgaaattgaacttgggatttcataaaaattgaaactttagttgagtttgctagtgattggctcaaatttagggttttgcttgtagactcgtctttgagcttgtatgggtttgtctgatgttattatattacttgagtttgtagttgttagggttagagatctcacctccaaatttcagatttttcttgtggactcatctctgagctagtcagggtttgtcttcttagatagtttaatgttatgttacttgtgcaatttgaggtttttacatactagtttcgctagtagatatcatctttgagctttgtttgggttcatcttagatagtttgatgatatgtttcttttgcaatttgggggtctctaggactggttttgctttgtagacatcatctttgagctttgtttgggttcgactgagttctgacatagcttggtgttatgttactctgtgcaatgtttcagctgtatgatgctcagaggaaggtgtgggcgacaaagggtgaggaacaagaggcagggaagaaggatttcattgagatactcaaaactcttgaatctgagcttggagacaaaccttactttagtggcgatgactttggctatgtagacattgcgttgattggattctacacatggtttccagcatacgagaagtttgctaacttcagcatcgaatctgaggttccgaaactgattgcttgggttaagaagtgtctgcagagggagagcgtggctaagtccttgcctgatcctgagaaggttactgaattcgtctctgagctcacgaagaaatttgtacctgagtaaatatgtttctcttgtcatatggttcggacttaagatgctctctgttttactttcgtgtggtgtctttcttaaataatgcagagcatctgtgaggtggtttgagtgtagagaatgtatgtctttgctgcagcagattcctgtgttttctcgcatcaatggcttgccctagatgatacgcattgacactatgagtctaattaatgatcgctcatctatgatgattataaattagctattttgatatgtgcttactccaatacgactctattccctgaccaagcttatcacgccaatgttgctgagcaagacaat

SEQ ID NO: 38319 - DNA, 3666 bp, Arabidopsis thaliana landsberg
  unsure (1)..(3666): unsure at all n locations
acaatgcattagttgcttttgtttctttggttgagatatctttaaaatcttattctggtttgcaggataaatgtgacagcttcttccggatcaaggttggagatcaatggatgtggcctttccgacctcgtgggattctaaagttcctgagccggaactcatggttttgttcatggaacacttttgctggcaaacacaattacattagagacattggttgtacggttgggaagttttcatagatcaagatttgaatagcagtttcaaatcgctctaacgctttctcacagcaatgaggtctcaattctgctcaagtgaagcagtgttaaaatcatgtaaccatcggttttgggtgtaggatccatttgtatactagtggggaaattgcttcagcttcaccgaatttaagctctattagtgagtagatatggtcctcacatactatcctgctcagtatgtcttcttgtattctcgttattatttcttttgatgtggtcaacttctaaggaaccctaaccctaaaaaatacttgtaaagtatttgataatttttcaaaaaaattatggcaccttaaaaattatttgaaaacttgaatatagttagctgttttaatattccttgatttttattttttcttctaattattccactgataaatactacaataaatcaataattagccccacgacacatattgcaacacacgggatttttttgaaatccgattggccatggaagaggaacaccacgctaccgttgctgtaggaaaccctagccaccgttttgatcgtcctctaatcagacgatcaagtgattcaatcagcaatctacccgacgaaattcttcaccatatcctctcctttattcccgagaccaatttagtgatcagaacctcggtcttgtcgaaacgatggagacatgtatggtgtgatacaccttctctttcatttaatgattacagactggaggctccatttatagacgaaaccctaactcgctatacagcttccaagatgatgcgttttcacctccataccagcttgatcaacaatgttccccacttagaaagttggatcaagttcgccatgtcccgtaacgtggatcatctgtccctggatctctggaatcaagttgccaataagtttaagtttcctgatttcttccacatcaattcatctctcaagcaactcactgttgtgttagacttttctgatacgatgattgccatatgctcctccgtgtcttggacatccttgaagaagttttccttgagttattgtgggttacctgatgaatctgctaagattttatctggttgtccgattctcgaatgtttaacattgtatacactgcagaaaactcaatgttcttgatctcaccaaatcgctgcgcttgagaacattagaaataaacagcgacattagaatgccagggccaatgcagattgtggcaccacagatccattgtctcaaattgagaaacactcaattaccatgtactttagttgatgtctcatcactgaaggaagctaacttaacatttgcattgactcattttctaaaaccatcaaggctgactttcttcaagtcacgctgttaaagatgttggaaaagttgcccacgtgaagaagctactttgggtgaaaactttcttcaggtaaatgattagttattattattttcctttaggttaggaatgtttaatctatggtatatgcatggtctgaaatacagcgttatctttctgttagatgttatctactgacgagcttcgtggtgtcccttttccgatgtttaaggttaagtctttgactcttgacacagtcatctttcagtatgtgattcctggtatagaaagagtgttacaaaactcacctgatttaaagaagctaacattactcacaaaggatttctaccataaaccggtatattttactaccatatatataaacctcttttattttccatgattaccttttttgtcatccaagaaccatgttttttttttctgttgtgcagggtgagtatcttggcgaccacatggatttgcaaggctttaatctcgatcaatgttggaaatcaaaatatggtgtcttttggaacaagtcatgtttggatgtagagtcagagcacgttgtttcattcgtggaacttatgcttaaaaacacaaaggcattagacaagatggtcgtactgttggaagaccattacgttaggtttaaagaggtggttccaagactttctcacaactataatatctccattgccctctacaccttcaagccgcaaagttagattagaggtgaatatgatcattgagtcttattgagcattttaccccaagttagattcttgattttgattttgatgaaaaccagctgtataaccggtgaaaaccagcgttgattatgtccaagatagtattaaaagaagagatagtagttagttagttttttttgtgtaagtcacaagttcttacgaaattagagagggaaaaattattgaaatgtgtgttgctattaaccttttggatgtaatctctctatcagattgttaatttactaattcttttgaaccctgatattggaaatttacatctagttctagctctagctcaaaaacgatgtaaattaagctctaatttttttcagtcggtaagttttcaattatagaataacatgtcagtcagtattttgtttttgttatgccgataacatttcaattttggtgtggaatgtgtagttctacttgacatgataacgaacgaagcctcaagcctgtatatacgagataaaatcgaagtagatagatcactggatggatccagatcatgttggggaaaagagacattaaagaggttgtagattgtttgtatatccgaggttgtcgttgcatgaaaagagacatataagtgaagacaagaaatcttgaaaatctctagttcagtccaaaggtttgaggagagtttgaacattatgaaattgcttctacacgtgggcctacttataaaccggaaatgtcaatggaaccggtttgtttgatggacattcattatatacaaaattgactggtcatgttagtccattttattaaatgttggatttaattttgtacctaaataagcatttatatatatatatacatatatataagtgaaagggtttcttgagctaatggatacaaaatctacacaatacggttcggtttgattcaatagccaacactatttgatttttctaaaccaacgataaaatcggtctactgaaattactaccgagtttatcagttcaacatctttcggtcggaacgtatgttgcttgacctaataaagcaaatagactttggttcggttaagttcggttaaataaagaaaaagcagattctgagctttgtttgtgagattcagtttccaatatcagagaatctctgtgtcgcctgaagtgataacattctcattattcacccaaggagagagatcggagctaaaaagccatctctcgccggaaaatttctcagttttcttattaccttagccacagacaacaagacgacagaggaatctaatcttagcccnctttcctctctggctctctctatatctctggctttaggccttgagatatcttcaacacgaagccttttgcttcttttttttatctctttaaaa

SEQ ID NO: 38320 - DNA, 4756 bp, Arabidopsis thaliana landsberg
tatattcattactcttcaaattttcttttttggtgtttttgttattaaatattagaaaaaatcatttccaactttaaagtaatattttcttggtcaatatttcgtgttgtactaggctggtgtcaacaagctcgcagacttgggcccaaagcaaaccgttgttcttaacactgagagcaaataaatcatctagatgtattagccatatgtgaaagtgtgattcttgggggtataattgagaagatactcttatttgaaaaataaaatgcgtgactgttatattcattactcttcaaattttcttttttggtgtttttgttattaaatattagaaaaaatcatttccaactttaaagtaatattttcttggtcaatatttcgtgttgtactaggctggtgtcaacaagctcgcagacttgggcccaaaggcgaaaccgttgttcttaacactgagagcaaataaatcatctagatgtattagccatatgatttgccaaactcatactcatctaaaataataataaaatcagatgaatttaaatgcagatgattcttacaaaaattgtaattgtctaaaatatactcaattactctcatactttaaatgatgtagtaaaacctgtataaattaataattaaattctgtggttgttaacatatataaactcattgttcatattttaagaaattatccatatagatatcaacgatttcctagtttccgtccataccatcctagctccgtgactcaagctccgatactcctgtcactgtggatccgacacgaatcgatatctttctcgtgcaagttgcaactaactcattttataggagtttcacacaaaattaatggtcatatctacaaaggtttatagagtattaacaaaaacataacattttaattggatgtgtcatccctgtccaatcagccttttaggttttgaatccttggaaacagaggagaaatggacaagcaaagaatatactaaattttcagattgaaagcaaaatctagaagagaattaagaaaagactcaacagagtcatgtccgacccagaaaccaaaggaaaatgaagttctgtgtaagttaaaacgaaaccaaacccaaccctgattgtatctttcactacttgttcatcttcccgccgtatgcagggatctttagacgcgttatacataatagaatcaacagttcctggtttctcatcattggtttttccttcccagacctgttaaagatatatgggtgcatttcaatactagagagtagagaggacaaatgtaaatgcatctgcttatatctatggaattaaccgttttcttctcttgcctgcttctgggattgttgctgcttagctttcttctccaaaatagtcttttgtcgagcctcgtagaacgagaaatcatccaaaatgcatgtcttgctgttatgctccttgaaaatctttacaaccttcaaaccctgctccaacttaacctacatacatgatcacatggaaagagtttgaacattgaaaagtggaaaatattgctggtagatcagaaacatatagatcgagaagatataaacaaatacctcttgtgtgtctctactgttagtaacaggtttattctcattgtactctagagtaatatgcttaagcaaactgttgggaacatccttcagaatatgccacttgaggggaaatgagccagtccatttatcctgttgccagtactcaatagttttgttgaaatcaactggtcctttcatttccgcaaggccaataaattgtccactcgcgttgacctggagacaattggggtatatactcagcatcgggaaacaaaacgaatacacaatatgaaataaactaagaattaggtacaaaccgagaagaagagaaacacagggcagccactagatttctgctgagcctcttgatatgcagcatcaagcttcttgtttccatttggggtgctagcccatacattatatttgatactcttatgcacatcatcttcgctgtacgacttgatgataaagaacttagcatctttatactcaactggaaaatcgtctctgttgcactcttctctatctggaagaacgcatgttacagtctcctcagtatttgattcatcaaacgtctgctttttcacctcctctgagctaacctcttctgtggccttcgtgcccttggctctagggcccctgtttagttcattcaagccatcaatgttctcatttccatagaagtaactgttaccccttccccggcttctatatttgttgtctgtattgagccatcctctttcgtttgttcttgaaccatatccagaagaaccataacccataccagacctcaccgtgctaccatactgaccatatgacttgtttggagacactctgtcgtagtaaccctgagctgcataacctgtcatggatgcaggctggtacatactctgccaagaatagaatgaggctatcagatacagggattcagatagagaagaagacttatcatacaaaactgacttccatatcataccgtgtaatgcgaattggagctagagttttgattcctagtcgcaggtacattgttgttagccttagaatatgaggatgcaactccactgccagaaacagacctctgcacatctgagaagttagagccatcgtgccatgacacaggagtgtaaaacccatcatagctatacctggggtcctgataaccagcagcaagaccacctccaagagcactgtttccatacagtgcactctgattcaatggtttaacaggagctgatccattcattcctttagggataccagcagatgcagagttggctgctttgtttgtagagagcttgctctgagtagaggcaggaacagacgaagcgaaaggcccactactggctgtgagaggaaaaggatactggtactgctgagcaccatacaactgtccatcaccaccaagttgtggagcagggcttgttgctggtgagtaaggaaaggcagcatacccgtatccctgcggataaacaagagatgcattctctccgtaagctccctggagtgattaccaaatgactaagtagggcaaaaggtaaaagagaggctaaatagtctggacacgagttgtttataagaaaatattaacgcacgtactgatgtcatatcaacactctcggaattggtataacctgtgtagtcactcccataacctgaaagattatacaaacggttgtgttatagatattacaataattctagacagtagaaggctgaagatatataaatgaaacttaattatcaccataatagtagggctgctgatacacattaggaacatagaaaacagaaggatccaaggcatcactgggtagcataggtgacaaagatcgatcaaaagaaggaacttgaccattagaatccatagctccatactggtaaacacccgtctgcaaagataatgatgctatgagaactctgcttggagtaacaaaatgtgcagagacattaaaagatgtaactttaccttcttagtaggctcagggatctccaaagtcctagactttgaatctaaagacagtttcttcaatacatcagcagcttctgaaaaaacaatgtaagtgaaggaaacaaataggtttctatcttcagcaagactaaaaaattgatttttctaatcaatttattcactttgctagctacaggaacagtcaaattcatcgagctaaaacaaacagaacaaatggaaatgacatcatttcactatatgaatcgaattacgatgaagcaactagattcatgaacgtagatcacaaaagaaatgaaggagaaaagaaacaaaggcaaaggatacgatcagcaggaggagcaacagtagacatgagaacagagttggcagcgaagactgataatagatccttgtcggatattgaacaataagagtttgagacaaacacaaatatcagagcaaaaaagaactcagaaggaatctagggtttaagagattgaatcgtagccgcaagagaagagagaagaagaggaagaggcaaaagtggttttgttcgttcacctcgatttgattcaaatacctccaagatcccttttttatatttttctattatttttgtttacctttttctccatcgtttttttttaaaaatacttcctttattccagccacattaatattatactagtcactacgaaatatctcacaaaataatactataaatattatttcctcgaaaatttcgcaattaatcgggaaaaaatcaatttttaaaataaatatcactgattccaattccactgttaggaattaaggagcaagaataaaggcccaaataggcccaatataaatctgatccaggatccgaagagttgaatccaacggccaagattaactcaaagcttgaaagaggtaagggaacgttaaaagcaccttccaagcgagagtaaggagataaacctacttcctttccttgcttcagctccccttttcttatccggaaaccaaaactgccggtgataaaacctccttcgtcatctctctacttctgttagtttcttaatccttactcttggaatagtttatcctctgcattttttagtgccacagtttatgtgtgtatgttttgtttggataagaatttgttgtaagcttttgaaaacttgtattagttcaatacttccataattttgggtgttttgtaataaaatttatggattagtgtttcttcagattgtcaattgtgttctta

SEQ ID NO: 38321 - DNA, 4902 bp, Arabidopsis thaliana landsberg
ttgcagagaaaagactaagtatctcaatgttgagcatgatcagaaaaagtagctccttaatctgtaaacgtgatttaggatctctaacacgtccacaattcctaaattaaacaataacacatctaaaatctaaggacattcttcattcatcagctcgaaatcaaaatcaaagcagcgaatttctacgttctaagagtcagttaccgaattacattcaggttgatcacaaatgcacttactatgacgaagtaagcagcgactaagaggaaaccagcagagccataagctctccaagttaaagtaccaagcaaaaacgcggcggcgatcccagaagcggacaatccggtaacaagaagcggtgaaccgagaacaaaaatcaataaattgttagccacagctgatttccaagttggtgacgccgattgaatcagtttcatcgcctccgtcatcactccttccatcgatgcagccgccgccgtagcaccgtcggctctacttcccgacgaaagcattccgttggaaagtggttccagattacgtcgtccaaatctgtaagatctagcgaatggagaggaagaagaaaatcccgagaattttgggaatcttagtggtaaagctgatctagaagaatttaagagtagagttgacgaaatcgttgccatgacttagcttgcttccgaagaagacctttctctcctattgagaaaaaaaaaaaaaaaacagtatttcgggttgaatccggagctccgaaaaaaacccggatccttaacccgttttgtgtttatttttcggtcgtattcatcagattatttacggtgttgccactactactatttactgagaacccaatcttatccgagaaatcggaaagagcagaagaaatttgcagaagaaatttgcagaagagagaaaaacaaaaatggcggttctttgctcgtcttcgacggtgatactctcttcttcttccgtgaaatcctccggaagtgagagaaagtctccgtttttagggttctctttaacggctatctcgaagccgtcggtacgagtcggcatttatgcgaattcgaaaagaggattgcaagtgaagtgtgaagctgagccgacgacgacgacttctcttgttccggcgaatcaacgatggatgttcgacgaagaagaagctaatggccctgtaacgataatttttctatctccctctgtgtttagcatctacgcatttataaagtgtcgcactttagctcttgctttgaatttgaagtatggcttgtttttttcttctcccaattgcgatttattaagtagtggattttgcctttgactcattagctgtgttgtctgcatcaattggcttcgaaaattgatgtttattcttctgaatttgttaacttggacgttttatgaaattattaatgtttggttggagagaagttaaaagtctttggcttgaaacctttattgagtgtattctatggtttacaggacatctggaacacgacatggtatccaaaagcttcagaccatgtgaacacggacaagccctggtttgtggttgatgcaactgacaaaattcttggtagattggcatcgacaattgctaatcacatccgtgggaagaatcttgcctcttacactcctagtgtcgacatgggagcttttgtgattgtggtatgagtttctttgagctatctgtagagaataagaaatgtgatgtgctgctttagttaatttcttcctgaaggaggagccttgggatttggttttagtaagattcacattagcagcaagatgtagagcctctatgtagatgtttgggcaatgcttgtaacttggtacctctaatactgttttcaattgtttggttaaaggtgaatgctgagaaagttgctgtatctggaaagaagcgtaaccaaaagctgtacaggaggcattcaggacgacctggtggtatgacagtagagacatttgatcaattgcagcagagaattcctgaaagaatcgttgagcatgctgttcgtggaatgcttccaaagggacgggttagatacataatccacagctctttattagtctcctttaagtcttaacacttagcaaatccgtgtttcttcaaacttatggattgaacttggaaactacttgttgcgatattggtattgattgattactagttttccaactccctcttaactttggtctgaccattttgtggcagcttgggagagctctgttcaatcacctgaaggtgtacaaaggccctgaccatcctcacgaggcccagaaaccgcttgatctgcctatcagggacaagagaatacagctgcaaaaatagaagctccaccactgttccattatcgccaagcgcagagagttttttcttctcaggtttctgtagtttctccatcccaaaaccagaggaggctttacagattcttgttttcgcttctatcaactctgttatgctacaaaactttctaatttgaaatatttctcgttatttttttttgctactgaatatcttcttcaacatgaaaaagatgacatgtaatgaatacaaatgccctaagcaacagtagtcaccattaacagaaacttcctcttcaattggtaacaaaccttcccaatgagatcacagatgcaaggaaaatctaatattcatgccttaatcgagtcattacttaaaactgaaatttttaatgctggatccaaaatttgaatgttaaatatacataataataatatgaaataaaaattgaatgtttggaatctctaacgactaatgctggatccaaaatccggttagttttcgtatatcgtaatataaatttagtatcaaaataaatttaaaaacaaacaaacaaacacaaaagatttttaaaatccgacaataaacaaaatcaaaattttaaaaactatttttaaaaatcagaataaaaaacttcgataccaaatctatataaaaatatgaaaacaagttgaatgtttggaatcgataacgaccgaagctggatccaaaatccggttagtttcatatatctttatgtaaatttagtatcaaacaaaacaaaacaaaaaaaaaaaactcttaaaaatgcgaagtaaaaacttgaatatttaatctacataataataggaaaaacaagttgaatgtttggaatcactaacaatcgaagctggatccaaaatccggttagatttcatatatttttttgtaaatttagtatcaaacaaaataaaggaaaaaaatcaaaaaaagtttttaaaatccgaataagaaacttcgataccaaatctatataaagatgatatgaaaacaagttgaatatttggaatcactaacgaccgaagctggatcaaaaatccggttagatttcataccattatgtaaatttagtatcaaacaaaataaaacaaaaaaaaacaaaaaagctttaaaaaatccgaataagaaactttgataccaaatatatataaagatgatatgaaaacaagttgaatatttggaataactaacaatctatgccgggatccaaaatccggctagtttttatttacatctctgtatgtagattcagtttaaaaataaataaaattaaacataaaaaaaatcttttaaaagtaaaaatcttttattacagaaaaagaaaattaggaaagcgcaaaccttggttctcgctggtgatgattatcgatcgatcgatgaaacacaaatttgtcttcttcctccgcagtcgaattgtagttttaaagcctacgaatctgccaactggtcgttaatttcactatccctctcttggccatagtcttccgcgcatccttctccgttgtgtaatcatatccttcgccgccgttgaaagaatccttcggtgaaagcgtttcggaggcgagatctttgatcgtgtgaaattagggagtcacgaactaaaaagtgaactcgattgattgaagattgttgtcacgagagaaggaaagcacatcagtgatcagtctcgcagggaaattgcaagcaaaaattacgtagaactcgccacaagcacaagcccccataaccagttgctctgcttccgtttgtaatgacatggtcaatgtcaatggcttctctagtcggcttactctcactttcgtgtatctcatatttgaaacagacaagctcaccattcaaaagcttgtttagctgaacaacactcaaatgtatcaccgtcgcttactccaactcatataggaacctacctacctaatactagcttctcaatatccaagcaacaatgccggatgatggaggaagaagaagtgagattgatgggaactgtgtagaatcttaggcattgtcacaatggttccttaaattcctctgttttgtgtgtttggatttgagcaagtaacgaaacaagaacaaattatccagtgttctaagggtatagtagtcgtttcacaaaatctaggtgacgtggaagagttcaatccacgaaaaccggtccgagtttcaaattaaaccgaagtaactaaaacgagaaccgaattaatttttagtatcagccaatacattttcgattcagaaattctgatcaagtaaattgcataaaacagagatttgaattctaaatgagacaaaattaaacaaaatatttcaaaaaatcagaccagaacaccacattatccataccaacaaatagaaactattgaaatgataaatattgttttaaaaattctaaaagtgaaaattcgaatactaaaatctatgcaacaatgataaaagaacaagttgaatattaagaactctagagactaatgatggatgcaaaacacagctagtttttaaagatttgaaaagctttttttataataataaataaaaaacatggataataaaatttacataaaaataatataaaaataagttgaatg

SEQ ID NO: 38322 - DNA, 3143 bp, Arabidopsis thaliana landsberg
  unsure (1)..(3143): unsure at all n locations
ctactgaatttacattttacaaatacatgcatttagttcatctctattattttaaaaacaatctagaattacaataaccaactcgatggcaccagacaaacatctctctctatcattttggcatatcaccttcaagatatagtaagccatgacacgttaaaaataaaatttaaaaacaccttacggattgctatataaatcaattggaagccgtcacggcctactcaaatcaacttccgtgtggtaatcagtctcatagctgatcatccgattcaatccaaccacataccagaaaaaacaaagatttcttacaaattaaagattcaagatgctttataaaaaatctacaacataacagnagagtagcgcgggcactcacctagtcactactaaaagaagcatattgaagcttctcaaaccatctacatcagcgttcacaaactttctaaaattatgctacataatcacatcatttaatgacaagcccgttttgttgggctgtggtttgtcgggctgaattgctattaagaagcccatacacactacatcaaaggataacgacagaaccacttacatgtgttttgggctaaatcgatattaagaaacccatgtagacaagataagcactatgatgccacatcagcaaaaaaacctacgtaaatcctgaagccaaatcttctctcttcgccaaaacatttagggaaatttgtaattaaaacctaaatttttttaataatttgaaaactaacacctcaaaaactagaagacaatattgtgtataatatatgtaataaagacaactttaacttttatttgtaacccacattcttcctcttcctatacttaattttttttactgcaacttattttctgcaactccaactcttattataactatcctaaatatttttacaccatcacatctaccatcaactcaccatcatcatttatcactgccacaactgtatcgccgcaaccactaccgtcaacttcaccgttagtgccatcactaccattgtcatcatcaccaccatcattaccgtcaccaccaccaccacctttaccgtcaacatcactactatgatttaccttggttgcttgggttgccaatattatatcgcatagggtatagttttttttgggatcggatcggtttaactcgatcctttgttagtctaatgttcgttctatactatttagttttattttatattattttatttttgtgttttagccaaatattattcactattttaaataatttgtatgagatttcaaaattttaaatcatgttatacatagaaaaaaatctaaaaatgttttattttaaacaattaggttcacaaaacaaatctgtaaattgattccatggcaaaaaaataaaaagatggaaacatagaagtaaaaaacttcactccatcaactacacataataaagcatatctcatttatttttagttattgaacccaatacatctgttaattcattttaattgtattccttcttatctaaaaagtaaaaaaactgaaatcattctcctaaaagttaatctttccatcaaaagtctgtccaaatccccaattgtttggcatcacattattaaaatcttttgtaaccccatcactcgtcgtaaccctgaatgaaataccctgaccagtcaaattaacaccagtggtccagttttgtccccagttcttttgcattgttatccacccggtcttgtctcctttaacttgcatcaacttgatatctccagcgcctcctacattgtatggcaagatcattaagaaataagggtttcctttggtttcaaacttgacaccaccagttcttgcacaagaaatacgtctgtatttaactgggacaactccagctttgtattgggcgatcttgaggaacattggtagggagaggtcaaagtgcttttgtggtgggttgcaccaaacgccttcggttttggagtaatctggtggacagaaatttgttgctgtaatcttgatggttccgggtaaacaccattgtgggtcgtgcacacacatgatctggtaacaagccccacatgtatacccttcgttgaagagtgctgtgctcaatgccgctgtctctagaccatagccttgtttgaataaatcaccgtatccacaggctccctctatattgaataaaaataaataaacattaattttatgtacatttttttctttgatcaaaacattaagatatatgtaaatgcaatcgcaaactcaaaagtaatcatttaaaacaatcgcagcgtatatgattttttatgaaccaaacaaaaattcaataattagttttttcacacttacgttgagtttctccaccatggatatcaccgtaaaatgttgctcgtgcatcataccaagaactgtcgagtccgttggttgggctgcctacattgtcaatcacgggtgcttcggctacatcattaatcatcgctcgatgaccgtaactcatggacactaacaatgtagccattattatcataaaacattctacgtataccatttgttctaagagtttcatgattattgtttcttttgaatgatatttttcttatttaactttgataggtgatgaatattgatggggaccatgtgctgggtatatatatataggtagagaaatctttacaaatgtgcatatatttactaagtcaacataagttagtaattgttgactgcttatttaatgaggatttgttttcatattttagatatatatgaaatatccaatttaaaaatgtaaatgattttgtaagacattaaagcaaatgatgatgtacatgttggtattggatctcgcacaacctggcccggcccgacccatttcattattaaactcataaatctgataaaagttcaaacacatgtaagggagaaatgagactataaattgaaaatggatcggtcaccacggaaagggatcctgttcctcatacaaaaaataaatatctatgaaaatttatgttcattagggaccatattttatttctcataaatggatttgtaaaagaactatttacctatcaaatattcagctatggaaatcaagatttgttagagccaaattcacagtggtacgaaagatgccgaanatagaagcgaagtctcatgtcttt

SEQ ID NO: 38323 - DNA, 1357 bp, Arabidopsis thaliana landsberg
tttacccttacaatttcttttattttttacaattaactaataactatgttaccaagataacaaaatagttaatttatatacctagaaaacataaaaactaaaatccaaatacataaaaagtatagttaacaaaatatcactgttaacataatatatcacataaattataaatttattgcgatataatatgatttaatacggtatatttataatcttatcgcgatacaatataatttaacataatatatttataaacttatcgcaatacaatatagtttaacataatatatttttaaacctattgatatatattttgttatcatgttaatatagtagttatcaggtaattcataatatatttttacttatatatttgataaacaatattatatgaatcagataaaagacgtctgtaataattttcttatgttgttaaataatttatgatgagcggaagggtatttttgtccaacttatagaaattgaggaaagagaactaattatacaaaaattataggtctattcttaatttttatgttttctgggtatataaattaatatagaccctcacacaatcctatataaaccctacgaccgcagcccttgactcagttctggctcgtccttcacgccactctctcctatatctctctctcgctctcctccccctttccgccgatcgtcctttccccaccgtcgagtttttccctatccatctccgggtacgactttttctctctgtttctaatcctacgccgcgatgttgtggatggtgattttctgtgttccgatctagtcttaggttttccttttgtaattcctgaaatgggttttgatctgatttgaaccttatcgattttccgattcatttttagggttcttcactttatctattgtagtttggtttcaagttggtcgtcgggtagttcaatttttcttcttttggtttgtttcaatgtctcattagcaggctttacgttgcacaccagatgtctgttgatctctgcaagaagaatccatcttttctttggtgtgactgtggttatatgagcagggggaggttgtggtgttttcagattatcctcttcaggcactggacttgacttgtcttcaattcctcgacttctctctctttcttcttctcctctcttctttctcgtttctctgttttttttttctgcttgatttgatcaaagggtattcgtttctgctgctcctgtttactgtgaacttgaagactaagttttctttgctaaactctcactttactggtgaagagtttacagaagattgttcaaagttttcccctttggattcttcgccaatggggaaaactcaactcgctcctggatttcct

SEQ ID NO: 38324 - DNA, 2185 bp, Arabidopsis thaliana landsberg
  unsure (1)..(2185): unsure at all n locations
tgcagagcatatatgtacgtgtgcgtatgtatgatgtatcttcacatgcagacatagtcatgccggaattggctgtttccaactcattcgtcagcttctctccgaaacatatttgataatatcaaaaaataaaacattatgaacaacttttatcacatacttcccaaagttttatcactattgtccgtatcgcaaaagcaccttgttccttaatccctaaagttccatctttttcctttacaacttttttattctctgtaatattcaaattgcagttgaaaatgtgcttccataggaattcagaaccaaatacttaagcttttattgaggtgacagaggataatgaattgaatgatgagcaggagaatatgaagcagagcacgttggaacctatcacaatcccatcaaaccactactttttttttttcgattttcagtaaatcaaattcacatgtcgtaaagagcttttcagcatctgttttctaaaaataaaaactttttcaaaagataaaacatgacattgttttgattcaagaaataaaaaaccaactgtgttacaatgtgcgtatcaaaccaaacgatttcatttactgttgttataaaaccctttcgggggaattttgaccaacaaaatgttaatatgggtggagtgttttactttccacctttcccgtagctgtctctgagtgtgaccgtccggttgaacacaagctttcctggctcagagtccttgtccaccgcgtaataacctaatgcatcacaagttgtgatttaaactttgtatcagtcttgctcatctagaaaattgcacactttttatgatcatgaaacagaacatacctagcctctcgaattggaatctgtccccaactgcagcatctttaagggttgatacagcataggcaccagaaattaccattttagagtttgggttaatgtcagtgagccaagcatcattgagttcagccgggttctgtaatgattatntaaaatttagcctttatgggcacttttcttggtaacaacaacaaaagcaaaacctagagaatgataaatacctcggagttaaagagtttctcaaataatcggacttccacctttatgggctcttctcctggggaagattcagcgacccagtgtagaaccccctgcgcagaaaagcaaagtaaaggttaggaagagccacaaatttgcagaaattacagagatggctaaagaaaagacctttggctttgactttttctcggggtcatattccgcatgaatctcacgaacggtttcattgtcatcagcaaagacaacattggtgcacttgattgggaaagcatatctgcaaagagcagcaggaagcacgtttagtcacaactgaatcatattcaaagcaaaagtagtaatgatgaaaactgtccctttctatataccttagcaaaacagatttaccaggggcgagcccataataatcttttgaatccttcattcggaagtcagattggtcaatgtatacaactctagagaacggtacctagaccaggaaaaaatatcaagaaacagtaatatgttgttagtagaaaacaagtatttgcgaaatacagcttaccttgtagaatgcctggggatcatcgttctgagcatcaggccaccttttggcatcaagctctataagcttgtttgattccaaattggtgatgaccactttaagaggattaagcaccaccatggtgcgaggggctgttttattcaattcctctctaatatgatgctcaagacgacttacgtgtatcatgctaccatcactttaacacagaacaatagagagcagagttaacaaagataattgacatatgccaaatagtatgatgtattcagatatatatatgtagcaaccttctagtaatcccaatgcctcgtacaaatgcattaatcgcagttgaagtcacacccctccgtctcaaaccagaaagtgtcaaaagacgtggatcatcccaaccatcaacatacttgtttgtcactatgtaattcaactgtagcaaaagaaaagaaacatgttacaaccagcatgattctctgcataaaatacaacacattgttcacaggcaagttgagtatttaacccaccttacgcttgnacattacagtgcttgtcacattcaaccgtgaatattccacacatatggcatgtagagac

SEQ ID NO: 38325 - DNA, 2628 bp, Arabidopsis thaliana landsberg
  unsure (1)..(2628): unsure at all n locations
taaaaaccagcgaagtaatacgaaagaaaaagaggagttcttagtttgtattacataatccactgcaacatgctttgggatttgaacattattgtctcaggatgtctgaattcatcagcaatgttgaattgcgccacaaagactccccgaagaataattttgaagcttttggactttttgagatataacatggaaaagaaaagcctaaggaagaccaaataacaaagtcaatcttcaaacatccttaaacaaagaactattaaaaaaaaacatattaaggatattaccctcagagagtaacgtaagtggtatgaaatatgagatctcagttccaataaattatgatgcacccgtttactgtcatggacactttcatctcggagtcggatgtcctataccgatatcaaagtaaataatttaaaaggtttgtaagaatttcgtcagcaaagacctgacctaagacacctctggcaggatatctcagcgagtatatataaggacaagtgtgtgttacctcattgtcgtcgtgaaaactcagctcgtagattccttcatcattaagccacaagttgtatataattacttttgttccatgagttccaatatcctcgagctggtgggtggaagatggaaataaaaaagttaacaaaacagaccgctatcacacggactcaaaatcttcagaatgaatttaagggagccacagcacattaggacacaagtcaaggaagaacaatgatgcaataaaatgttcatgagctgactttcgaaagaaacaacctgctgccaaagttcgccctctgtagaaaacggagaccacttgagtataatttcaaggctggcagcccaatcttctgcagatccatagataattggttgtggtcgctccttggatgtatcaatatcaatctgcattgcatatcggatctatcacttaagaacaaagaagagttgcacattctagagtttacaataattctttatttcaggcatgaaacaaaaaatgctgaagattttaccataggaacaacgacatcatcctgaccagtttttctgaggaatgtgtatgacagaaggccaacgctctgagtagatttgctaaaacagaaaagataaaaaaaaaaggttgaaacaagagtatataccaaattcagagtgtacatgatcagatatatcaataccctccacgagttgagcgagtaaaaacaatatcatcagctccaagtctcatggtacttgtcttgaaaccatttccatctgaacacaaaaggtgaaactctggttagagaccgcctgttggagaccaagacagcaagaccaactcaactagaaatgagctcaatatcataataactaagtaaaacaattacactgtccaatcgtcgtattagacttctttgatgagtagcctaagctcatgcattttctgagcccatcgggatccattccaccgccatcatcttcaagttggaaaaaaagaagacaccatgtcattaacaacatacaaagcctcggtaagggaaaagcactacacactctataataggaaatataccttggaaaactaaagctggggaattatctttgacaatattgatcttatcaatcttaacaaacgtagcaccattttgtatctgagatataagcaattcaacataacaacatacagtaccaatgctttaataaaaaaattcactcgcaatgagcatgaaacgaaaaagatcatcaaaaatgaacttaagaaatcatttcacccctcaggcatacctcgtcaacagcattgtcaattagctcggctattgctgcaatacattacaaggaaaacaatcatcaccgcatttttcttcattctacacctccgaggaaaagaaaaaaatcacaaatttatctaattgatggcaccagtagagccaattcatagctttacctccaaaagcccatttatgtgaagtagcattcgagtgaagaaactttggatgaacacgagcatgctcaaccatacctgtcaaatttcatctcattaataagtactccaaaacccataattgtggagcgtgagtgagagagagattcgaagaaagaacctggggcagttagagtaacacttgaagggatcacaaagttttcgccggctttccagaaacttcggcactctagggtttctcgaggagccaccgtcgcagcatcagcgatcgaaactttctgattctctattagagatgccaagctcggaaccattcctattactcctccgttgtcgtcgtcactgtcactgtcactgtcgatatttacgacatcggcgactgtgtaatttttcgccattaccgacggcgacaaaacgaattnnnnnnnnnnnnnnnnnnnnnnnnctatttgaaactaaaacaacgcgttgtgtgcagatcactagagcttttgctttaagagtcagtttaactaatagtaagaaaattttaatctccgatactgtatatagctttgctcttatggcgaaaaaaaaaaaaaaaaaaaggctttgctcttacggtgcagatcactaaatcctagttgggtcaaaagcccaagcccaactatgcttaaagcctataaggctttaacccattagatatataatgtctggagattatg

SEQ ID NO: 38326 - DNA, 5001 bp, Arabidopsis thaliana landsberg
tcgtcctttctcaagcagactggtccctgagtcgtggtgaagtgtctctcgttctaagatgtggacttcagttttttttttcttcttttcactgtagacctagattgaagaaaatttaaaaaaactcataacgtttggcttttgcgtttttgttattgaaagatgaatatattcatttatattttttatcccgtaagattgccttctgatttgacgtcattaatatgaaaaatctaaaccaaaacaaaccgaatagttaaaaatcgatttaaaattatgaaatggttttgcattagtcaaattaaacggttttacattccttaaaattttgtatcaaaccaatctactgtatacattcggttttaaattggtaaacagaaaataaataaaaaactcttaaccgaaacgtaaacggaataatcaatctgtttagtaagtagtgtatctgacttaccaaaaaaagaaagaagtaagtagtgtatcggaatggttgcaattaaatagtgcaaaccgatttggatcattggtttctggttagaaaccgaaaccaataaaccgctttggttcaagagtcttcccttgggaacagtttagacttgagagcgcggagaagttggagacggtgaagatggcagtgagacaaaaagcaatggcgacgttgccgaaactgattcaaagcatgagaaacgaagttacgaagcagcccagtcttgtcttaccatctctcagaagagctttctctctctacgatcagatcaatctcatcgataacgttcctgaggatcagctccgatttcaggagtattcatctctctcagtcatgttcctaatttgactatgtagcaagggaatttggattttcgggtatgaaatgaatcaattaatggtgctttttgcaggtttgatgagacgagtttcactgtgaatggggttaaatacgaaggaagcttgctctgtgttgggaatttgctaatgtcatggagccctcgttacttctccgacatcacaacggataggtaccagtaccaccttctcccttctcttcagcttacttatacaggactagagctagagttaagagattgcgtaaagttataatcttttcattgttcatgaccctctctaatgaatgtttagttaagtccttttcagcgaaagttgaagtctgtctagtgtggcctctcttgtacgtactagtatctgtttgctgtgtttgatctaactttgtaatatctatctactctttctactttgaagttaatgtgtcattgctaaacactttacatgtctaattcatggatgcagcttgtcaatcttccagacggttcgaccaattccaggtactatacattttaccattttgtaagttgatttcttccacattccttatacaatagtctttgttccaggatcgttggaaactgtatgatacgtttgcgtacgccatatttttagtggctaaaaagtaaaaaccttttgcacatattgaagtgtatcatcagtggtttttgactctcctttttctgttttttttttttcaaaacaatctctagagctcttgattgtcgggtgtggaagatacaaccacccactgaatccccaagtccgtcagttcgtaaagtcaatcggcatgaagctagaaactgttgattctgtatgtcctttgttctattcaagtatttgttctgttggtttggagtatttttctgtgcttattgattaacgctctgatctatccagagaaatgctgcatcaacttacaacatactgaatgaggaaggcaggatcgtggctgctgcattgcttccttatggagttacatcgtaagaaactcaacacctctggaatactgtagaacaaacttcgaacaacttgcctcgatctttatagtggaaacaccaacatggtcttcttgtctactgtaaatgatatatttcactctatttgtaaaacttttgcaaaaaaatcgaaatttacaggattaccaccttgttacgtagctttaatttgattgagctttatctgaaaaatagaagatatagatgttaggggttagatttgggcttgcttttcccaaggcccaaatccaagtcaaaggcctaagcagaatgttaagtcaagagggtaggctcgtcaaaaccctggaggaatgccctacacgcagaaggctataaatacggaatagcatgtcttgtcaaagaaagggggatccaggctgacacacaaagacagagagacgctcctcaacgttcacaagctcctcacctcgttccaagctcctcaagcaagcagctctttctcgtcaacaagctcctcagctcgtcctggacaacaagcgatcagctcgtcttcgtcaacaagctcatcaactcgtcatgcacaacaagcaatcagctcgttttcatccttggatcgtccagctcgcaacccatccttggacaccaagctcatcttcgggaaccaggatcgtccacaagcaatcagcttgttctcatcttggatcgtccagctcgaaatccgtctttggacgcgaagaacaccttcagatgtcaggatcatcttaaggaattaagctcgtccttatacgtcaaggccgtcctcggacatcaagatcgcctttccggccactatcccgtcttgcaccaactatcggctcgttctttctccatccatactcgttaacaaatcatcctttgtaatctgtccgattcgcctaagtcgctagctcgttattaacagaaatattctttttcctgtccccagagatctcattttcatacttgtgtgactcgtgcataaacagatagtccgtctagtcgcggtaatccatgttacgcttgcagatcgaaagtgttagaaaacgttttaggtttgcacgcatgtgttgggctcgtttagcctcatggttttaggtctagcgtaacatccctaattaaattgagttttaattaatttttcaagaaaaaaagtttaaattattgttttatttggacaacttctttaaaattattgttttttaaaattttgtaacacgagaatagattagaaaatttgttgtcaatggtcaagaaacaaaatgaacaaaattagctatcgtttgtctttatgtcgatgaaggtagtcttcttgaatgcactaagtctgttttcctcgaccaccaaagaccaaaccctcaacagcggccacagcgaccataacctccacaacgaccaccaccaaatatgccaccaacaaagccaaaacgtccgcgaaaacggccgccaaaaccaggatatctaccagaatagccagggttggaatctctcatcggtagcggcaccgtctttacaacaagttcctttcctgtcatcttacttccactaagttccaatgccttctttgcaccttcttttagatcaatgtaagcaaatctgtaagaagataaataaaacattgcttcttcagttaaccttttctctctagtagtagtcacaaaaattaaggaggaaataatcacaaaccctttgatagcaccggttgaagggtttcttggaacaaaaactctagtgatctctccacatacactgaaatgtttacttaatgcactcttgatatcatcatcctcagaaaacgaagagccaaatccttcaacataaatcgtttgaaaactaccaccaccagtgtcaatccaataatttcaagaatcaacacaagaacatctaacagaaacaaatctcccaaacatggaaaaatcaatttacctgcctctctcagtaaccacttcattagaatctttatctgctgaatatgaaatactagtaggcagatctagcttctgtcatatcatgtttacattttcataaacaagtaattagcaaaccgtttaatatttatataggttaaaaaatgaatacaacatctaggttgatccctagtaaacaaaatacatacgcaatactataaactcatgacataacaagaatgagatataaagtatcaccttctcatcatgagaattatcttttgattcatccttagatgcaatgctctctgccttcgccgttaaagaaccatttttatcagctgcatctagatttttggtttcagaaactccctgaaaatattagttataggaaagtaagttagcgtatatatactctaaagagaaaaggtctaaaattgcataaaactaaaaaaaggtaacagaagaagagtctttagacttctttgcagtatagttcgatagtatctccaatgtccaactctattttagagtaaatatagttgattttgctctattgtatatcttcaaaatacagaaaaagtctatatatacagtataaaagagcaatctctacatttttcctctattttagaggcatacaatgcagtaaaatcaactatattttatagagtcaactgtaaaatagaggaaatatagagttgcgcattggagatggtcttaatctaacgaaaacatcaatctaatcaacaaatttctaagaatacattgaatcacgtcctaaacatttaacaaaaatcgaattcgtattccaaattaaacctagaaaccgcgattagattcggaaatggaagattcaatgcgtcaccgaatctccagaaattctggggaattgaaacatgagtcgaaaatgtaccgaacaaacaacgaacgtcggagtttagattccgattcctcgaagcaatctcggagaactcgaatttgatattgaaattttctggcgatggtagatttatatttccgatgaagaagagagattgatgaatgaaatataagaagcaaagagtttctttctaataaaaaggtttaaattaaaaacgaagagcaaaaatatatgaaattgggaggattaaaaaaataaaaataaatgagccgttacggcaggcgctggcgtttgacttgtgagacggtaggatgctaacggcgttaaattttggaaccgttatgttgtaaaatccgtgatccgaccgttgtgaaaaaggacaaacacgcaaataaag

SEQ ID NO: 38327 - DNA, 3001 bp, Arabidopsis thaliana landsberg
ccatatgcattcatacttacggatagagtgtgacagtattcccctagtatgagtataataactacttacacgctatgaaattgaactggcatcacgtgaaccttagcttacaaagaaaagtgacttatgcgtgtatacatatatgtgtgtttgagataaattcccaaaatatgcatgcaattatgtacaatgaaaattatgaaatagaatttatttccaagaagataacaaacttatcataaacattcactttgaagatatgaaactgaaaagtaaaaactaaaaaaaaaaaaaggtgtgaagcagtgggtaggtaatccactttgacgaggttattgtagaataagtaagaatgttttatctcaacttggttggctatctatcgcaacaaattaaggtggagtgatgccgttgatggacatattatgggatactagttgtatccataaagagtgcgaaaaaggcccaatgtaaatgggcttaatacccacttggttaacgtggcccataaagagtgcgcaagaggcccaatgtaaatatgggctaaataccacgtaaactagttgagtcgatgacccgagaaaccaagccgaaacaatatggatcttactcaatttgtaccgaaccaaaccagaagaaaatcaaattaacaaattcctcttgaaaatttctcgagtctaacgacaaaagcaaaattaaaatcgtaccaaatcaatcataatatcaaactccatttaacgataaaaccagatcatccacagcaaataagaaaaagacaagtccattaattaaaataaacacatgatccagatctctcaaatattttcaagctcaattacaaaccaagatgcaacaatgaagttttataaagaaagaaatcaaatcaggatctggacttgaatggaatggctctgatgacaagttggtggtaaagagccgcaagagctgctccaatgaatggtccgacccagaatatccactgcaaaccacaatcaaaccacaatcaaaccaaagtgacaaagacatatagaaagacaaatcaaccaaatgatgtaatggggtactcacgtggtcgcccaagcgtggtccttgttgtagatgattgcagctccaagactcctagctgggttaattcctgttcccggtgatcggaattgttgccaagtataccaagaacactgcaaatccgattgggagtggcgccaaaatctataagaataatgaccaattattagtcttaactgtaactaattgcctcatacacttaaaaccaatagaaccatgaaagtagtctattatatataaacctgaactaattggctcattaactactaactaaccaataaaatcagcaaaccggaacttagagaggggtccgtaccgggacgtgtgagtcacgaagaagacggtgtaaacgagaacgaaagtatgcctagggttttgcttgtgtatgtcgtggagaagaagaagagtatatttagttttaatttgcattttattagttttgtcgtatttccatattcatatttatgcctagggttttgcttgtgaattatatcaaggtcctttcctatttacaggaggtcttagaaataagtctcatatcctctaaacttatttttacttcaaaaccctacttcttcaagctatgtccggaagaaacgagtctcaatgcgtctttgtgaagactagtattgacactcgtctggcgctcctccttgatagtgatgatagtgtagatgctttcaaaggtaactcttcataatctcttccttttttttaccttggtaactttttgtagtaactaaactctagaactcatgtttattgttgcttgtctattttacagacaaaatctgcaaagagcatgaacagtgtttcccaagtgttggcaacatcactatttctgccttgaaggtaacaacacgtttttgttttgcaaacaacaacaacaacaacttaaagaaggagtacttgtttttggtttgtaggttaacttgggtggtaatgattatcacttgtccgattgtatgattttgaaaaccgctcttcaaggcttgagtaacaaggactggtttctatcagtcgacctcgtacgtgtcgaggagaaaggtgagctgcagattggtgaagttgttgagaagaaagcgagtaagagaaaatcgaaaagtgacaacaaaagtagaaagaaaccctccatagagacaccaacagaagcaaaaggtaacctccgttatgaatagtatatcttgttgaagagtatcagtttatttaccgttgtgttgttatatctgtttttttttaaggccttgaaagtggtgagggaaatgtcactaggatgggagagaatcagcaaatttgtgatgcagatgaagaggaacctgtcgaaggtcatgccattgatggtgaggccaagcttgatcttccaaggacaatggaacaaggtaaaatagtttataatatatgtagagtgctgtgttcatttataagatgttatagactaatatgtatgatttatgtgttcaatagacgaccttcaaaaggaggtagcaaatgctgatttagtcatgagtgaccaagacaaggatcttgaaaagggtaaacttttgttctttttattttttgttatattagtagaagtttctgattcttatttctagaatctagatgttacttgtgtacacactagtaagccttgattagctttaagtgttgtagataatcttctagctgaattacaccaaactactgatgatgctaagaaagaagagatcataggtcttgttaatgctactccggaagctattgagaacggtaacttcagttcttggttgtatatacatactttttcttctgtggcataataggcaatggatcatttccattgagtcgtaattgctgaattttgtgtagaaactgagatgagtgccaaggaaaaagatggtgatgaggaggctaaatctgagaagcctaaaaagaaaaaaagagcaaagaaagtcac

SEQ ID NO: 38328 - DNA, 2817 bp, Arabidopsis thaliana landsberg
cgatcaaacttccgttttatccagccgatgaaggcatgtatggtctgatacatggtccctctccttccatagggacagaccggatgctccttgtattaacagaatcctagatcgctacagggctcccaagatgatgagttttcgtatctgttcttgttgcagggcagcctgtatcagcagacccgacacgcatgctgacatcgacagttggatcaacttcgccatgtcccgaaacgtggagaatctgtccctgtatctcgatgaggataaatatgatatccctgaattcctttacatcaattcctctctcaagcaactctaccttgatttcggctgcaaaaaggattttatatctctgaatcccaaatgttctgtgtcttggacatccctgaagaacctgtcattgtatcattgcaacatctctgatgaatccattgctaatattctatctggttgtcccattctcgaaagcttattgttgtttttctgcaagaaactgaaggtccttgatctcagcaaatcaccgcgtctgataacattagaaatcactcgtagatgtcgaatggagccaacacagctcgttgcaccacatatccgttgtctcagattgataaactctgagaaaccatgtgctttagttgatgtctcctctttatcccaagctgaactagacattaccgcttacgcaatagttgataataaactggaggctgattttcatcagaccatggtggtaaagatgttagaaaagtgtcagaatgtggagaagcttactttgggggcaaactttcttaaggtatatgttttcactcctgatttagtttacataattaggctctgattttcaagaaaactagtgtgttttttggtatacactcatttgtcttctgttttttttgtttgttatagatgttatctcttgccgagctccgtggtgtttcttttccaaagttgaaggctaaagctctgatacttgagacaatgatctctcgatatgttattcatggtatagtaaaggtgctacaaaactcgcctgacttgaagaagctaaccatacacccaatggggtctgccggctcatatcccataccggtaattatgaatattccttgaccccgaattttgaatcatcatattgaaatatacttgcattacaggaagagcatattgacatatacttggattctcatggcttgaattgggatccatcctggagctcggagtttaagaacacttcccgcaggaatgtagagtcaaagcaagtggcttcgtttctgcaacttgtgcttaaaaccatatcaacattagagttgattgtcgcaaggttggaaagttatcttgatggaagaggtttcgaagaattgcttgagatggttccaatgctttctcaaaacaacaatgtctccattgtgctcagctcaagaaaaaaacgatcctgctttagtcttcaagatcatagattgggaaattatcaaatcaaatttagttcaatcatattttctataagtttagaataattctatatattattaataatttactttttctacgcattataatttgaaataattttgaaagatgcatatttccgaattttgaacaaataagctaatttgaaaatataatatttttctacttaataatttttaatgtctgagttttctatatttgttttgttaaaatattttgaccaaacaaaattgtctgaaaaggtatagaaattaatatcaaaaataaatgaaatatacttttttaggatatacaaattaatgttttgaaaaatagaaagaaaagaactcaattatagcagacaaacaaaaaaactttattacaaaaaataaagaaatgacatgtggttcttttggaaccggtttataaaataaccggtaaaccgaagcgaagaaccaatagaatgcgccatatcacatccaacaaaacgggaacctgattttggtcgcataccttaaacataggagatcgagattgatggatcctttctcaatccatccaaaatcttcagacccaatgctcttcttcatctaatttcctgtctgacggacacatctcgaagaatcagagaccagtttcttcagtagagactcgacgagaagttgcacctgaaaattcatattcagattacgggtttattgattcgtagcatgcgaaagagatatgggttatggaaatcgagcttcttctaaaactcctgcgatctcaggtgcccttctttttctgttttcgttcctaaaatttgaaactttagggtttatagttgcggcattgaaaattctgtaatcgatgcatacattgtttagaaatatgcatctgtgtgcgattctcttggatgattatccggttgttatgattagaccagaaattttcggtctttggttgaatcattcgccgactcttaatttcttagaatctgaaattaaagtgacttgagtgttaatgttaacgatatagcactaataggtctaagggtttttgcaggtttgcgtgaaaagcatcaacaggatcttgaaaaactgacattgacctcacaaccattcaaaaccttgagattatttgttgttgctgtttttctctatgttagaagatggtcctcttaccttcttgcaaatgttggctggcttatacttttttgtagcatttttgttgcatttgcagctcttcttgtgaccctagatggccctcacgttaaggtaaacagattcagactgttgctgtctgtaggtttagctagtgatatttctttgcttggtataagaaatcttcgaaagcttctggaggagaaatcctacagctacggctttt

SEQ ID NO: 38329 - DNA, 1986 bp, Arabidopsis thaliana landsberg
ggtcgtcccaagcgaaccggtaatttctcgttcttctctaattttatgtttttatgtttctaatttgttcaaacaagaatcaaagtaaacatcaaattactctttgttttctataaccggtgatttgaacccgaaacccggaataattttgggttaattccgggtttcgggattccaatcataacccggagtttgttgaacttgcaatttaaaacatctacagtaaatatatgcattggctttgtttgttaaggggtgacaaattccaaccattttttttctttgtgtggatgttattgaaaaagtatgatttttgttactgaagtgtatggacactattgttactatagttgtgttcttaaaattaccggttaaacaaaacagaactttattgttactacagttcgtgtcttaaaattctgtttgaatgtgattggtgtttagggacggtgtggacagcaagtgcacacataataacagcagtaattgggtcaggagtgttgtcattggcatgggccgttgctcagattggttggattggtggtccagtggctatgttactcttttctttcgttactttttacacatctacccttctctgttcttgttaccgatctggtgactctgttaccggcaaaagaaactacacttacatggacgctattcactccaacctcggtaaacaaaaaataaatcatttcggtttctttttggtgcatatattgggatatgaaaccgatatggagaaccggagatcgaccgagatcgaaggttgagatgacaagaagatattattgtagaagataaatgttaaacttcctaaacttcaatattaacatttgatcttctagaataatatcttcttgccatatcttggccttatcatttcaaccgtagatctccggttctccatatcgggtccatatcccaatagttattatcatcaaaaacttaattcattgttgattcatttttaggtgggattaaggtgaaagtatgtggagttgtgcaatatgttaatctatttggtacagcaattggatatacaattgcatcagctataagtttggtgtaagttaaaactttgctttcacaaaactctttttatttttaagtgttcacatttgtccaaaaaaagttagatgcgtgttttattttgctattcaatattgtccatacaagtcattaatgtttggctcaataatgcagtgttttagtcaatgtagtcttgttttgtgccattaaagattcgaaagaacggctctattattgtttgacttgttaactaattttcttgaataaaaaatttacagagcaatccaaaggacaagttgccaacagatgaatggaccaaatgatccttgtcatgttaatggaaatgtttacatgattgcgtttggtattgtacaaatcatattctctcagattcctgattttgatcagttatggtggctttccattgtcgctgcggtcatgtcttttgcttattctgccattggacttggccttggtgtctctaaagtggtagagaacaaagaaattaaaggtagtctcactggagtcactgttgggacagtgacactgagtgggacagtgacatcgtcgcagaaaatatggagaacatttcagtctcttggcaacattgcgtttgcgtactcttactcgatgattctcatcgaaattcaggtatttttgttacgcgagttttttttttttttaatctaatgttaagttagattcaaaagaaaaataacgtttttacaactagtgcatcgtttggtttatttgttaagcgagtttgtgtgataagagtttgtttaaaggatgttttaatcaactagacgatttgatgatccaggacacggtgaaatcaccgcctgccgaagtaaacacgatgagaaaagcgacttttgtaagtgtggcagtgactacagtcttctacatgctatgtggctgtgtagggtatgcagcatttggggataacgc

SEQ ID NO: 38330 - DNA, 4866 bp, Arabidopsis thaliana landsberg
cttcttattgcttgttttcgcttcagacaaagcttcttcaactttctcattcaactccttctccatgttcatttccaccttctcggaaaccatcttctcaaactccaacctctctgttctaagctctttcagctccttctcgatttcaccatgctttgctgtcaatgtctctatctcattgatcaaagcttcatcaacccatttgaaaatgtgatcattgttccttagcttcatcaacacatgaacaatgatctttttcaagattacaagaatctaaaacatgaaaacataggaatctacacaacgtcgtttcactataatcgaaacaatgaaaatgtcatttaataacgtcgtgtggtcacatgtggattgttcctataattagatgaatagtgacatcgtttcactataatcgacggtcagataacgtcatgtggattttggcctgtcaacgattaactctgtgtaaaatggccggtcaatggtttttatatgtattaaatagtcacatacgtatttcacgtattaaatggccagtttttgaaagttcgcatattaaacgacatttttcccattgaaatagaaggaggttcattaaaaactgcatccatcctttgtcacaagactttggaatgcctttgacaacagaaacaaagaagaaaaactgaaaagctcgagaaaagtttgaaaaattttgagagaagtttcggaaaaggttccagatcgaatccaagaaaaaagcttaatagaaggttactaaaagagatcgagatatcccgacaccgacaaaccggagctttgccggcgtcgaaaggcatggttgaggtttggttctcgattacagtgcttgggaaagaaaagaacatagttttaatgcctgacatataatgattgaagagttaaacaacgattataaaggtttttcttttacaaggtgagttctctctttgctagatcgagattgtattagagaagtttgtcaaatctgataaggtgatttttgtggttgcacatgaagaagttgttattgaaaaccagagcaaagttaaagatttggatgttctcataatctcattatttaggataaattaatatttatactaaagttttaccgatcacaaaaaaaagttttaccgatcaaaaattcttgttagtagtgatgtcaaaaataaaattaaaatcttgtcggtagtacaaattttgtccagatgatggaattcaaaataatctagaaaatgttagttgtaaatataacattcacaaattttttggtgaagattaatgatctaaattttcacccaaattaaattgattatattattaaactattttatatgaaaatgacatgaccttaaatattcaaaatttatagtattttttccactattcttaatgttcatgataaagtgagaactcatagtcaaaaactaattaatttaaaacaatacaattatttttgatgaaattctttagagatgagctccatcgaaaagctaattttaagaaaacttataaaaaatattggaaactaaattttagtagctcatattgtcatactgaaattgtgatcagcggctatgatcattcttttctaaggtagcatcaaattgagtgttctaccaaacattaacgaacgcaacctttaaacataacacaacctttaaacacgaagaatatctaaaccatataaatcaggtttattgagtagattgcattccggtttgtttgtaccctaaatcagccaaaactaaagattgtttaattgtagaatcactaccagacattcttagcatacctataaccacagtagcatgtaaatcttcatttatagcattggatctcatttgattaacaaatgatggagtcgacttcttcctagtaacgtcgaagcgttactatgtactcgatcttgaatacatggtttacaaaaatttatgatgaaggtaaaaaatactaatgttaatcaatgaatttgctttacttgggttagtttatattactaatatcttcgcttatgaattatagataacaatggcgatataattactattcagttctatacaaattctgtggaagaacaatctgttggtgaagaacaccaactaaattaggtgtgcaaaaatgtgctcttcctcccaaaattaaaatcggaatcattgacattgctttttatgttacttatgtctgtttgtgaaatattagatgtgtaatttggtcttttaatgttacttctatatgtttgtgaaaaattatgtatgtagtttggttgctggagatggctcaagaaggaactgattgcaagataagattagtactaattgaaaaatgtgaaatgtgaacactatttttgcttctgcagtctcgttgctatgtgttgttgatgtctcatggatgcttacctctaattggagtctttcaaagcataaaacttcgatgatcctctgtcgtttttatgttgtatgtgtttcggttcgcaacattaactattgtctatggaccttttaacttagtttgcatttgattatcatagttttatattgccggagagactctattttatgccataattttgaatatattcttttttgatgatgatgatgatgataatgatgatgatagtatgatgatcataatgatgatgatgatgattatagattgcaattattaattcttaattacgataattatttagattatttaaaaaaaaaaaaatagatcaacttaatttttttattttttttgtcaaaatactttcattccttaaaacctcaaaaaaggagagttcatacaaactgaaaataaaacattacaaggaacataaagataagggctccatgagtttttcaaagtggtgttcgactttgagaagcttgcaagacttggagaatctgttgaagccaaaagggaatcatgcttgaagacgagcttcgagaattcccggaccagctggtggtcaatgaaggctcgtgcggttgacgcataagagcttttgaaaagttccaaagaggatttcgatggaaataatggccaaagggtgaagaaggtttgtgggaaacgccatagataatcacaaggccataaccaaatgaacgatgcgaaggtagattggtgtccatggccaaccgaaacatgaccatcgattattgaagtaaaaaggcttgagaaagagttaagttgcacataccaagggcgtttctccaataatggtcgagagagttgagatgcatagccccttatgattgagaggggatgattaagcgtgaaggcgtagaggtttgaaatctgtataaagtcatctataacaacagaatcgtgcccaaactcaagccaaaaaatatcaaaagtaatactaatccaaagcgattcgagattgcacttgcaacgattacccaccgaactaaactaaccaccaggttttgtgaaaagaaaagacaagaccaacctaactctctcactacataactaagaaggcgtccactaccctcttttatcgagtaagagctcgtcaaaaattgttttgccaagaaaaaagaaagaacagacctgggccttatgaaagttgggcttctaccaaaaactttccttttgggctgagatagattgtctaatgggctgcaggggggtgaaaagcgttcttgggcatggcccaatccgggaacattcagcaggattaggttaagcagttttctctttgtcttcctccccatctgcggcggcggatcgaagattccggtcaacacagattggagttccgaggcaagatctagtagggttagagattctaaagatgatgatcgatctgctgtgtttgattcttccgtcgtcgtgtgctctggtcccgcatcatccaagcaaagaacttggtagaaggatttgaatcccacggtgaggggtcaggaggtgctggattagtcatcgaggggagccgacaagtaggacgaacgacaagaatcgcgaaggtttatggtgtaaaagatctaaaggtagatgtgagcaagatctcgaccgaagaagtagagataattttggatgtatgatagagtttacgaagagcagaagaaaaccggagccaaaccacagtattcttgaacagatagcgagaaggaagagagaaatctcgatgccggcgagcaaaggctctaccggcgccggagaaagttaacggcgattcgacctcgataatggtgtttgggagcttttgcgagagatggtttacgaaatcatgagaatagatcaacttatttaattcattaattcaataatttaaatgactaatcgttttctccaaaccatttgctaaatgaattagattgactcattatccattagacactaaatccatatggatatggattggtttgctttggtttaaccaacttgacatccgtaaatataacacccacaaaaaaaaacttataacactcctgtccgacagtcggtgcgccacgtccgggaggctttaaagacttgttaccgaccctaaaaattaccacatgatctttctccatgctttgtcctcactcgcatggttccgacagttactttccgaaaggtcatccatcctgaaactactccagcccaagcacgcttaacagtggaattctctcaggacctttgaccgaaaatataagtgcactttggtgacatagatggccaaatcagttcttttaaacttctccgcatgcaccaccatatttctgaaatcggggtgttacaaatagggtttgcaattgtattgctaggtacatttcggttggaggggttggtggagctggaaaaggcatgggcgtaccaagagtacatttgtgataatagagttaaaaatgttaataaaatggtgaccgttatagaaaacgacttgaatgt

SEQ ID NO: 38331 - DNA, 6563 bp, Arabidopsis thaliana landsberg
gatcttattagggcatgcagagattagaacaggtgggtttagtgccttgaagcatgacccaattgaaaacccaaactccattgataaagccattacaacaagactcagaaactgaaaaccagaggtctacttcctcggacactctcttcaattcttcttcatactgagaactgagaaaagcaagattctttatctatacaagagatgaaattttcacagtttcagtgagaccaacgcaattggcaacgacaatgaatttcgacatccgtccgagtcatggtccaactatagggaccacatccgccacgtggaatgcacagtcacgttgacgtggggaattcaaaagtttaggggtgtttattggtttgtaatttaaataattttatatgtgattgaaaaatctgtggttattcattaagattttatcaaaattctgctaaaatttaatgtttttgttttgtaaaaaatcttcataaatttggagttatcatatttaaaattttataaaatcaagaaaaattctgtgtttatccaactaaaataaaagaatttataattgttaataaattaaattattttgttattgatttatgattttttacacttttattctcaaaataaagtaataataagtatcattaaaatagaaaaattgttttctaccaaaataataataatagaaagattgtttgataaactttacaagattatggagtaactaatcaacaagattatagaaaactctctagcaatagtttattatctttcatttatttattttgtttatttcttatttttctttttattaaagttatcaaaatttcttttaaaatagaacttcataacatttaaagttattaaattttaaaaacactatttaagtcacaatccttcttctcttggtttaaactttcaaaacgttttctctttactatctctttgtattgttcttctcttccttagcgttctctgttaagaatctccaatggctgagagtacaaagtcaaaaaagctaagtgtgagacttctcatagatgaactgaagaacaaggttgtcttggctgaatctggtaaggattttgttgatgttctctttagttttcttgctcttcccatgggaactattgtcagattgcttgagaaacatcaaaaatcgcctcaagtggccatagcatgtttcaacaatctttacaaaagtgttaaagagatggatcttgagagttttcagacagaagcatgtaagcaagttctactgtatcctaggagtgtgaatcttgagaagttcagaaatatgaagttgaaaattgatgacactagggctgttaagtactttgtttgctcaggctttaaagaatcctgcagacatcattatagcatttcgaacacggaggaatgtgaatgtggagaaattgttgactcgaaggttgtcaaaagagtgatgaatcgggagattaagggacttgaagaagagcaagttcaaggaaggattttgagaaaggataatgatggagtttttttcagctgtaaagcttcttctttcattataacagatgatctgaaagtggaggcgagctctatggataatgttttgaatactctcagaggcttaggctacgcagatacttccaagctcagtgaaatacttcttcatgtcggtttcagtgaggtattttttactgtatcatcttacgttggtcttcgtagtttgaatatatatgttttgttgagtgtttgtttgtgtcatcaacaggtactgactttgctggaatgtttctttacttcggaccttcctttaaccgacacttttctgaagaagcaaagctcattgcaaatgatcagatctcgtatacctctaagtccaactttgcaaggatctggagatggagcagtaccaggccaaaccataacttttaaagcatttgttagaaaaccgaacatcaagattctctgtgttgaatgtggagcagacttcattgatcttcttttcacttttctagctttgccacttgaatctgtctggaacatctctgcagggaatatcagtttaggttgtattggaaacttattcagaagcttcaagagaattatggcttcatcctcttccaaaaccaagcttccttcgttttatagttgccctaaacagttacttgatgtcgtcgctgagcaacaagagatctattgcagtttcaagtgtgtcggttgaaactaataatgagtatgactttaagttcactagaaagatgcctcctggtccggattctctgaaggaaaagaaccagaacatgtttttcactaatataacatcagttttatatttgactaggtttgggtttatgaagcaaaacacagggtttttggtaactgatgatttggttatcaaaccgaagaacttggtttcaaacattagtttactaaagttgaacatgcacttggataaagaagatgttgaataatatgtgatcaccattgggaaactagaggaatggagatagtcttttgtttgatatacgtgtttgagctcgagggaaaaattgtcttctttcattgaattatgtcttttactgcaggctatcagtttgttaagagcttccctgatgacattctaagttttaaatacacagtttctggagcttaatctcgaagaaggccaaagcagacactgacggaaatatgttgatagatatgttccatcttctattttgacttttatcaaaaaacacattgagacgtcatgctgctcttggaactgaataaattacattgaacctgagtgaattaaggatgatggactgctccagatggctaaggttaactttatagttttcaatgaaccattgttatagtcttataaaccaatggtttcaagtattttgttaattattatcttaaaataaaatctattttgtcttacattgctctgttacaacacctcttttccaagactctgaagttgacaaatccttgtggcttttagggtttaagaaacattctgtaatctttatgagatgttatcctataacagacaatgacaagcaaattagaaagaggttttaaggcttaattaagagtctgaattctagctcataaacgttgtcaacatctcaatagaattgaaggattaaggaaaggcttattctgcaaagcaaaacaataaaagtttcagaatttttcaaaaaaccacgaagagttatcaattattaacaatccacagacacatcagagaaaacacaaacgaaacaaaataagcaaaaggaccctatgagacactgtccatgagttgacgaagcttggccttgaagacggtataatcagagaaaagctttgtccctaagatgtaggagtcaacattggttcttttgagtaccatgagcgagtaggagggtccgggaaactttccagccttttcaagcaaggccgtgtgaaaccctaaacaaatagctactttttcagcgttctgagagcaccattgtgcaatccatgtcacgaccttctccctcgtgtccaagctcatgaggtgagtaggcgcgttgtgaacggtcactacctctgttggcctagcagcggagaaatgattgagatatgagaacatctcatcaagagcctcccacttgacctcatcatcgaagataggtgacaaagtttttaaaaggttcctgtaggcttcagccttccaaacgacgtcttcagtggcagggagcctacatgcgacgctcccaatacctgcgttagccagactctgcttgatagtaatactgcaggcaatctccttcttgaaagatatcttcactggatgtccagccttgtgccacatagcgtcccttaaggcttcttcatcctctttccaccaagataattggtcacagcgagaaaaaaactgcctctccaccgcggaaaatgctctcttcgacttgtcattgtagtggtgggaagtcgtgaccaatgagtagccctggaggggaatgactccatgggagattaagagcagtctttgaatcactttattttcggtttcagacaagttcaaaggtttggacagctcctccttccactttgagtccacgtcgtttttgatcactatggtttcgccatcgtatcccaccgccagtttcgctgtgtccatctcctcctctatgaggtcattctcgacaatgtgatacagctcagtagacacagctctggccaccccaatgacaatacccttcttgcgcctcaaggtaggactgacaccggcctcgggatagatggtcatccttgcaatctcctgcaatatgtaggcacgagtcttcctgattgaatcctgtgagtgaagaccttttataggagaccagtgccaggtcccgcccatggttggcttcaccagcaagcttttctcctcagtaaaatccccattcttgaggataaagccagtggcaagggagagagattcaatctcatcaatgatatgtttcagcatgcttaaactcaaaacctaacaggaaatgtgatgcaggagaggaatttttgtttgtctagatggtgaatataaagagtcgtagttactaagaccatctccatcaatggtttctccttgagaaactgttcaatataaaaataaaatataattaaaaagtatgagagagagtagaattagtctctcaagtgagaaactctgagaaacccataagaacacttgtatatcatctattggtcaaatattattttattgttaaaaattaattatataactaatatttattaaaatactaatttttctttttttttgagaaaccaaaaagtatctcactgatctgatggagatgccctaagcatctaagcctgaaattagtggatgtttgtgggcgattttgcattaatcgatgcacttttttgaaataatctggccttaaagacgaaaatgctttttcccattgggacatgtgttcaaaactcatgcagtgtttgggaagcgcaaaggttttggtgggcatatcacatctggaacttgattctgtaggatttgtattccaagttcaagcatagggaaggttaaaagattatgactcttgtggtttcattattctcatttactgtctgataaagaaaactcttgagattcgtaaccgctggttcttcaatatatagaggcgcatcttcttattcacatcttcataccgagatacctaaaacctcagttactgctcttccttgcttttctcttactcgtttccttaacttaaaatggctaagagtgagaagattagcttgaaacttctcgttgatgagaaaaaaaaacaaggttgttttggctgaggctggtcaagattttgttgatgtgctctttggtctcttgacattcccaatggggactattgcaagattgctggagaagcatcagaagttacctcaggttctgagaaccctaacataattgttccagatagggttagtgatgatttcgagacttctagagtatattgctgtatccgaattaagaattgttatgtttcctcttggtttgaagctaaccacaaattcagttaaagagtttccttttttttctcagttgcaaaatcaaaccaattatacagagaaataggcccaagctgttatggccaataacgagctaaaagactagccaaataaagacagatcgagggtagtgagagttgtcactacaggctattctctacaatacaacatttttaagctcgagctcttttgttgctgcatgaagggcacttgtattgtttgatatgctcagctctagctggagtgatcttcacacacttgccatggaaccacttctcacaaaggtcacagcagatccagaattcatcagcaccatcactgtctccacaggctccacaaagggtttccccgtggtcatactcatcatcttcatctatttcttcgccctcctcttttggctgcttggtctttgagctttttccctctgaagttctctgattcccaaacaaagcaaaggaaatattaaactacacagatgaaaaaaactacagatatactcaaaaccaatccaaccaaagcagcgttttcggtgaagcattgtctctttgttttatccaccctactaagaaactacaatagtctggatgtggtattcaagattatgaattaatcgtgtttccgtcagctagtacatgattacgtgttgaaccatgaacatctttagtgatacaagtttccgaaaactgcaaaagcaaagagttaaaaaggatatagcaagagtcttacaactttagagttagacttggatttgtttccgttttgatttgcagcagatgacttgtcctttgctttagccattccagtcactacttcaaatatagtaggaacatcattgatcatgttgaacaaacgcttcctgaaaaacttacacaagttagcatgtacatatatacctgtgaagagtaggagaccaaaagagaaaccatccattacctctcttccttgtgggaaagaaaaccttgagccaaaggaaaacgagacagacagtaaccaagcgtcactgggaatagcaacaagcgaaagccatttctttttcaaagaggccatccctagca

SEQ ID NO: 38332 - DNA, 923 bp, Arabidopsis thaliana landsberg
cacacgcgcgacaggtgaaaaaactaaataggtgacacgtttatactgaacaaatgttaaataaatagaaagtagttaagttaatatttaccatgtcaacatttattataaaagctcaagtggaacactacacatttaatctaattggaatattaatctaataaatattagtcgagcaaaccttaagttaattatctaaaatatatggcatgacgtattaacatcgttaacatgagtctttacaagcgaaaacaatttattatcacgcgcagacatcgcgtgatacacgtgatcgacacgcgacactgtataaaacagcgtgcggacgacacgcgaaacaacgcgcacgacagcgcgcgacacgctcgagtcaatgtgactacgtgagcgaacagcacgatgacacgtaaacgatgttgcgcacgatcaataacaaacaagtaaattattaaaaatatttaagctggtagtaatcaagttaattaacatttatatttataaaagcacgagttgaaactatagactcgttctaattaagttgttattttattaaccttcttacaaaccaataattaaatatttagctataacatgcgacacgacaacaatgagcgcacgtgtgaccacgtgcaactgacgcgcgacatgcgtgcgaacagcacgagtgatccgcgcgagcgacgcacgcgattacgtgatactcgctaaaccacaatgagtttatactaaacaagtattaataatcaagttaatatttatttgtaaaagcgcgagatgaactataaactagttttaattagaaggtcataagtattgaataaaccactaattaagtaattaaaacttgtgacgtgataagataacattattaatacgaaatcgatgttgtcacgaagttgacacgactaaaacgagctgtaacg

SEQ ID NO: 38333 - DNA, 2897 bp, Arabidopsis thaliana landsberg
taaatatatatagctttttccgtacaacttttgtatagtacgtgtttttgttaacgttccacacttacactccaattctttttaaaagaaaccttttgtaaagatctatgatacatgtggagcaggaaaacatatgttctgttaaaaacttgcattttcacgttataaaagccaattaagaatagatttaactcaacacgatatcatgcatgagcaactttttggtcgatcggattttagttaagagttgggctggaatgttttcatgttctaataccaaaccgaattttaattatgatgaggttataaacttataattcaaccatgtccatgtcatatatgtgatggttttaacccgaccaacttgaaatctcggatcggagcggccgtaccaaatttggttcggatcgatattcagaacacagctgacgaactctcaatgccttatcagttgggcctgaacccaacgcagtactcctaccaagggatacgactcggcccatcatcgctaattaccaaacatgtagatcaaatcgtcattaccttttttctaacccaactaaaatcgtgattacttcaaacgacaaacgtagaaaagaaacacaaaactagccacgtcatcgatcctcccaagattaaaccaatcagaagcgaggacgcagatcgccaacgtcagtattcgctctcataagtcgaatcttgaccgtcgaaaatgtgaagattggaccacttctgtatttcctaatattaaccgactaaaacattcacctatataatcataatcaccttttactattcccacacaatcatcaagaaaacaaaactcgcttcctgataatcaaatcaaaagcttctctatcaagcttatcgaaaagtcacatcttttggaagaaacaatggctcgtaccaagcaaaccgctaggaaatccaccggaggtaaagctcccaggaagcagctggcgacaaaagcggcgaggaaatctgctccggccaccggaggagtgaagaagccacacagattcagacccggaactgttgctttaagagaaatcaggaagtaccagaagagcactgagcttcttatccgtaaactccctttccagaggcttgtcagagagatcgctcaggacttcaaaaccgatcttcgtttccagagcagtgccgtcgccgctcttcaagaagctgctgaagcatatttggttggtttgtttgaagacacaaatctgtgtgccattcatgccaagagggttacgatcatgcctaaagatgttcaattggcaagaaggattcgtggagagcgtgcttagaatcatgaactattattctattagggtttttggattgtttctgctttgtcttgcttttgtttacttttaacaaaaatacattatgttaaactctctttgagagatgattcggttattgatggtattaaaccttcattactctcttgttctgtgtatcgaattgataagccctgcgataatattccaaaccgataagccctgcgccgccgtcgtctctgtctcaaacacgtttctctgttctgttcgatttcctctgttttgaatgaaggagatacgttatgccgagttttgtttgtttttaaaaaacggcggcccaattatgtgtttgggctgtaaaaaaaatggctggcccaatatctttttcgattaattatatgagtttatatctcgaatataaactgtggtccagttttgttttttcaaacaaaaaaatgacccagttttgtataaaaatgttgctggcccaatatccagatataaaatcgatttaaccaaactaaccgaatgttagtgaactggattaaacctaaccgagtaaccgaactctcaggctagaattgatggtgtgatgatcattgtatttgaatgtgtttcttaattgccaaggaaaatcaaaatccagattttttttaactcactgtttcaacaacgattttgttgctctattgatttaggtattaagatttgatgtctttagaatcaccaactaggatttcttaattcgtaacagaggattaatcttgtgattgatcgtctagaatttttgctttgtttctatacttatttaactagaaaccgaaatcaataccaattctcaaaagctgtgaaaaaccggaaactcatgtcatttaaagtgtccacaataactaactaataactataattaaaagcacaaagattcgaactttacatttgtaaatttcttctcttactttacacttacatagtactaataagaatgtaaccaaatctctttgaatcttaggtccattatttggattgttgttttccctctcatatacaacaatgaaaattggtgtaagaaacttagttggacccgatatgaatttttctaaaaaatgtaagtggcggaatcctttgtgattgggtgtaaattgcgtaaaaatagttacgcacgatagttacacacgtcgcgagacgtgcaagacagttagaatctttgttggatcatatgacgtaactcactacgcagttgatgtctttgagaatctgacgtctctcttatcctaggctcacagatctttagagacacgacggtccttttttggattttccaacttaagaattcacatatatattcttctttatttccacaaaaatgcgcaaggaataaatcagtttagcatcattctcttgcccacgtgctcgcgtaataaacaaatgcgagatttcgtatctctttaaagtatctaaataatatgaatctcaccgactcggagaaataccaaagtatctgattccttataataattgaatactaacatacaattctacgaagtcaatttataaaaaaagtcttcaacactatttatgtttaaatgaaaaaaaccccattcacacctattgtaa

SEQ ID NO: 38334 - DNA, 1879 bp, Arabidopsis thaliana landsberg
atgaatcttgcgaaagatccctccccgctttttataattctgttatttgttggctattctacactgagagtttgtttatgtacagatggccaaccttgaagctgaagcctcagggatccatgacgatgtctaccaattaagaaatcacaagtattccagcttaggacgtggaaaatatagtggtacacaaaatttctatcgcgtaattgttcttttattcactgcatctctttctctttctctgttttagttttgccattaaatattgatgaagccagctggctaggatctcgttactgcatagtagaacaataatttctgatacgatattcaattatttgtttccttaattttcctccttatgcttcttttacatagcttcagtggagttgcatttagcttcctgtgttgttttgcttgacaatatttaatttctagaatgcagcacaactgcttcatctgatggtaaacaagagtttgaggatgtgtctgaggaagatgaaccttccttgcacgacacaaaggagttctttaacgaacctaacattggttctgaatcaaatttagctatttctggacacacggatatcaagagaagaacaaaacttcctgatccagctgaaaaagagaaaggtgttagtctttggtctatgatcaaagacaacgttggaaaggatctcacccgagtttgtcttcctgtttatttcaatgaaccaatatcttccctccaaaagtgttttgaagacttggagtactcttatctcttggaccaagcatatgaatacggaaaatccgtaagtgacaccaaagcctcttacttatcttgtacattactacattctgtttatcttatattgacttaaagcctattggataatcaggggaatggtctcttaacagccttaaatgttgctgcttttgcggtctctggatatgcttccactgaaggcaggcattgtaagcccttcaatcctttgcttggagaaacctatgaagccgactttcctgaaaaaggaatccgtttcttctctgagaaggtatgtcacacaaattttaactcaaatttagaatgtgatgaacataattgttagaatctttaccaagactagagaatatcattcttttggttataataggtcagtcaccatccaactgttatcgcctgccactgtgaaggtaaagggtggaagttttggggtgacactaacctcaggtcaaagttttgggggaggtcgattcaagtcgaacctgttggagttttgactctggagttcgatgatggagaagtatttcagtggagcaaggtatatacaaagtattaactactgctttcaagttacttttgcagatttttcatttgtccctgaagtaactttatacttcatctttgttcttaggtaacatcaactatatacaatatcatactaggtaaactctactgtgatcatcatggtgtgatgcaaatccgtgggaaccgccaatattcttgtacgctcaagtttaaggagcaatccattcttgagagaaatccccaccaggtgagtcacatagaaatgctctgtatatgtaaaaatgaattttatacttttgaatgtatgtggaaactgaatacttgaaataaaacatgatcaaatatacatataggtaaacggttttgtagaagacgtagcagggcaaaaagcagcaacaatatttggtaaatgggatgatagcctttactatgttgctggtgatggaatcaacaagtcgaaagtcagtgatcctgcatcaaatgcctcgttactgtggaaaaggaccaagccaccgcctaatgtaactagatacaacttaacctcatttgccattactctgaacgagctaacacctgggttacaggatg

SEQ ID NO: 38335 - DNA, 4069 bp, Arabidopsis thaliana landsberg
  unsure (1)..(4069): unsure at all n locations
tccaaacatggacaggtctcatacatttgaatacaaatgcaagatacaagaaaacatcagcatgagatgcaattatatttttgtattaaatactttatttatttaagaatgtctccaatatgcaacatatacacacattgtttgtagtcaaattaaaagtatattcaaaagttcatattcatctgttttgatagaaaagattttctaatgcataatctttcattaatagattgtttaactaattctacatagtttactacgccaaccattcatatttggaccttttatttaaccacttgtttcaaaacataactatttttacttcagaatattttgtttttctaaattacccaaaacgatattttggggtgttacatattcccacggctgactgaaccgtgaccgtcgtacttaacgacactattgggccatgcgcggggctgcctcgaattgctccactggttctaataaatttaccttttcagaatccgtgacagtcccgagaagacgtggcattggcgcaggcggtggtgcggtttctttgcacacggtaactggcacgccggttacatgacatgtgggcctgggccgctgagttgtgccgccagttgtggcagagctgagggggcgcacagccgtgggacggttgcacgcctcttgcgcggcgagtcgcctctttgaccgctggatacggtgaagatgaaggggtgcttaatcgtggggtggctgcatgccccttgcgcggtggttcgccttcctggtcgctggttgccccggaaatggaggggcgcataacagcagggtagttgcacgctccttcttagggttagtctgtatgacatgcggggcctggcccccgtgtcataaggtgggatcctcggtgcacgtcgggggagacttcacccgtgacgcttctgggtcacgagtggggggtctgcctttaaaaaggggtcgatctcccgggcagtagacatgcctcgctcctcttgtggccatcacgccctttcgccttccgggcctccaaatggggtgcgccaatgttctctggagggatccgcgtcaaggtcgtcccttccggcgacttcaccgtcggagagcacacgctcgtggtggtgttgccgatcttgccttcgtcttgctgccgttggaggggtgcaaccccgcgggagtaggcatctttccaccatcattcggcttcaaggattttcatcatgcagcccggtcgcagtccctcaccaatggtcattcgtaaggatgatcaccagccttgtggtggagagaagcgagccgggctgtggctcccccctaccctcagcttcaaggatgttcatcatccgcgctggggagggggccgggctgagtgggagctctacctcccgcgtgggttcgtggtcaccttctccctcagcattcaagggagatgggcgctcgcagccttgcagaggaggcgaactgccacctgctgcctagtcagggtgtggcagtccgtccaccgcacgggcgacggtcgcgctgtgcgaggttggccatgtccacggcctgtcttgtgccgccggccacgccggggggtcgtacaagacgtcgtacgccgcgggggcgtncncgcatccctggatggccttgtcctcactcccgtggcgaggacgggagtgaggacctccttgtgcgcgctggggcggccggcgctcgttggtgcggtgttggagcgcaggtggccgctatcgtcggtgctgaggtggtggtggccgccataggccactaggtgaggcttctcacgcagaggtggttgcctctgccgacgagaccatcggtgccagctgcgggcggacctccggctctttggctttaatggcttgtcctcacccctcagagaaaagacgtgggcgagggcctcgtcacagcagcgtcggccttgaggtcatcgctgctgctgttcagccgcccggagcaggggtcgttgttgctgttggtgtagtggctaccggcgagccactcggagtttgttatttcacaggccctctggtatggaggttgttcatacccacgagagcggaaccggagtcccgtttgtaaggagatataccgggtttttgccggagcaaaatgtaaccgccccaagtacttagacatttgtcgtaggtcgggagaactgccgagggttctgccgacatctaagtctgtgtagcatagttaccccaggtatatgtgcttgttctttgtagctgtcgaggcctgaacatttgggtattcgagaatgaagctgtgtgtcttcctcattccgagcgctgggacttgtctgttggctagccgaaccacttaaccgagcgtgagttgcctttcacggagggcgatgagtgaggtatccgtatctcggaggcgtaggaatccctcggctcggttggccttgccgcttacgcgcactcttgcccgtccatagggctctgtcaccgacgcagtcaagaaggcccgaagaatcgctttggcagaggggctttcgggcgtgaagacttgttcggtccgcggaatcacttatccgggcgcgagttacttatcgcagaaggtgatgagtgaggtatccgtatcccggaggcgtaggagtccctcagctcggtcagccttgccaccctaggcttctcttgctcagttatagaacccttggctgctctgcgatgagccggagccggaggcagcggtgtcagcgtggacagaggcggagtcggctcgagaagaagcttcgtcggcccggaagcacgtggcctccctgcccgaggaggtgtagcagcggcggctggagcttggccaggtcgtccgctagcaggaccaaccccgaagtcacgctgtcgaggccgtgagccgggctgatgtcctcgggggacagctggctgaggctacggagcggccggtcgaggtgtctgcccgggccgaaacccttgcggagaacctggccatgaggacccgagcacggtgtaggcgtcttcccttggggtggagatccttccacccgtatcgccgtccgaggctaggccaagttccgccgagggtgggaacgacgccaagggtgctgctgctccccttgccgatgtctgaacctgcaagaacagtttgtctgtagtatgcgtatgttttttgcggtcgctggggcctaaacattttaacgccagattataaagctgcgtctcttttccccttgtttcgagtacccagacttttttgtcggtaacagaattgtttgtgtgagcgagagttgcttctcacggaaggtgatgagtgaggtatccgtatcccggaggcgtaggagtccctcggctcggtcagccttgccgcttacgtgtactcttactcgtccgtaggattctgttatcgatatagtcgagaagacccgaaaaatcgcttcgacagaaaaatttccaagcattaagacttgttcggtcagcggaatcgcatatccgagcatgagttacttatcgcagaaggtgatgagtgaggtatccgtatcccggaggcgtaggagtccctcggctcggtcggccttggctgcttacgtgtacgccgtcgttttcaggatcccactttcgaagtagtcgaaaagcacgacagacgttctggcagaaagaccttttccaaggaaaattttgacgcggagggttccccccttctagcccccgagggagggtcaggctttgccgaggcaaggctgacccttccttgatggttagacttcatatgtaaacgaggtatatgaacggcttgaaaacatcttaaggatagaagcgacgtagctgtcggatgttccaagcgttactgtagacctcgccttgactgttggccagcttgtatgtcccgggctttaaaaccttggcgatgacgaacgacccttcccagggaggcgtgagcttgtgcgccctcgggcgtcttgtcgtagtcgaagcaccaagtcgcccacctggaggtctcgggaccgaacccctcgggcgtggtagcgtcgcagggactgctgataccgtgccgagtgtagtaaggccacgtcccgagcctcttccagctggtccagtgagtcttctcacgttgg

SEQ ID NO: 38336 - DNA, 1788 bp, Arabidopsis thaliana landsberg
gataatgtaatatacttttttattttatttgaaacagcgaattttttgtatagaaattaatattacccatacattgattgatattaatatctttggtaatgataataggttttttagtcaattatcctaaaacaccaatcatatcgttgtactattttaggttgtcaatccaaatgggtgtgatgctaacaatcaggatgtgatcagaagtcactaagtcaagccaagcaataacaggttttggtgtgttctagcagtcctaagtgaacatgcagaaaacagaaaatcaaacagaaacagtaaaacactcgactaacacagctatttgcagaaattaagcgacagataacaggatgcagtaaactacagtagagtaaacaaagaagtcaatcagataaacaattcccgaggatggggtaattgagtggtttcgttttctcagtttacaggtcattgacatgctcaataaattaaccctagacaacaagttcattaaccaaatctaagtgccaccgcaacagagactctcaagttaacctagtctcagactcaatcaccattgaagagagctaacctaacaggcattacgaatcaacaagttaaagccgaaacgctccctgcaaccaataccttggtacagggtcacgaatctctggaattagtggttcagacatttcatcgaacaccttttgggcgcggaaatgtctgggctcaaattccagttgatcagaaagcaataggcattaagaacaactaatccagaagggatatatcaaccaatactcaatcacctagcatactgagaattctacactactctaacccatcctcagaatcctattcaccactcagacatcataacagaaagcataaacgttgaacaagttgaaaacatgataacaacaatataacagcaagatgataacagaatgaacaacagtaaacgaaatcaagaacaaaagctgtatactgaataatgaatagataaagagaaatccggattacaaaaggtctagaacataaggtctacggaataaaactagataaaaacttcttgtctccgaaaatgagaagtacatgctacttatagccaaatattctgaaaccctaatactcaaaacgacgaagtattgggacggattaagaactgtactcgacccatgtggtcgagtgagaggtcgagtgaatagctggagtcttcttttcttccttgtgctcgagtgtctggttgagtgcggaatgaagaaggctctgaagcttgtcatcgagtatgcagtcaagtggtgtgatggtgatactcgacttccaggtagagtgatgaggtcgagtagaggtcaggcaatggggataagtcactcgacctgggggtcgagtgatgtgatcgagtggaggtcaggggatggagatgaagacactcgacttgggggtcgagtgatgtgatagagtggtggtgtcttctactcgacctggggtcgagtggtttgtaatgatcaggtccgcttcttccagttagcttgtcgacagctctaaatcacctgaaaacaacacaaatatgcaacatgcatgcaaaactatcctaaacatgcaaagtgatgacaaatgatgtgaaatggtataatccgtgatgatatgatgctaaagtgatgacaaatggatgctcaaaacatgcaaaatacacatttatcaactccccacaaacttagtctttgcttgccgtcaagcaaacaatcgagaacaagctggaagtgaggtttgaatgcggggactcagagccaaagcactagatag

SEQ ID NO: 38337 - DNA, 2681 bp, Arabidopsis thaliana landsberg
aaacttgcagatgggattactatgtattctatcgcttcagattcttatggaagagcatccatcattggtcctcttgtaaaggtatgttttctttactttgcttttaagccaattatctgtatcttgttttgattcttcatttttgtttccagtcgtgattttataacatcttctcctttacaggaacatggcaaaggaggaaaatgcattgtctttacccaaacaaaacgtgatgcagatcgccttgcatttggattggcgaaaagctataaatgtgaagctttacacggtgacatatctcaagctcagagagaaagaacacttgctggtttcagggatgggaatttcagtattcttgttgcaactgatgttgctgcccgtggacttgatgtgcccaacgtcgatttggtgagtgaaaactacactttttcttgctcttaactagttctgtttctcatttcattaacccgtattgtgctttgtgtataggtaattcattatgagcttcctaataacacggaaacgtttgttcaccgaacggggcgaactggtcgtgctggaaagaaaggaagtgcgattctcatccacggtcaagagcaaactagggctgttaaaatgattgagaaagaagtcggaagcagattcaatgaggttaatatctttctttaccgtctttgtatcttttttatgaatagcttgggtaacagttctgatctatttggttttgaattcagctgcctagcattgctgtggaaagaggaagcgcaggcatgtttgaaggagtaggtgctagatctggtgggtcgttcggaggaggtcgatcaggcggtggtgggtatggtagttacggtagcagcagtggccgttcaggtggtggtagttatggaggttatggtggcagcagtggccgttcaggtggtggtggtagttatggaggttcagggggatcaagcagccgttactctggtggttctgaccgctcatctggttttggaagctttggttcaggcggttcttcaggaggatttggtttagaccgttcttctcagtcaagtggaaggagcagctttggtggtggtcgttcaggcggatcatcaaacaatcgttcctctggtttcggggactttggctctgaccgttcttctcagtcaggcggaaggagcagctttggtgggtttggatcaaatgatgggaaaagatcttactgagagaagtgtttttggagccgagccggcaataattggtttgaccctaggaggagggaggattcggtgactcgagtagattagttactacggcggatacgaaggagtcaagttatatatataaatctgtagctatgtaaaacaaacatatactttcgaagttatgttatcatcatttcatatgaggtgattatcttcttttgcataatttgtttgtttatattgtcttgatatatgactatatgaggttcacaaaaaacagaaacacagaattattgaatttcattagattacgtagcaaaaataccaatgaacattaataaattggaaatactctctttttctcaatgttttcaagcccgattcatagtgttttcttagactatgtattcttgatgttttagatgatgaagaagactaccttgatgttttagatgttgatgaagaagactctcaataccgcctgaagtgaatgacttatatggtgagagaagcaaccaagattagttgttttgagtttacgatgtttaattaatttattttcttcattggtgatcttatagtcactttagacttataattggatttaaacattttaatattttaataatataatatttattatgattttagacttataattggatttaaacaatgtaatcactttattattatagttaaacttcatattttattattggtggtatgactatttttatttgtatatttataaaactatatatataacctcaataaaatattaagtatattaaataaattttaattaataacatgtgaccaaatctggttgactcagtgattcggtgatttagaaagtaattcaccgtgaattaaaaacattgttttttctcatccactaactttttaaaaatcaacaatagttaataataatttttagaaaaggggaaattgtctttatatataggttaaacacgtacaagtaatttctccgaattcttctgtttgtttcgtgacacataaacaagcataaaccctaaaagttaactatggcaatggagccgaagaagaagacgaagttgattagttccgacaacgattcaaagtggtcgccggttcttgcccctgacctgattcgatcgatcttcgaacgtttgaactttgcggagtttcatcgagctatgtcaatttctttagattggtattccactgcggaattatgctacagacaaaacccaactccatggctcattctcttttcaaactatagacatatttcgtgtaggttgtttgatcctcttcatgacaaaacctacgtaatacgagacctagggtttgatttccataggagttgttgtttggctacttctggtagctggttgttgatgttagatcatagaaccgatttttatcttttgaatctgtttactcgagagaggatttgtcttccgactttggaagcaatcgacccatgccagatgaagtttgagagggttg

SEQ ID NO: 38338 - DNA, 4672 bp, Arabidopsis thaliana landsberg
tcctcaatgtattgcttgtcggttaagtcaggagcaccaccaaggacttggatacgtgtctccacatcaccgtactgcgacactatcaatccatacacggtccatgcaacagggcagatccagtagtaccaaatccaccattttgggattttgggtcttggaatgaagaaaccagagaagaggttgaaaataccgtaaaacgctgaggcgaaaatcgaagcgacttgttggtttggtgtgagggaaacagtcatcatgccgtagtaagtccagtagaggaatgagaagtagctaacgaagacgaaccagaagaacttttcggctttccattcgaaaccaaccatggcgtagacgatgagtgagtagtaaacggtttgaataaggacatagggaagctcacaagtgacttgagagatggcatatggcatggctgagtacattcctgctgctctttctctgtagaacactgttctttccactgcaaccatcggttgtactgttgaacagttgttgattcccacgaagataatcgcggcatacaatgctcctatcaccattgttagatcccctgcgttcgacctgttacctccgatttgccagaagactgtaccaatcaagagagatgttgccaatgtgaagatgaaacggacaagattgtagtctggagatctccaatacgtccaccattgtttccataagcatgatttgaactgtccccatgtgttttgtgagaattgtgtagcaaagtaaagatctgatgctcctgctggtggtacacttagttcttttaccaacgctttgtttcgcctgcattttgttatgtattcattagtactattacttaaacaatcaatcagatgcaatgagccatggaaaagaaggaacttaaacttactggtgcaatgctgattgattgtataactcagcaaagtcaacactaagctttagctcagcggcgagtgagctagcttcgagcatccaagtggccgggttatacttttctggaatcttggacactccggggaaagattcaaagtactcaaccaccttgtgagagttttgacccaatggacccgcgtaaatcacttgtcctcctctcttcatcagcatcaattcatcaaatgcttcaaagatatcaatgctaggctgatgaatggtgcagaccacggttcttccagtgtccactgtgttccttaccgccctcatcacaatagccgctgctctagcgtctagccctgaagttggctcatccataaagatgatggaagggttggctacaagctccaccgcgattgtcagtctctttctctgctccgtggaaagccccgtgacacccggtaaaccaacaatggagtccctaagactgtccagctctaccaattccatcacttgatccacaaacatcattttttcatctttgccgacttctttaggaagacgaaggaaagcagagaaaatcagagattctctgactgttacttgcggggagtgaatatcggtctgctcacaatatcctgagattctagcaaatgtttcttgaacctttgggaatcctgatattctcacatctccttcaatgtatccacctgttttccttccggccaaaacgtccataagcgtagtcttaccggcaccactcactcccataagcgcagtcaaaactcctggcctaaatgcaccagtcacacctttaagcagttggagtcttgtttctgtaactccttggtctctcatttcctataccatcaaaagatatctatttagtttaagtaattcatatttaatttagtgtaaagattttaagtgaagatagttacttaccccaggcatgtcaacaaagtatttgacgtcgtcaaaggacatagctaaaggagtgaaaggaagaaccattcctttcttattgcctgcaccacctgatgcttcagccgcagagtccctactcattctccccattgcgacctctcctcctgatagcagggagcagaatgagacaagagtacaagaaaagcaaaacatctaagcagattaagaaatgtgtttacttacttctgttcccatctgcagtagacaaagatctacgcattggatctttcccctgatcagcgtcttcattttcttcttctggaagtaaacctgccttcttcccaagagctgtagtttcaaaggtacattattagtagtctattgtttttagatttggtaaaacgggtgatacaacacgagaacttacggttgagataggtaagtgccaaggtgaatagaatgttgaagagggctgtgaaacaaagcaaggctccaactgaaatccagtaccagttcttttgatggtagacatcccaagtattaagcaccatagttccaagctttattgtgctgttagaagaagcctgtaatttgaaaaaaatatgactcagaggcggctttactatgatatttgtttgtaaaatgcagaataaagaagtaagccacttaccattttgttcatccatctgggagcaaacatttcattgactactagaccgttgaaagcataggtgagaggagatacccagtaagcccaaccccaccagtcaggaatctcgcctttcggaagaaggaagcctccgagcaagaacacaagaagtagagtgagagcaccaccagtattagcaatcatcatggttctgcacacagaagcaatcaacctaaagagggatgcagccatttgttgaatcagaaacaccagaagaaactgcttgaagaagcggctggcgtcaggtgcaaaaccaatggagtaataagtcaccaccatccaagccgtcgattctaatattgagcttggaatcccaagcaagaaagtgggaagtgagaaggtccaggatggataaaacaagagatccctctgtttgtagaacacagggagtcttgaaaccatcatagccatctccgcaaacccattaaacatgttgatgatcattccaaatagcaatgctcctatgtagagattagcatcaccctcgtttcttgtgttcatttcggttctcaggaagagtgtagacgtgattgcagcaatgatgacgatctggacagtcttgaaaacatagaagaacgcgtttcgctgcataagcagccactctttgtcccaacagctcttgagaagctccctctttgagacagagtacttatcgaacacaagagctgctttgtggccgcgagacttatcgaacggtactgcaagttcgttagacatcttcgtcccaacatggaaactcttgtatctactggcaaactctgaaaccggaatgtagtgataaggtctgttcgggttcacccagtactgttcttgatctttcttggaagtaacctcttgcaggaaatcagctgttctttttctctcaggacacttgaacccgaagctctcaaagaactcaagtatgttgtctctcggtccttggtacacgatctgaccttccggcaccaagatgatatcatcgaataaatcaaaagtctcaggagcaggctggaggagagacatgagcaccgtggcttcattgaggtgaacgatttgttgcagacacttgacgatttggaaagtagtggaactgtcaagaccagtggatatttcgtccatgaagagtgtcttagtaggtccaacaatcatctcaccagttgtgacacgtttcttctgacctccagatatacctctcatcatgtcatctccaactattgtgtctttgcaaatgtcaagccccaaaatctgttacacggccaaagttagtattatacaaaaaaagactcaaaactttatgaacatgagaaaagattgtctagaacatttttagaatatgaaaacttatatcaatattctaaaataatgaaaccaaacggttaatgaataaattccggttcagtttcggtttataaaaaacgatttagttcgattcgattttatgagttgcttgcctagtaacaaacactcttcttgaaacaaaaagaacaagatgagctaagttaaggcgagagttggactcactttgagagtataatcagtgacgagactgttcttaacaccttgagcagcagaagctttcatgaagagatcaacatcggcttccgggaatatcccagcgtccttttctctcctcgcaagctcattcaacagatctacaacaacaagaatcaaaaccattcaacaaaactgaatcttgaaaaaaagatatgattaaagattgaatcttttacttaccataacgagtaccaacaccttgacacctagcagagaagtcaagagtctccttaacagtcatgataccaacatgaagatcgttctgactaatgtaagcagaggtctttctcggaacaaactcatcgagttggtaaccattgtaagtaatatcaccactgacttgtagagatttatcaagtttcccagctaaagccaacaaaagagtggtcttaccagaagaaggaggacccaacaaaagtgtcatcctttcaggtttaataaccccagagatatctttaagaatcgtaagctgagctttcttagcaaattgaataccaatcatacctaaagcagactctgccatgttcctcacaacattcaaaagtgttggaagagatctattaccagtgtcacaatcaactttaatcgtctaatgctcgtacctgacttcaacagtaggaagtttga

SEQ ID NO: 38339 - DNA, 2876 bp, Arabidopsis thaliana landsberg
cggggcatggtggtggtcgtttgagagagaagaaaaaaggaaagaaagaaaaagtgaagcagagcataaaagtagaagaagaatgatggagagcgagagaggagacgtcaatggctcttttctttctttctttaccgggagattttttatccctaataaataatgttattattatgttaatgtaagatgtggaggataaggttgtgctttttaaatcaaaactcgttttgctctaaattctataactaaactaaacacgtgggtctatttgattagtattattatttctttaaatgatgacgtggacagttaaatggatttggcaatcccctgcagataaccaacattattcattggaaagcatagtgatggaatataaaggtggtgctcatgtgcctaattattttgacactaattggtagcaacaataataatacgtcggtacatcacaccagtacataagcagatatggattttggtggtttgtgatcagtgagatgccttcgaatcatgttacataattcatcttccaagtactaaaacataagaaagtttttatttttggctttgcttataggtagttagcactaagttggtgccgaaacaaacaaaaagcatgaaattcaaacaaaaacgcgaacacaaggaacaccgaccaaatgtgcaaaagtgatggtcctgtcgtaatatctccaaaggtttgacatcttctaccggcatttgaaatgctattcacctcatctcaagggtgatatcatgaactccttacgttggcagcgaacctagaaaaaacatatgcgctgacactactgaatatataatattggactgaatgaatacgcacgggacatcacaccaatacattcacagactgcaatgtatatgtatatatatatattcactgttgattttgaaccagatatctgctttaactactggatgagtgattaaggcccaacatcgatggataatagtaacagcaaaccaaatttaaggaattgaggcagtggacccactccgactccgaggttctaatgtcctaatcatcacctttacctccatctccttttctcaggttctcgtaagggaatgtacttcaagctgcaattgaaaggactattcaatatcttcatctgttgttaccaatctcttcttgtgtctgctaagtggaaactctttcaacagcttcatcacctcatacgtccttgtctctcttccaaggtagaggcaaagcccaagcggagttaacccatcctggtatagtcaaaaacggtatcatcagttaatgctttcaaaaccagatatgggaatatacgcgggaacttgccttgttcttcacttctatgtccgccccttttatcaaaagaagctttacaatgtcgcttcttctggcctgtactgcaacgtgcagtggagtccacccgtcctgaaaacccagtgccaaattgtcaaccacctgatcaacaatgatgttgtcttacaatgaatgcttgacatcatcctaccctgtcctgagcgtttatatcatcgttatacagtaggagaagttttattgtgggagctgatgctgtttgcacagcatagtgcatcaaggtcgcaccttcctatcataaaccaaacggatcagatccagcatctgaagcgcaggggagatcataacaagatataaatatcattagttgaccacttacgtcatcaagaacaaatggatttgccgattccctcagaaggtagttagtaatagcctgcttcttaccaatgattgctcggtgaagtgctgtcaagccgccctagaaacgacaagaatggaaacaacactagaaagagacgccaacaaacataaacactgtgcacaaaagcaacagcttcaaaaaagtcagacataccacatcggttgcattgatatcaagattgtgctttagcaaggaatcaaccagataaaactctccacatgctgccagtgtgtgaagaggaagccattttttctgattcaccagaggtacacacacataaatacattttcatcagagactgaaaacattcactttgacgaagagcatcgtaaggggacttactgatgtggcaacggctaggtcaggattccggctattgagcataaacttttcttcttttgaaagcagctttcgagggcctaacgagggatcagccaaatataagctctttttgcaattcaagcaagagaaggaaacaagagtggtaaacgtataccgtcggatttcttgtcgctgggatcgtacttgtcgctattgaagaacttggcaacgtggtcgaatccctttccgtaaactgcccatctagggttcttaggagccactcgctcgctgggagatgatacagcggtctctccatcgcttgacgctccaaagtcgtcggagaaattgcccggtttatcgagaatgacaggcctcaactgagccaacttggcttccttgtacgtgagaaagtcattcaagtcaactttcctcagcggaattagcccttgtctcttcttctctacccgaaccccgaactccatctcctgcgctattttgcgcttgtccttcttcgtcagattcacctccgcctgaatatccctccattcctccggcacgaggttctcgggctcaatctcggattcatctaatctcttggccccgccacgccgattcttcttgcgctcctgcttcgcaacctgagtgacctccttctcaaggtaagggtcttcgaagacgccgtcctcgtagacgagacagtctccgacaatgaaatcatcgccggcatcggggaggatcgacgtttgagaagaataggaaagagagcgtaatctagtggggaaaacaagggagtgaagagagggagaaagacgagacggagag

SEQ ID NO: 38340 - DNA, 6835 bp, Arabidopsis thaliana landsberg
atcgtttagttttaaagttaaatcttgtttgaaccgcgcgatcatttttatcgtgacaatatatagttatatactggggtatgttttgtaaggttccaataatttagggtggcaacaattgaattttaataatcctaatggacagccaggtatgttggtcgtcgaatctcgaatcgactgaaccatcatatatagaagatttgataaatataactgagaaaataaatgcaatacaaaaatgaaccaccctaaacgtataatttacaagatagaggtcaatgatatgattagagagcctaattaaataagggacaggtattggaagttgaccaagtaaaaataagtatattaaaagtcaaataaaacatatattccaacatcaacatcagcatccagtgagaaacgttccttctgaaatgtttttatttgcaaaaaagaaagataatttgtcgaaagtgtttagggtttatgtttgggtgtttacagcaaacaacggtcccacgtataaacgtgactggtttgcgcgtttgaactgatgtcatgactgaccacaaatagatattcgccacgtgtattattacagataagtcatgacggccatgttgtgggtccctctgtagctgtttattattcattcaccactttgttgctgtttaatttggcgctgcgccgagccgacaaccaaaagatttttctctttttctgttgtcttaatgatgtcataccaaataatcccagcattgtagatttgtactaatatttttttcttagttcgacccattttattaccctaaaatatagacacaaaattgtgaatgttgttaatatgttcttttgtagtaaagacaatcaagtactctgtttttcttcttttcttttttgacataaggatatacatttttcagctttaaccaattggttggttcagatttctaaatttaagtgaataaatgaccaaaacgcttttaaaaaaataaaaatcaaaacgaatttcatttggttcttttgatattataaccatgaatgccaatgcatgcaaaggtacaacttcatgtcttcatcatttcagtgaggggccccaattgttagccatattaatgatcttcttacaagtactttaaagtttttgttgtacgtagtggtacagtaaaaatatagtaattgtttcaagcataaagcaaaaagttaccgataccataaacattagtttttgttataaaagttcttgttatacgtacgtggttgtattgatgatcgacttatataatcacaaagggttaactatttttgatatgggaattatcaaagcccggtgaaattaagagtccgaggaacaaagaggtcaacaacaacatcagctgaagccgacccgaccaaaatctcggctcctcctccacaaaatcaaaatacgtgattacgcgtaattttggtagactgcaatattaaataaaaaacttgtaagaaagaaactaattcatcagactttttttgataatctatacttaatttaaattaacaacgatcgtataaatgagaatcccacaaaccaaatagccagaactaataacaagactctttctctctccacctctctttctctcttaaatttcgttctgtctccggcgaagtcgccggcgggaagctaaaaggcaggttagaacgaattcccggcagacaatccaacaatgcgagggttattacgagcttcatcgcttcttctctgtggtgctattctgattcagctgcttgctgctcaaatccatgctcaaagtaaaaaacctaaaagtccatggccaacgctcactggtatgtcctctctcactttctctctttccagatagtaaatttcactttggtttctccatttgattttggtttgtgagaatttagccatatgggacagtttccaaatatagaattactttggatctctttttttgtgtattaaaatttttcacttttcttgaatttcgtgctcaggtgatcctcctcttgtgatagctcgtggtggattctctggattgttcccagattcgagttacgatgcttacaatttcgcaattctgacaagtgtaccagatgctgttctatggtgtgatgttcagctaaccaaagatgctcttggtatttgcttccctgatttaacaatgagcaattcttcatctattgaagctgtttaccctactcgacaaaaatcttacccggttaacggagttcctacttccggttggttcaccattgatttctccttgaaagatctcaaagatgttaactgtaagtgtccatggctctatctactgctttttgtaatgaggattttgtttaacttgtgtttttcacgtgttgcagtgatccgaggtattttatctcggtcagaaaagttcgatggtaattctaacccgattatgacggttcaaagcgtatccacgcagatgaaaccatcattcttctggttaaatgttcagcacgatgcgttctacgcgcagcacaatttgagcatgagcagttttctggttgcagcttcaaaaactgttctcattgacttcatctcttcccctgaagtgaacttctttaagaaaattgctggtcggttcgggcgtaatggaccaagtcttgtgttccggtttcttggtcaagacgagttcgagccaacgacaaacagaacttacggctctatcttgagtaacttgacttttgtcaagacgtttgcttcagggattcttgtccccaagtcttacatattgccacttgatgaccagcagtacttgcttcctcatacatccttggttcaagatgctcacaaagcaggattagaagtttttgtgtcaggttttgcaaatgatattgatattgcacacgactacagtttcgatccagtctctgagtatctatcttttgtggacaatggcaacttctctgttgatggtgtgctctctgattttcccataactgcatctgcatcccttggtaagcaaagtgtcgtctacagaataaagcattttctcgttaaaacattgctggaaatactcaaaattgagtcattgttttcatattttcctcagattgcttctcccacgttggcagaaacgctacaaaacaaggtatgggagttgattattttgctttgtatcttgccatgacttgtcataacctaatgaagaaccagtaattgactttatggttcttgtctcagtggattttcttgttataaccaaagatggtgcgagtggagactatcctggatgtacagacttggcatataagaaggcaatcaaagatggtgctgatgtaatcggattgctcggtccaattgtccagcgatggtacacccttttgtttaagttcgatcgatctcgggaacagcacgacggtctccctaactgctttcagaaaccgttcaacaactgttcctgagttgggctcacttggtgcaatatacactttcagtctcacatgggctgagatccagaccttgactcgtaagtttgtcttcaagctatctacttgctttctgataaatgttggtctgttttgtacactcttcttcctgctatttctagtaacttaaaagagattacatatatagatgcaaatgtctgggtcaaaaatacaggctcctttagaggatacataacttaagagttacaataactattctccaatctttttttgtttgcagctgctatttcaaacccctacagagtaaccagcctgtttaggaatccaaaacagaaaaatgctgggaagcttttctcactttctgatttcctaagcttggcaaaaaactccacctctctctccggtgttttgatcagtgtagaggtgagcacttgtgcacctcttagtcttacgattttatcaatcagaccgtgactgtcttctaatggccacaccactcatgtttgtcttttatgtcccccagaatgcggcatacctgagagaggagcaagggctcgacgttgtcaaagctgttcttgatacactcacacagactggctacagcaatagtacagccacaaaggtcatgattcagtcaacaaacagctcggttctagttgacttcaagaagcagagccagtacgagactgtctacaaagttgaagaaaacatccgtgatattctcgactctgctattgaagacataaagaaattcgctgatgctgttgtgatccaaaaattatcagtctttcctgtcgctcagtcgttcatcacaacgcaaaccaatgttgtggagaagctgcagaagtctcagctcccagtttatgtggaactgtttcagaatgagtttttatctcaaccatatgacttctttgctgatgcaaccgttgagataaactcttatatcactggagccggtataaatggaaccatcaccgagttcccttttacagctgcaagatacaaaagtaagtgagccaaattttgcaccaaaggtctcacaacacaaagttatttacatcaatgcctaactttttttctcttctgcagggaatctatgtttgggcagaaaagaaactataccttacatggcccctgcccaacccggtgccctcttaacccttgtgagtcctactgcctttcctccagccgaagctccaaacccggttttcacagatgctgatgtcactgagccaccactacctccggttaccgcaaaagccccaacctcatcccctggaaccccatcaaccaatgcacaagcacctagtggacaaacccgaatcactctatctcttctactttctgttttcgcaatggttcttgcctctcttctacttctgtgatcaacccttgatctcatctcctctgttgataatgtcttccaccctcgtaagattccctgtgtgtgactcagtcaaatcttaacagccagaaccataaattttttccgctagcgagtcttcgtgacaaccttctgtttatttgcagtgacgacttctctatgcatgtcgtctgcttatattctagttctgtccaaaaaacaacaggttattctttgagtgtgactttccctcggattcatttgagatattcatttgttgttgtatcatatactcttataatatttatgagactgtatcctttataaacacgatcaatctctttttccactgaataaaagaaattgatttttttttggttaataccttctgcttctcagttattaaaagattcttgtagaaactttttcccttccatctcctgtaacaactttttcacaagttggtctttcccttgatgcttaagtccattgcagacctgatgaacagtccttgaatcaagaggaattgatcttctgaccatttcccttagcacttgagatgctccatcaaaatcctcattcctacagaaggcagaaaccagcatgttgaatgtttgttcattcggatggcaaccactcctaatcatgcttttgtacagttcaaaaccacggtctgcatttttcctcacgcattgtcccattattagcgcagaaaaggttgacgagtttggcaccaaattctctttgtcgagttctttaacaaactgtgcagctttcctcgtcttagcttgtttgcatagtccaaatatcaacgcgttgtacgtcaaaatgtcacgttgaatcccgttgcagaccatatcttcataaaaccggaacgccatttcgtgatcaccctgttggctgtacccattaatcaacgtgttatacgtgacagtgttgggagccacgttgaccgctttcatctcaccgaaaaccttactagcttcttgtaacttcatagctctgcaaaacccatggatgagagtgttaaaagtaaccacattaggctgcagaccactctttcccatcatgttcttaagcttcaaagctgagctcaaaagacccttttcgcaatgtccggctatcaaagtattatacgacacatctgtagcccgaaaacccaatctttccatgtcttgtagtaactcaatgcccttgtcaagttttccagacctacaataacctgacattaccatgttgagagtgtatgggtttggagatatcttacaccgccgcatttctctgtaaaacctcaaagcaatatccaccctcccttgaccaagtaatgaactcatgtaagcattgcaagattcaacagttggaagaaacccataatccttcatctgcataaaagtatctgtagcatttctgaatttcttcaaatgagcaaaagttttgaagagtgaatcaaacactctaggcgtagaatcacattcccggtacgaatacaacaaagcatcaaatactttggcaggcaaatccacaccaccatttacaagtacatctctcaaaatggactctgcagacttgaacttgcggtttttagtgagagtgtgaagaactatagcatgggtttcaagagagtgagaacctgggtttcgggttttcgcccaattgaagaattcaagagaaagaagataatctttctgtatcttcagtaatacgttcttgaccctaaatgaatccaagtggtctgatagcttatttagcttatcccaatcagattgaatcaggtggctatgagcaacattgacgaaatcaagatcttggcctttaggttcaggattccttctgtgaggaatcggggtgtttgcagcgccgagagttttaaaaagcctagggttttcagatccactgtagccagcaaaacttgagaattgataacgcagacggcgattaactccgatgcttatgcgaatcatcgtgatttacaacccaagcagatttcacaagagactgttacagctaaaaatgaatcaaagcagagaattccaataagataaatagcttcgggaacggagtcacgcagattgt

SEQ ID NO: 38341 - DNA, 2971 bp, Arabidopsis thaliana landsberg
tctatggcaaggaaacatatgtggggtgaggcgtatgagcctctggtcgacgaccattttcaataataccgaagctaacacgtacgagtttttgaccaagaaatggtctccaccagaaatccaagaatgtgatctatggcaaggaaacatatgtggggtgaggtgtatgagcgtctggtcgatgatcaatggccacacaacccccatttttgtcgaaaatagccatgaacgaccattttcaataataccgagggctaacacctacgaatttttgaccaagaaatggtctccaccagaaatccaagaatgtgatctatggcaaggaaacatatgtggggttaggtgtatgagcctctagtcgatgatcaatggccacacaacccccatttttgtcgaaaatagccatgaacgaccattttcaataataccgaaggctaacacgtacggatttttgaccaagaaatggtctccaccagaaatccaagaatgtgatctatggcaaggaaacatatgtggggtgaggtgtatgagcctctggtcgacgatcaatggccacacaacccccattttttgtcgaaaatagccatgaacgaccattttcaataatatcgaaggctacacctacggatttttgaccaagaaatggtctccaccagaaatccaagaatgtgatctatggcaaggaaacatatgtggggtgaggtgtatgagcctctggtcgacgatcaatggccacacaacccccattttttatgaaaatagccatgagcgaccattttcaataatactagaggctaacacctacggattttagaccaagaaatggtctccaccagaaatccaagaatgtgatctatggcaaggaaacatatgtgggtgaggtgtatgagcgtctggtcgatgatcaatggccacacaacccccgatttttgtcgaaaatagccatgaacgaccattttcaataatactagaggctaagacctacggatttttgaccaagaaatggtctccaccagaaatccaagaatgtgatctatggcaaggaaacatatgtggagtgaggtgtacgatcctctggtcgatgatcaatggccacacaacccccgatttttgtcgaaaatagccatgaacgaccattttcaataataccgaagcgtaacacctacagaattttgaccaagaaatggtctccaccagaaatccaagaatgtgatctatggcaaggaaacatatgtggggtgaggtgtatgagcctctggtcgacgatcaatggccacacaacgcccattttttatgaaaatagccatgagcgaccttgaaaatagccatgagcgaccattttcaataatactagaggctaacacctacggattttagaccaagaaatggtctccaccagaaatccaagaatgtgatctatggcaaggaaacatatgtggggtgaggtgtatgagcgtctggtcgatgatcaatggccacacaacccccatttttgtcgaaaatagccatgaacgaccattttcaataataccgaaggctaacacctacggatttttgaccaagaaatggtctccaccagaaatccaagaatgtgatctatggcaaggaaacatatgtggggtgaggtgtatgagcctctggtcgatgatcattggccacacaacccccatttttgtcgaaaatagccatgaacgaccattttcaataatatcgaaggctaacacctacggatttttgaccaagaaatggtctccaccagaaatccaagaatgtgatctacgacaaggaaacatatgtggggtgaggtgtatgagcctctggtcgacgatcaatggccacacaacccccgattttgccgaaaatagccatgaatgaccattttcaataataccgaagtctaacagcgaccattttcaataatactagaggctaagacctacggatttttgaccaagaaatggtctccaccagaaatccaagaatgtgatctatggcaaggaaacatatgtggggtgaggtgtatgagcctctggtggaagatcaatggccacacaacccccatttttgtcaaaaatagccatgaatgaccattttcaataatatcgaaggctaacacctacggatttttgaccaagaaatggtctccaccagaaatccaagaatgtgatctatggcaaggaaacatatgtggggtgaggtgtatgagcctctagtcgatgatcaatggccacacaacccccattttttatgaaaatagccatgagcgaccttaaaaatagccatgagcgaccattttcaataatactagaggctaacacctacggattttagaccaagaaatggtctccaccagaaatccaagaatgtgatctatggcaaggaaacatatgtggggtgaggtctatgagcgtctggtcgatgatcaatggccacacaacccccatttttgtcgaaaatagccatgaacgaccattttcaataataccgaaggttaacacctacagatttttgaccaagaaatggtcaccaccagaaatccaagaatgtgatgtatggcaaggaaacatatgtggggtgaggtgtacgagcctctagtcaatgatcaatggccacacaacccccatttttgtcgaaaatagccatgaatgaccattttcaataatatcaaaggctaacacctatggattgttgaccaagaaatggtctccactagaaattcaagaatatgatttatggcaaggaaacatatgtggtgtgaggtgtatgagcctctagtcaatgatcaatggccaaacaacacccatttttgtcgaaaatagcatgaacaatcattttcaataataccgaaggctaacaccaacagatttttcaccaagaaatggtctccaccagaactctaagaatgtgatctatggcaaggaaacatatgtggggtgtggtgaatgagcgtctggtcaatccccaatggcca

SEQ ID NO: 38342 - DNA, 1498 bp, Arabidopsis thaliana landsberg
  unsure (1)..(1498): unsure at all n locations
tatttgacaagtccctgaagtttgtaggatttagtccaaactattttcattttgtatctgtggaatatataatactagtactatatgtttaatatgcgaagtgtgtatatatactcacaattcttgaagttgtgtcagattttttatacttggtagtatgctcccggtcaatccctgtgatgacaagttcctaataataatatcataaaatcacttcaaatgttagataaccatttaaagagtgttaattactttgttgtgtttttaattaaacttacaaggacgttactcttggtggagtggaaatttctttctctttgtagtagcattttagatgttcccaggaaatgtctggtggaacacatggatcgccttgccaactaattttagttagcctataagtatctttgatattcttgattaccgcaactgacatgaaaattggatgatgtgaaaattagacaattatataagtgnnnnnnnnnnnnnnnnnnnnngcaaaaaaaaagaaaagaaaaaaaaaggcttaacatcaagtaatcaattaaaatagtggaacttctgtgacctaccatcactttggttagtttccgcaaatggaaactcaatgatactgaaagcctcaatagcattaagtaaaggcggaagagttgatttcttcgttctttctagccgcaagaagcagtacccttcagggcattgtactgctgaaaaggttatagtaagtagctctaacttgggaggactaaaagctgaataattaaagtttcctttgaaaacaatgtcgaattccctcgtctcattggctgcaagggtttgtatctcagcgaaatgaagatagaagtaaacttcagcgttagagggtcttggtttccaagttatgattaagtggtgcaccagcgtttctaggcgtggcagcacttttgagtgcagattatggtatctcaaatgtatctgaattgtttatattgagactagtggttatataactaaacgaagagctgaagaatggataccagacacgatcataggagtcatcatcatacctgcaaataaattgcattaggcagcataattaagcaaatcaatccttgttatttgttaagagatttaaatagaaaaaaatagctgacacacacaaatctaatctcaatggaaactacatttatttcatacacgaatcatttttgtttacatgtttaaaaaaattgtataacgatatgatagtttgataataaataacaaaaaaaaaaaaagatgttgaaaattgattaaaacaaaacatgttgtgcggtgatagttgcaacttgtgcttttatcctatttaatcatgaataacgatgtttatatactaccaaaagtacaataatttatgtataagaaaattgatgccatgttgattaatgacagaaaactctcactcattctcttaaacaaagtcaactaattaccttaaataaatatcagaagtgctacaatgaacccggaaagagttcct

SEQ ID NO: 38343 - DNA, 137 bp, Arabidopsis thaliana landsberg
tgttgatcaagaaaaaaataaaaaatcactatgtgaaagcttcgatttttatatcatctcctctatcgctataccataagtacagcactgggtgaatcgatagagaaccttggcttctgtatcgatatgaatccatg

SEQ ID NO: 38344 - DNA, 4328 bp, Arabidopsis thaliana landsberg
  unsure (1)..(4328): unsure at all n locations
tttttttattttattttatttactttctgtgatcataattactgtattttaagtaggctaatcactgttcatgctatgggaaaataggaagtttaatttaaaattccgttatgttattgattcacgtagttaattgtttaccctgtgcaatgttgatcaactaaaagtgattaaggtttccattagtagatataaatatgtataacagagattattttgttaaaaaccaattgtgtcattagtgcataagatttagcccccctgcgagacctttcccgtttctttctagccataacaaatgcgttatcgaatgtcatacttgatgcatgttcgctttatttgttatcttgtatggtgtactgttcttttgtattaaatatgtggatgtatgtatgtatgtttgcgctcgcatagagaacgatccggtcgaagagcccgaggaattcgcaggagaagcccctgagcagcagtcgtttggtggaggcaagtgtcctttgacctatctatgtcctattcattctttaattcacctcccgcattacacatttatacctaaggattgactagcttttgttatccatgtccttgtttacctatttgggtcggattattactacttagtctgatgctattgctcaactctaatcaatgaacatgatgtgattatctatgatacgctgttttcccgttcttctttatgattatacttgtggttttcaagggggctcgagcggtttctcgagtgcctctccgtaaggacctgttctatggatgaccgcccgggaaaacagtgcaaccatgagggtggaatggggtgcccttagctgaataattagaggatccggggtgtagttcacttagccgtcgtgccgtcaatggggctcggtgtatgcggctcgctctgccaagtttgggttcgccccttggggaggagtgcggtgcatttaggaaacctaacgggtgctacagccccggggaatctttgtaaaggcttcgtagtgatgccctgctgggtcaccttggtagtgatcaatggagagtcatgatctccgggcagaatgggaatcacggcttgtgggtaaagtgcacaacctctgcagagtgttagaaaactgatatatcagccgtgctcgcggttatgagcggctaagggagctccagtgattagtggtacttgatcagagatactttggtttacagatggctatgagatcgatggttctggttatgactatggtgctggtaagtggtattctttccgtttggaaagggtacatcgggctaataacttgggttaatgctaaaacctggctttctattagtaaataataatctgaccaactaaaagcaactgcttgacttatccccacataaagctagtccactacagccaaacaggatacttgctgagtatgttgatgtgtactcacccttgctctacacaccaaacccccccatccccaggttgtcagcattgcaaccactgctcaggagaagatgaagctgtggaaggagacttccaggagttccaagactacgacgagttctaggcgtgggttagcggcaaacctccagtcggctgcctgtgaaggccgcgtttatctacgtttcttttccgcactttgatttattgtaaggactatatggatgtctcagacgtatgatgtaataaattactttttcgctatttatttcgagcactgtgtgatgatgtccatgttatgtaactgctgtgtacgtgaataactgatcctggcacgtacatggttcgcattcggttttccttctaaaaccgggtgtgacataagtggtatcaaatccgtgctgactgtaggaccgctaacctagaatagaatggtcgttctaaggactatagacctctgtccctgccttgactttgatatcccttcaaaagttggtcataccgaccaaacctatgttctactatatattataccttgctaaaaattgtgttttattctaatccttcatttatttatgattcattatttgctggtcatattaattctgttctcacccttttgcttgcgatgtcttttgtagatggctcgacttagacacactgcacgaaagtcagtcatccccttcttaccctcctgccttgctgagcgtccgcttcgccgtcccgtggccggacagtccagccacttggagagactgcaccaccgcctgcgtgaggagcaggagcgtcgacgacaggagcagcagggctcttccttctcgctccagcaggagatagagtctgtgaggagctgctctcctgtgcttcctctggaggcgccccctgcaccaccactgggcgtcccagcttctggagtagctgctggaggagacccagacgacggagatggcgacgacagctcgagccatgacaccgacttctctgctaaccttgagccggaaggatgggttgctcgacccatcactcgcgacgctgctcgcgggtgtcacttccacgatgcgctcgacaccctgctacgtcgggcatttgaccggcatacttggtccgttgagtatcgctgtgtggtctaccagcatagtcgcggggtctacccggaccgctgggaggcaacttgcttggtgcgctgccggagaacagtctccagggtgcagaggcctgctcagagcactattctatctctgaacgggactcagctgaggcagccatgcaagatgctgcacggcgtcgnctttcgcactactgctcggttttcggtggggcagctgacggtcttgacctgaagtattacccccgccgtccatctggcagcacaggaggcgtgattgtctcacctgtcggtgagggcaatcctaggttgagcagcacagtcaacctagccgccgtgctaaacacggagctggaccatgcattagacgagctgagtagggctcgtgctgagatcgccctgttgcgggctgagcgcgcggaacgtcgttatttggatggtggttccccgctcccgtcgggactcagcacccgtaccgctcacctcagcgtggacaccagtcttatggcaatcccgcctgcaagaccaagataactctagaaccatagatcgttagagttggatcttgtaattaatacgaaatatatatacatagaagcttcagtcttagcgttaatctcggtcttagttagtcttagttagacagggtagtttgctgtttcctgtgcatttatgtttgtcatgatgaactatgtttggtttggatctttgtaatgattgtcaccagagtgtgggtatcccctgcattttggtttacctattatgttaatggagttagttatatagttgggaaaccttttattccactttcctctttatctgagcagctgtgtggtctgtgttggagatcagtgaagatgctcatctgttcagtgctgttgaagaattctattctctttccttatgctgcaagatttgccagatcagttctgatgtgtggttgcattctgcaaatgtcagagaacaggcgcagaggaggaaggcgtgctcagcaggagcgagccgctcaacaggaagaggtgccccagcagcagcacctgccacccccgcccccgatgtccatcgagcagatgtttctgatgcagactcaggcagttcaagccatcggtcagaccttggccgccattcagcagcagcagcagcaacagcagcaggccccacctcagcctcagatgcctcagatgccagagacaagcgtgctgaattcatgagaggtcatccaccaacgttcgctcattcttctgaccccatggatgctgaagannnnnnnnnnnnnnnnnngcgggagttgcataccgctcagtgcaacgacagggagaaagttctgtatggtccccgtctgttgagaggagcagctcagtcttggtgggagtcttatctcgccactcatgccaaccccgacaccatcacttgggaagagttcagaggtagctttcgtcagtaccatgttcctgcaggtctgatgatagtaagaaggaggagttcctcgcactcaagcaagggtcattatcggttagtgagtaccaggacaggtttctgcaattgtctcgctatgctcctaaagatgtcaacaccgacgccaagagacagtatcgcttcctgagaggcttggttgaccctctacagtatcagctgatgaatcataccttcccgacatttcagcacctgattgatagggcaatcatgatagagaggaagcataaggagatggaggatcgcaagcgcaagatcagtggaccctagcctggaagcagcaatcgtcctcgtttctcaggcaatccactcagcagtttaggcaga

SEQ ID NO: 38345 - DNA, 2699 bp, Arabidopsis thaliana landsberg
  unsure (1)..(2699): unsure at all n locations
atctgtgtaaaataaagattatatataatttgtttacaccaaaactaaaggacttcaatttttttttaaaaacattgtaaaatagaatttaggaaaaaattcttaacccgagatatttatttatttaaatttaagtatgatggtttgttttattttaaactatataataagaaatgcaattgacaacaaaatgattgaaagagctacaaaacatatcaccattaaacgtcggatatctcaccaaaaccggccataataaaattgaaatccaaccacaatccatttttgttcaattaatgattcctaaacatggaaaagacagaaaacaagaaatggacggaaacgaaccatagtgccatgaaaaagtgtagatagagtgtttcaaactaacgatcaccagaacatatataagataagaggcatatatcaatttaaccaaacaaaacaaaacttattattaattttatcatttgatgcactcttcaagatttatcttcaggatcgggcctaatcaagcagtttcccaattttccctcagtgtcgagtctcgctcccaccattggtgaagtccgtgagctgtcgtagacttagtcggtttgttcttgtttacagtcatatctgctgatggaagaaggtgaagaggttccgatgacaaatccgacggtgatagttttcctcttcttcccaccaatagactcctaactgattttctagcaccgattctctcgatgtggcttgctcctatctcagacatgaaggttttgtgtctgaagtaatcgatgtatcctgcacatattggatctgctggattcacatataaataaggtatccatgatgctgtctttggatcgtcttttggaacctgtagtaatttaagacaaacagtttcttgtaagaaaatcaacttgtatatagtagtactcagtttggagtggccaacaaggaatctcaaatgaatgaaacttgatatttttatgtaatcgcaagtgaatgaaacttgttattttgactcttaagtagatcaaacaattttaatttaagactatttatttacctgtagatcggttaaggccatggctacggtggctttgacgacactcttggtgatttgaaacaaacctttaattatatcgccaccaggtagctgctctagaggaatagacgagatgggtgggttgaatatgtaactctcgaggaggaatccagaaattttcatggtctttccagccagcaacactagggcggctcccaaagagtgtccagcaagccagatagctgcttcactgtgtttgtccaccatactgcgtattgctcgtatggcctgcaaagacctaccgccttcatggagggtgttgaagctaaatttgagattatgtttcacatcagtcatccaagtatctgactctaggatcgtgccgcggaatgcaatcacataacgtggaggcgctttcgcatgtgaggtattttggcaaaggttggagagcttgtattcgaaaacagcaccgtatatggagctgtcgtagtcgtcgatcaaggtttcgactaaagagaagttgaaaaaatcccccccgggcatggctcgtgagtcagaaccacaccggttttgttgcctatctcgttccattgtgtacactccttgcactaaacatgataccaatgacgctcggtggtacaaattgttcctattgaaaaacaaaccaattacagtatatacaccacagaatcatcgagtagatatgtatattattttgtttgtgtcatcattaagaaatattacttgaatttaatgttgaaagacacatgcaaaagtatgtcgaagtcaaaagaaaaaagaaccaataaaaaaccatcggatgaagtggtatcaatatatttgtacagtcaattaattatttttgtctctcagatttttgttctgttaaaaaataatggtatctaaatcgaatttgcgatatttgagtaataattcgtgatcaatgtaatcatctactctttgtttaaaaaaaaaaaaagggcaaaaaagaatccataatcaatattattttggaagggaagatataaaatgaaactgcatatttaccagtcaaaagagggaattggagggggaccagaaaagctaaaaatctctctgcgtgaggccatcagcagctcctcctaattcacactttcaccgtcttctcttcttcttcttctttttatcacttacatgttagaatggtaaccattcatactacatacgaaaaaggtgatgtaactaacaataaaagtatatagtaattaactaaaacataaaattaaaataattaaagtgtatgatagatacaatgatatagctgtaaatacaaaaatatcaagtacccctggttttgtaactggtttcactttgtgagtgaagtgagagagctactgacgaaaccaaccaaaaacaaacacaggttgatgatcaacctgaagagaaagacatttgagctagttttaaaaattcattgtgattgttctaactctaagtcatctatttatatgatcaatgagaggaattgttgttttctctagaaataaaaattgtcaagatatacaaaaaataaaggaggactaaatattaatatgtcttgtgtatctccacggngaatttagccacaaatttccacaacaatttcctcttttttttttacaaaacgaataggaatatcaaacaaata

SEQ ID NO: 38346 - DNA, 2190 bp, Arabidopsis thaliana landsberg
aatataacttatgtaaataatactcctcatacttggatcttttgagccctaaataaaatctgagaatttattttaaaacgaagaaaataaaagaaaaaatgaagttgagaatttatgaaattatcaaaaaaaattaaactataaaaataatcttaaaatttaccatagttttgatattttcttatcaacatatcacgattgtttttttgacatatttgtgttctttattacgtttgaaagaaaaaacaaatcttattttagtatgaagttttagtttatattggaaattcttaagagttttttatcgtagataaggggaacgttgtgtttttggtaaggcaatggaagaatgactcctttatgctctagtgacttccatgttctttcttgaggaggaggaagaccattcttcttgtttttctttacaagactgaaataagaaatcctcttctaaaagttcttcacgctctatgtagactatctctttctccaagaaatatatactaccaaacacttttcattttgaaaaaacagtttttactcttcatcttatcttcagccatactagacacaaactcaacttcaagatcaaacaatgcttctaaaagccaactcaacccaacaaccatacttcacgcactctcttcaggtaaggatgtgatgattctttgagaccaaatggtcaataaatatatcaaagaagtctattatttccccttcctcgtttgttttgaaacacataactgactttattggtgatagtggtaagcagagcaaacgattcggctttcgtggtgaggagagccaaggagaggcttttggtggctaggagagccgaggagaggcttttggtggcaaggagaggcaaggagaggcttttggtggtgaagaagaaaaagtcattagtagtgaggtgaaagaaggagccattgataccatttgaatttgatttgatcttgatggtacctttggtggtgatgaaggagcctttggtggggaaaaagaaaacgcctttgatgatcttgataaacacagccatgaaagtatataaaagatattcaaaattgggaaatgttttcatgatagaaaatagaaataacttacttctaaatactctgaaacaagttcctattttatcataaagctacccatactccatgacctcatcagagacacagagaagagaagattttatcttactccatgacatgtaccatcaatctcatgtgacgtctaagcaagatattaacgagctcctaaatagagaggtgttcatctcgtttaaactttttttaagtttagggttggtttcaaattggtgtatcaacgccaccaccaatatacgtcatattcttgacatgtgcagagaagaaggatgtgaggagctttagtactcatagtagccataagaaaaaaaatacattacagtaaaacctcgataaattaatactctctataaattaataaatttttccggtcccgaattaggactaatgtaaaaattgatacaaatcgataaattaataagataaaaaaaattttttaaaatcttatgtaaatatatgatcagatcaatatcataaattaataattgtataaacttatcaatatatatatatatatatatgatagtaatttatttatatatatatatgtcatatatagattactataattatatagaaaatattttaatgaaattatgactctaatgttgttcatttttcttatatttggattattttttggtacaattcatttctaaaatttttactatatcaaaaagtttgtattgttttctaaacttcataattaattttctttttataattggttttagaaaaatattgattatattgaaacctgctttcagatataattttgtaagaaattaaaaaaattagtaaaatctctccataatttagtaattatatattaatggaatttctagagattttactgtagttttttaaaaaaaattcaactttcattaacttggatcaatgtaatctgagtgcaactcattggatatataagaaggaatatgaaaatgagatatgaagtctgaaacttctgtttgttgtttcttcgctaaaatgtctgcaggtttgatttgttgctcctagtgtccaattgtcaattgctcaaatattctctcccatgctcttctttcataggtccagttaacca

SEQ ID NO: 38347 - DNA, 4448 bp, Arabidopsis thaliana landsberg
tcagtttatccacgaagtgctcgtgctttcacaaattaaccacaggaacgtggtcaagatcttgggttgctgtctagagactgaagtccccttgttggtctatgaattcattaccaatggcacccttttcgatcacttgcacggttccatgtttgattcttctcttacatgggaacaccgcctcataatagcgatagaagtcgctggaactcttgcttatcttcactcctctgcttctattccaatcatccatcgcgatatcaaaactgcaaatattctcttggatgaaaacttaactgcaaaagtagccgactttggcgcttcgaagcttataccaatggataaagagcagctcacaactatggtgcaaggcactctaggctatttagacccagaatactataccacagggcttctgaacgagaagagcgatgtgtatagctttggggtagtcctcatggaactgctctcaggtcaaaaggcattgtgctttgaacggccacaggcttcaaaacatttggtgagttactttgtttctgccacggaagagaataggttgcatgagattattgacgaccaagtgttgaacgaggataatctgaaggagatccaggaagctgcaagaattgctgcagagtgtacaaggctaatgggagaggaaaggccaaggatgaaagaagtagctgcaaagctagaagccttgagggtcgagaaaaccaaacataagtggtcggatcagtatcctgaggagaatgaacacttgattggtggtcacatcttgtctgcacaaggcgaaaccagtagcagcattagctatgacagcatcaagaatgtaccaatattggacattgaaactggccgctgatattgctcacaatatcacatgtatctcttttgtttgtaaaaaaagaaaaccactcatttgttgcttcatcaatatgctttgagagcttgtttgttcatcatcaataatcatgttcatattttcctttacttggtatactaaccagtaaccgatctggttattggcaaatttaaaactcttgtgttaaattgtagttcataaaaatctaattccatatgagattgataatatacagatatagcttcaaacacatctcaataagaaacactagaatcccaaaaaaaaacataggcaaagaagagaaaagttatgatcataaacctgcttcctaaattcttcatctactgtaccacttcatcatcgattctgcatctttgaccatagcgaaagctttctttattttgcacggcaggcaggtcttctggaacatgatttttgacgtcacagcctcgaagccttggttcaacttcaaccccatcaaaaactcgtaacgctgctccttctctctcgcctcttcagctcgtttagtacactcgcaattgcaaccaccgcatttacactccggtttaggagcatactccgacaactccagaaaagcattgctcactttttcaaaatacttctttaccgagtcaccatcttgactcagctccatgattttccgacgagtctggtagatcttcaaatcaacgcttgggacgaatatacgtcggatactttcccatattttttgagccgtttcctcaaacgttacacgtttaccaagttcttcggtcatcgaattccgcaaccagcacgtaaccaatgagttgcattgttcccatcgattataaagcggcgaggaagcgtctggcttctcaagtttaccgtcgacgaacgcgaatttgttcgtgattcgaagtagatgtctgaaagaaagtttccagatagcgaagttgtcttcggcttggctgagtttttggatagagaaatcggagggatgatgaattattggcgggagataatacggagaatcgcggtctgaagttggagatacgctcttgataggttccgccattgtcggccctgctctgacagtctctctctgcttccaaatcctagggcttgctttgtatccctttcgattttgacttttttagtctcaaataaagaaataattttccaaaataagaaaagtcgcaattttttgtaaacagttgggcttaatgggccttgtatttcccctccctagcccaaagtttcagggattaccttacccattaaaggaccccgcgcatcattgggatatgatcttgttggtcattaatcaaagcgttgaacctggtgtcttcacatgacctgtatcttggttttggaggacaagaaacatcaaaaacacgtaatcagtttaccaaagctccttattaccgtgtaaccaagggactttgcatctatggttccatctattatggtgcttgggcccctagactaagaatggatccggtgaatggtgattgtgtgttttcatgttagatatgagaggctaagttttatcaaagtgcctagggatgttttggttcgggagtgtgaatcaatattgatagaatacaaagggaagttagcttccattgctagaaaccctttaagcttctctagttttgatttgtggatactagagaatgtcaagaaacatgttggtccaagcaaacatttgagcttcctttccctttggtcaatatgacttctcctggcaccaacaaggctggtgaaatcatttttgccccaaaatctctcccacccattcttcaacccttcttcattttctagtacaatgtaggaaaaaagacatcagaagagttaggctccatggaattgcagacgagaaagagttttgtcgccgatgtggactcaatgactcatacacgatatctgcgtctctatctcacccgaacatgttgaaactattgcctctttgtaatgtgtttttctttaaggaccttaatgtaggagaaagtggggacaagtcaacggaagcaagtcaagagaacatctcaagaatggagtgtgttttcttatatttaagaagcagatgctttggagagatgagagaaaccaatttagagagaaaaagagaaggagaatatgaagtttgcgattgagggtacaggaaaggccaaggatgaacgaagtagctgcagagttagagaccttgaaagtcaaaacaattaaaacataatcagtatcctgagacaagggagattgaacacttgctcggtgttcgaatattatcaacacagggagataccagtagccgtagttatgacagcatcaagaatattggacatcggagctctgacaaattcacacatgtcttttgtttgtaaaacatgaatcctacttctttgtaattgcctcatcaaattatgtattgagagaatattttgtgcatcatctatagttgttatactacccagtagtcaaataaccaaatttagagctcttatgcaaaatttcagttgacgaatctaattccatatgacattgataatgtaccaatatggattcaaaaaacacggaaacacgtcaaaaagaaacactataaaagcataaaaagttaaaatcacggacctgcaaattcctaaattcttcctcccattttccacttcatcatcgcttctgaatacacaaccatctcataagcttggtaaacagtcgaaggaatcttcttgtgcatgactttcattttcacatagtcaaactctttgttcaaacccatcagaaacgcgtaacgctgctctttctctctcgcctctgtagctcgtttctcactctcgcaatcgcaaccaccgcacttacactcctgcacaggatcatacgccttcaactccagccaagccttactcaatttcccaaaatactccgccacagagtcaccaccttgcctcagcgtcgcgagtctctgacgaagctcgtagatcttaaaatcaatacatggaacgaatatacgtctgagatcttcccatgctttatgcacagtctctgcttgcaacacatggttttgaagcgtatcggtcacggtattactcagccaatgcaaaacaatcgcgttgcattgtttccatggctcatagtatggagaggaagggtctggttttgggagagtaccgtcgatgaacccggttttgttcgtgaattgaaggagatcgaaaaatcgcagtttccaaatgccgtagttgtctttagcttcgctgagtttatcgattgcggtattggtgtgcatgttgaattggtgaagataatctggattgaaataatagggtgatttgatatcgagtgtgggagataataagctgatgatagtttccgccatcgtcgtcactgctctgactaactctgagctctgcttctctaattctagggctttgcttcgtatttatccacttcgatttttcacttttttaagtctataataattttaaatcagatgggcttcaatgggccttagattttccattcaaaacccaaatattgagcgtcaagatttttacattacaagcatgacgtcacacaaatgattcgtgtatgtttattttttgtgtgtctc

SEQ ID NO: 38348 - DNA, 3838 bp, Arabidopsis thaliana landsberg
gacttctaaacagaattgcaagtcgtccaccatgattcaccattctacctgtacaactttgaagcccctcaggtaaggcttcaagaccccagaagactgtccccatccccacaactaaatcgtacgcaagtatttggttcatgcaataaaagccgtacaacacgttatctatagggcaagattcgttgaaccataatcttcccaacgccaagtcttcctcgaatctaccctttttcggatcgtaaacaaacatagtattctgacctattctatagatcttatcattcatcacaaagaagttcatttgctcatccatgtccacattatccagacttaaaacagactcccaagttcgcttcttgaagttgaatacctcgacccaactcaaagacggagcgttacaacctccgacaacatataatttcccgtcgatcaatcccacggcggcgcatttacgtggctccttcatgttagggaggaagcgacaagtgtgagatctacaatcgatgacagacacagtagagactaattctccgtcaatgcatccaccaatgacgtaaatttcagaaccggacgagataatagttgttccatatccaggaattgaagggaatgatggaaccggaactaatctatggctaatctctattgttccaaagggttttagattgagtgtgtaccagctaagggtttttgtagcttctgatctaattgcaacatagaggatattttcagtgcgacgaattactgaccgttcgatgtagatctccggcgaagccattaaacgcctgaagttcctgcagacgagtgaaatcgccgggtagtaacatctcgggacgcgtgcgaagcaactcacagcgatttcgtcatgaagtattgccagagaagaagaagaagacgccgattgaagcagtttcttctgtggcgattctccggttattgagccaacggaactcgcggcggaacgagacatcaacgacaatggcgaaagagacgggagaagaaatgattttttaaagtattaatttcttcatcaaaatgggcctataaagcccatttctctcaaataggcctcattgtacaagagcaaaagagggcaacacataaaagaaacgacgagcatggaccattgaccagtttttaacatgacaaacaatacagagaaagctccatgaatcacgagcatgacactcgtaaatggtgcacacatgaccaaaacaaaatgattacgagtaactcctgattaaagagctctggcttaaggtgaacaaagtctagaactagagagagcaaaaagatcctggtgaccaacaataatcaattagctagattagatacattgacctttgcaaatgaacaaagatccagcatgtttgacattgtacataagacattcagacaactgacccatgctcatcaagtcctcttatgaacgtgacaagactcctttcgagctgcaaaaatgcccaaaaatctaaagcgtcagacttgttttcttatcacatacaatctttccagccataatttgcttctttccaaattggattttgttatcatgaatctttgcaaataaatagtggatgatgaatgagatgtgtagtgtgtgtcaaagtcaaaccttggtattgtcccaccgcggcgtggatcagactctgttgcttgtcggagagctcttgcaaaggccttaaaggtcgcttctattatgtgatgcgagtttttaccagcaagctgtcataataaatagaaatgaatcaaatcttatcaagaaaggtttgtcaacagatgaaacattaacgttctgttattgtcctcgtatgctttaagaaagattggaatcctaatacctgtcggatgtgaagagtcataccagaagtattcaccaatgactggaagaagtgttccaccaactaaatgggaaaagagtcatttagtgattttaacaaacaaagaaaacactagaaaaaccgaaaaactggatactaaaatactaaatgtgaagaacctgagtgtcgtatgttcctactctctgcgttggaatctctaagttgtatccaagatatggtctaccagatagatcctgccacattttcatccatcaacaaccaaaactgcttccggaaactccaaaccactgaacaaccaaactagatagataaaacagcaagtttacagattgtatcataccagggaaacatgtatgagtgcttcatcaagaggagctgtaaaatcgccaaaacgattaatccctttccgttccccgagtgcctttaacaaagcctaacataaacaaaaaatagcaatcaaaactacaaacttccaaagaatgctactctattaactcactagatagacaaaggaaaggcacttcactacttacagttccaatggcaagagcaacatcttcattagtatgatgatcatcaatgtgagtatcaccagtagctcttacgtgtacatcgaacaagccatgtgaagcaagttgctaatcaaaagaatcacaaacaacacttgataaaatttcaatacaacatatataaaatgaaccgactcataagtgtttaagctctttccaatgtcaaaaataatcaaacatgaggaaattttcaactcccagaaaatcaaattgatacggagaaaggtttagttacatctaacatatgatcaaggaaagggattccagtggagctatctgaaactccatgaccatccaaattaatcttcactgatacatttgtttcctttgtttctctcttcacttcacctattcgagctgattgaaatcaacaaaaactaagaaatcaggaaatgaatagtgaaatgagatttcattctcaggctacatagttaaagaagttaacctgattcgatgggtgaagccgtggtaatcgccggaaaaccgttatctccgggaggaggcgaagcgcaggagatagatggacgatgctgagattgagaattcattaccaggaatcgaggaggaggaggatgagaagaagcgattgatgttcgtggaggaagcaacgccctagacctgagatttggtctcagaagctgagccggtgaagaagagagcaactccatgcgatggttaggaagagtagagaaagaccacttgattttgattttgttacttaaactataacgacgtcgtataacctcaagtgtcgttaaaaaaaatatgagaacaagtgattgcctttgctctagtagcttgatggtctgcgaaggcactgtgaagtgtaacgcgtgacgtgttcgatgcttcgggcaaaggcactgagagagagacagagaagagaacaaagcagtgctacctcttaattgagtattaatttatagaggttttactgtgtataaaaatcatatgaggtattctaaaatacctctctttttttcttcatatagccacagaaaagatggaaatgtaaaatgttgactgcatagtctgcattagttgaaaagggagttgtatattgatatatcatttgggtgagtagcgaagaattggctgaattttttcaaatgaactatttgtttttgaatatagagttgatcaaatatcagtttttttcacaaacttccagcaaattccattagtgacatcagcgtttttcttaataaactcaatttgctacgacactacaaaaatttgaaacgtgacatcgttcgccttctctcgtagcttgtttggtcagcgaggcactgatagtgtaacgcttgacgtgatcgatgctcgagcaaggcattgagagagagagatgaaactaggctttgacgataatcatttgaggtattctaaaatatctctttttttagatagaaaagaaagattaggaaa

SEQ ID NO: 38349 - DNA, 2485 bp, Arabidopsis thaliana landsberg
  unsure (1)..(2485): unsure at all n locations
tattggttccccacgcgaactatctaacctggtcgataccgcctatagttttgtcgcctcccatatcaatgtcgctgtacaactgaagagatacggtcagaattgcgaagctaaagaaggaataaaaactggatagtttatttgttattggttatgtatgttaacaattaacaatcttttttgtgttatcggatattttgttatcggataagtattgtaacaatcacttattttgtttgttatcggataagtatgttaacagaagagatacagtcaaaattccgaagttaaagaaggagcaaaaactggatattttgtttgttatctgataagtatgttaacaattaacaatctttttggttgacaatcatttattttcgtttccaaagaaaatgtacgtgcgaagttacacgaatctaacataacaggtaagaaaaatattttcgaaataagttacaatctaacatgccgatgatcatccccctataacgaaattgaaaaccaaattaacaatattttttcacgatcggttactaatttgttacccgataataatgtgaataccaattaacaagccacacaaagactttaaccaaaggttgtcaactatacaaccgttttaaatatttattcaacacacgaactatctaacctggtcgttaccgactgtagttttatggcttcccatatcaatgtcgccctacaacataagagatacggtcggaattacgaagctaaagaaggagtaaaaactggatattttgtttgttatcggatatgtatgttaacaattaacaatcttttttgtgttatcggatatcagatatgttattatcggataagtatgttaacaatcagatattttgtttgttattggataagtatgttaacagaagagatacggtcggaattgcgaagttaaagaagtatgttaacaattaacaatctttttggttgacaatcatttattttcgtttccgaaaaaaatatacggccgaagttacactaatctagcataacaggtaagaaaaatgttattgaaataaattacaatnnnnnnnnnnnnnnnnnnnnnttctataacgaaattaaaaaccaaattaacaatattttttcacgaccggttactaatttgttacccgataatagtgtgaataacaatcatgctggacaattgttaacatactgtttccttttctctgtaaaaaaaatcacaaattcactttatctataccctattcaatttactgtttctatacagagaaaaggaaaaagtagtataatgagtgacttaattttacagttttctgagtatatatagtgataatacccaacaaagcatactgaaagtcaatatttgttaaacaaaaaaagaatcacaaattctaaaatctgaaaacatagatattgttacactttctatacaatttactatcatggataggttatagataaagtgaattgcaaaactaaccaaatataataattgaattaagaatctcagacctatttgaaatattaagaaagtaacatatatagtaagtaaaatgaccagaggtgaaaatggtggtggtggcttcggtccggtgatggtggctctgacaactgtgtctcgaagacagtgactccggcggtggtggagataataaaaatataattgtatttaatatacattcacacataaaaagttagtttttcttttggttagttatttaaattgtttactagatcctgacccacacatacgtgcaggatttcatatttttgggatttcatattttaagttcaatgtagattattttgttattttgtgatatatattatagtataatgtattagatatctgaactcgaatatacgtacaaaatatataaaaaagtaatagatttttaaaatatatataatattttgtaataagtaaactttgtaatagtatagatattataaaggtaagagtaacaaccaaaattcaattgtgttcgtgtatagttatattttaaaatctggactcacactgggaaatacgacagactaaaagcaaatttatatcttatttcacaccagtaatcaaactgttatattgttttgattagtttagaaaataaaaatgtatatttgacgtatatttcttggaatggaaaacccataatgtgatgtatctatcataaatttttcgtctcataacccgtctgtatatgtgaatagaagtactaccagcccatatccatcacaaatagaatttgtgtcagaaaatacgtatatgcagggttatgtgtgtaaacaaatttattttatatagtgctcataaccaaaactcataccagttggatatttaatttgatgtccagtttggtttcaatttattttatataatcttccgtttcttttcatatcgtttgtgtctcataatttcaaatttcatttcaatcaattaaaagtacgttccaaaattcttatttgtttacctttaataaccatattatat

SEQ ID NO: 38350 - DNA, 10369 bp, Arabidopsis thaliana landsberg
  unsure (1)..(10369): unsure at all n locations
cactgtatcacaaatgaagccaaaaccatcttcctataacttttatctgattctggttatctttcagcgtggattggttgcaaataacagagcaatctcacgccaaacactgcatgactacagaatgttactgatggaaaatgggtaaatgggtaaatgcatccttggttccataaacgtgtgaaatttgtgaataagacggaagaattcgtaaaaaagggaaatagtaacatccattggtttgtttcttttcttcaccaacaacaatacaaaacatctaaacctacgaagaaaccacacacaacaaaagaaaacaaagattgttgtagcttcatctgagaaaaaagtactctcgctcttagttaactttggtatattttctatctttgcacaagatgtgccattcttggagcactgctgcctgaagcgccatgtgctctgtttcttctgctgtcagcttagaaaatgttcctttttccttctcttttttcttcttctcttccttgtcctttccctcttctttctcctttttctcttttacttcttcatcatcatcttcttcttctccttcttcttcttcttcgttttctgattcctcctctatctttggagtcttcttcggctgagctgccttcaacaaagctatcctctccatagagatcttcagcttctcggccgcggttgccttcacttcgtcctctggcatgtactcaacgcccccgtcagttagatcatcacaccatccctgaatatccgactctatttgctttgtgattgatgcttctgatgctctaaccacaaacttgcacatcatggtggtagtctcgtcacccagatccatgttcctgctcacttcactagcgccaaagatcatcatacccacaaaacctccatgccacgtttttgcagcgtaacaaagctgtagtgacatcaagttaggggtttatcagaccatcaatccagttaaggaacaagaagaataacagaaccaagttcacctgaaagccagcaactgtgcgtataatgtgggaacagactctgtggaatggcttcgaggataatgatttgagtccgcttaaaaatggtgaagccccatactgttgtgcggcggtcgccatgaagccgcttccttcatacatatatgtgccagtgtactctgcaacagctggcaagctaggccacaaacgaaagaactcgactggtgagattttgtgcggtagaagaagctcagtcagtgggatcttgtaaggctgacatcttaagatcacaggctctccgagttctgcttttgaacctctcttctgcttcatgatctgtggatcctcttctatgtagtcaccgtcatattctcccctagcaccacggaatggatagtagaggacttgaacccagaaaccacatctttcaaattgggacacaccaacggtgacactgcattgtacaggatcctacaaaagtaaatcacagagtccatgataatacagctaacatatacgaaactgattgattggtaagaacagaaacggtttccaactgacaagacttaagaaattagagaactgtaaagagatgggagtatataagcactgaagaatgacatgcaacctgtgagacaagattacgcaactgccgcactgcttgaggagagccatccatgaagtatagggcaccagataatccaacccgtatatccacacgattcagttcaagttctgtcaaattaataatctgaaaggtaacataaagtataaggtgttgagacgctaaaactttatccactaaaactgtattcaagtaactgcaggatggtacagtagaatatataccaaccttcaagtgcaaagtgacccttccatcatttgtatctgctaaatggtaagcttctatatagcaaggatcactgcttccggtcaaaggatatgctgtgggaggaaccttgatagaagttgagtcgaccccttttgtaaggaagagagttaattcagtgggctttggcctccaaagctcgagaatggccttgtgaattagaccttctaatttcctgtcttgagcagctgatggttcgtaaaactgaacagtaagcttatggtggctaaacgggtaatctcctcttgtctcactaactccagcccacctggaaaataataggttgtctgagttccaatccagaaatgcagtaaaactcacataataaaaggattacaagccaagggaaagctcactttctttcaggaagatttgaaacatatttgatcctctgcaatattaaacgggtttgatgtttgctaacnnnnnnnnnnnnnnnnnnnnncctatactcttcaagctctttggttaataactggccagctcttgcatgacgcgatcccatcctctgggcgcataataagactgcctgaacatcttgtagcatattcgatgtagtagcagcggcatccaagttgaagagaccttatgtatgtttgctatgataatattcaatggatcatcggggtcatcagctaaaagtggatctagaccttctagatcaatatgttctgcgattgtccatataagacgcccgaggattcttggggtatttacctgccaaattgagatcaagatttttataagacattgaccacgtttcagtccacaagcaatagttctcctccacatttagtattaaatagtacttaagaaagcctaactaaaattcttcgaggaaaattgccaagggttacttctaactttcagctgaggcttaattacctcttggagatccttaacaagctcacgttgcaagttctgcaatcgtgtctcatttaatatttgatcctgggaagcaccatctttcagcctcttcactcctccacgggtatcatagatatggcacagcctaacaagcaatttcaaatagcaatctacagcgtacgtcctgccatcacaatcccatttgacacaaggcctacaaacttccacaacctcaagggctggttctgtccagttcagagcaccataaccagtaccatatgctaacgcaccaatcactctgctctccatacccgagtttttttgttcaggcaaaggtagagacaactggaagcagctttccacaagcattgccaccagctcttcccgaaataagctcttactggtaacactattgagatcatctttaatccttgcatcttcaaagagagaaataatatctgtcccaggcagaggcttctgacctcttcgggcactttctctggcaaaaaggtgaacacagagagctgtccgacagatacaggctaatgcgtgcatcctgtccgattctgctctcaagtttctcaccataagcagcagtcttctaaacaaagaaaccttcgtaacaaattccaaaaagaatgattcagaaatcataggccacagcttcaagacaaaggtacacaactaaccgagcttcaatgaagtaaaaaacgacatacctgcatatgcagatcaagcaagtgcaggttcgtaacaacggccctgactatactctctctagcagaggaaaattcttggcggtcccagagtgttaaaattgcaataatggactgtgaagcccactctggcttgcctccggcaacatctgccaggtagagcatgttaattcccacttcaaaaatcaaagctggatccaaagaggaagccaagaatggcgccaaatgggtaaccaaatctgagacgccaaccagcttctcggcgttggagtccacaacggtggcattagctgcagcagcagcagaggaagccttggaaagctgtctaatcacttcgacactaccggaagcaacagctttgacagcaaagacaagagggaaaacagtggctctgaaggtttcgacaggaaggactaaagacctagccatcaaagcgctcctctttctccatacaatgtcaaccatggaagagacccacttggacctgatggcgagggagttctcgctgtcaacgagcttatcgccagcaagacggctcatccgcttggagtcgaactcctggaagagtctgccgacggactcaaaggcaaccttggagacggcgtcggatttgtcgagcatgttctggccgatccgagcccaccagttggagaccttgtcgaggagacccacattgttctcgcacaaagtaacgagatcatcacgcgcgaggatgcagccaagtgtctcggtgatggaaaaacgaaggttgtcagatggagaatcgaagcaggaagcaatctcagagctgcaatcagagatgagtttaggaagcgagaaggcagggagagccgcaaggatggagacggcagcggcggtaacatccgggtccggaaaatgaagatccgttttgacacctgagcaaacggtgtcccaaagatccggagtgaggcgggtagatcggatgagatcgaatgccagcttcttacaaacagctgaagccggagaagcaacaatctcctccacagcagacttagcgatcacagagatatctcttccggcggcggattgctgcagcgcctgaagaagcgccgatgactggcgaagcgcgtcatttgaacggaggtccgcctggatctgagcaaaaagaatgtccataaccggatcgaattaactgaaattcgagatccaaaatctgagctaactagcttcgctgtcaatctgtgaacgtatgcgacatggaactggaagaagaaggatgtgtaaatcaaaccatcaactgaagaagaaggagaagaaattgttttcgaaggaaaaaagcgcgtgccgttcctgcgattcgagctttcatagcgtgccgtgttgagtcatccgtagacccaataaaggcacattaaaaagttcattgggctttacattataagcccaggatattatttttatgcaccgaagtatttgcattcgattttaattcgagggatcagatccgacggtccagattgagtcctgcccagtagcaaaacggcgttagacgcagcattcgttagggacgggacactagagaagggagggcagagagcgattttgttctctctctacttctcggtcgtcttcttcgtctccactctagggttttactctatcttcttcttcatcatcatcttctacaccaatctctagcgttaatctgtttctgctggagaagatttacgcttgttcctcggttctcttacttctgctccggttcgatcgcttgctaagtatttcgagttggttagttccgaatttccttttttatgcatattgagtgttcactgctctcctccagcaatattatagggctctaagaattgaattgctttcaggttttcatagttagggtttctcaaaactgacttaaatattttgatttgtgcaggttcgcacttcggtgggcgatatcatgactgtgaggaacggtggtttcccaggagattataatcgtaacagttttgactctcccggcggctgtgatgatagccccaatgcttccaaggatgatgaaacttttggtgtcccgagaatagttttacccttgtctgacttgtcatcatcggaaaggagaaagtggattcatacgcttcgcaggcctggccgaatcggtccttcaaaagagttctgggtgccttccggcatacatgctcagatggttgttttgttgtaggatatgctttcaatgagtatgttaaacgctagctgtcctgtttaatggaccggtgtatgtcatcttgtcttgcattgtgtgaccacaacaacttgcaatcagctgaaagaaacgtgtttccattgatgttgtagcagtctctcacattaagctctggtttggatggctatgacctatgaacaagttgattggtagataagttaagatggtgtgatttgaatttggaatgaatagaaagatgtgattggtactgatgtaaattcaatgctttagagaatgtaaatatgcaatggctcttctatgtcctattgactttcagtgacctccttatgcttattgctgactaagagccactcctctttgctgttgcaatttgtcaatcgttctagatatggcttccatttcaaatcatgatatgcattcgctttttccatgtggcgttcggaaatctttcatctactacgttgcaagttttgcaaaatgtttaaattagtagaatctcacgtatataaaaacttcagtcgccaaattgaaaatggagaatgaatggtaaactactagtttaccctcagattttagctgaaatatatcgtcatagctgacgaagaaattagaaacaacaagcaacgtgtcacttctcatgtcgtcgttttccccaagaaatatccaaactaaacaaccaattacctaacgccacgtgtttactcacactcctttaaacaagctcgtaactgtttcatcttcttgtccccaaagtctcctcttccttatctcttggaaaccaagaagcatggatcgtgtggtcttcttcttcctcgtcgccgccacgttactagcagtttctctcggatccgccgtaatctccgtcgaggtaaacgacggtttcgttaacccgatcaggcaagtcgtcccggagcagaacgatgaacaactcctcaacgcagaacatcacttcactctattcaaatccaagtacgagaagacttacgcgactcaggtagagcacgatcatcggttccgtgtcttcaaagctaacctaagacgagctaggcgtaaccagcttctagatccgtctgccgtccacggcgtcacgcagttctcagatcttactccgaaagaattccgccgcaagttcttaggactgaaacgccgagggtttcgtcttcctactgatacacagacggcgcctattcttccgactagcgatcttccgacggagttcgattggcgtgaacaaggagccgtcacacctgttaaaaaccaggtttatagagatttcaaattcgtatggattagctttgtaatcgttcatggagcttatagagagtgaagtgattgtgtgttttgattgtgaatagggtatgtgtggttcatgctggtcatttagtgcgataggagctcttgaaggagcacattttctagccactaaagagcttgttagcctcagtgagcagcagctcgtagattgcgaccatgaggtttgtttgtttctcatttgatatgtgttttggtaaagtggttgtgactaatttatatatgttttcttgcagtgtgatccagcacaagccaattcatgtgactctggttgcagtggaggactaatgaacaacgcttttgagtacgctcttaaagctggtggtctaatgaaggaagaggactatccttatacaggacgtgaccataccgcttgtaagttcgacaagagcaaaattgttgcgagtgtgtctaacttcagcgttgtctcttcggatgaagaccaaatcgctgctaatctagtccagcatggacctctagctagtaagtttgaaaactctgtttaccttgttactaatttaagaattagatattaacacaacatggtctcttttacagttgctatcaatgcgatgtggatgcaaacatacataggaggagtctcgtgcccgtatgtatgttcaaagagccaagaccatggagtgctcttggttgggtttggttcatcgggttatgcaccaatccgtcttaaggagaagccttattggattatcaagaactcatggggagcgatgtggggagagcatggttactacaaaatctgcagaggacctcataatatgtgtggtatactagtatggatacaatggtatctactgttgctgttgttcataccttacccaagtagaattattaggacactacctatctgtccttgtgtatatgtatgtatggttgcataaagatactatgaacttttatcgttaatattgtgtctctgtttcaacttttaatgtaaaatagcttgggggtattttctttgtagcatcgaatgcttaagatgataatatgatatgattatcaaattattataagttggaacttggaataatagaaattttatatgttttattttattattgtttaaaacaataaaactccatgagtcataaaagacagaacatcagcatattgttgtcaatacaaagacttattccaaggataacaaagatcaaacttcttcgtttcatcgttaaacctacaaggtccgtttcttcttatcttccacacacacctgtcgctctcgcacttgttatcaccgccgctatctcgatggtctttatatatatcgaacgaatgcgattcatttggccaactaaaactacaaaaatacaacgtccttccaaagaattgacgcccgaaactaaaagaccacgactcacctggttgcagactccggttacctaaatcatcgtcttttgatttacaatgatacagtaacgttagctgattaccgagatcattattgatttccacggttcttttcgagctaggaaacacagaatttgttgatgatgaatcgttgggaactggaatgtcgtttttatggtcggcttgtgataattttgtagttatgaagataatcaatatgaatagtgatagatattgctttggaatatccatttttttgaataggagagggagtttaagctagcacaatgttgtttgtaaatgtcgaatgagttatatactgtgtgttgtttgttacaagtcaagtagtcaacgatcctttccacttattttcattatattgtatccgaatctaccttttccttaaaattgatgtattgtcagtatgtgccatgtggtcaaggcacgttaattgctgtcaagcaaatgtagactgaattaggtatgtcaattttgagtatcttggttttgaaaacattggcaattttaaatagaaaaaatgtcattataatctttaacttattgaaaacattgatttaaatccttcatgtctgtcgaaacaaaataagatatcaaatttatgttgacttttcaaataaatatcaaacttacgttaacttttcaaataaataccaaactttcattgatttggccatttagttatgatgttaaatgggttagcaaatcccgttaatagagttaattttctattaacatacatgtcaactgaaaacgacattgtttcctataacaataatacgacgtcattttgttgtaacgattaaactaaatccccaaaattcaatcttaggtcccaaaatcgagcaaaatctctaattccaagggggatgtattcaactggagatttgaaatcatttgaattttaatgagtttttaaatgattttggtgacttttggtaaattaggagatttgttattaaaattctacttgaaaccatgagatttggatgtttgaatttttaagtaagaaattttctacaatcccacccaaaatcactcaagtcattttaaatccactacttaaattgtttccaataacagtggatttggttgtacattttaaaatcactaatctaataacacttgattttaaaaaagtttttacaattcatgtttgattaacatgggatttgtcattttaatacaaatcatttcaaatccttaattgaatacacccccctaaatctttatatgatttgaaactcagaaatttaatgagtagttatgataaaacaacgtcgttttagattgttagagaagaatgctatcgttttcaattaacgggtttgttaacagaaaattgtctccattaacatagttaacatcatgcctactatctcccccctccccccccccttttttttgttttgggtacactacactaataagctctaaaatgatgcttggaaaatgaatttcataaattctaccagatttttttgtaagaatctcaaaatttaataagtttcgatttttaattgaggtacccaaacttttttaaaacaatttaggtgcccaactttacttgatttgttttacacttatcaagcaaacaaagatatgattgaagacactaataaaaatgtcaactaagataattttataatataaagtatggtttttaaattagtagtttataagattgtgccacgtaacaactttttcgatcttatattttaacatgtgtaagacaaaaatttcattttattaatttcaaactgtaaaaagataactataaaaaattaaaaattttgaaagtaaaaaaacaattatatggaaataagataattataagaacactatctgtctttattaaataaaaatagaaattaaaaaattattgattaattctaatttgaagctactaattgtaaaacaaaaaaaagaaatgcaataattttggaaattttacaattaatcattagttacagaaggaaaaagtataaagtcaaggttaggggattgtcggttctgttgatttgagatagtgtgg

SEQ ID NO: 38351 - DNA, 4223 bp, Arabidopsis thaliana landsberg
ggctacgtttaagtagaattcgatcatatcgcagcttagaacttccaacttgaacattgatttcatctgatttatctggtgctttggctctgagtccccgctttcaaacctcacctccagcttgttcttaattgtttgctttagggcaagcaaatactaaatttgggggagttgataagtgtgcattttacatgttttggaacactccgagccatctccattagtgttctattacatctttcaaccacaccgttctgttgtggtgtgtagggtgccgtgagatgcccttgtataccaacatctttgcaaaaactattgaaatcttgtgataagaactcttttcctctatcagttttaaatgtttttatggtaacttctaagtctttttccaccgattgtttaaatttcttgaacttctcaaaggcttctcccttttctttcaatagtattgtccacatatatcgagagtgatcatatatgaggacaaagacgtacttatttccagttgtacttatttcgagagtgatagagctatcaattttattgaagtatcttcgatcccctatcatgtggttgctatctccattatcaaggtaacaaatgtactcatccactgtgttcttctcatacttgctcggcacgcaattcttttcattcaagtacactacttcatgcatcataaggtcatcggcttctcgggtgtcactgttctctgtttctagagcttcttgcaacttaagtaatcagtcaggacaattagaggcgtagtgacctaacttatcacatcgataacacgttacttttgatgtatctcttccaccattgttaaaacgtcctccacaacctctacctctgttccgtcctccgcgacctcttcctctgttgtattcttgattcgattgataatcctggtttgagtatagaagcttgccttgatcttcttgcggttcttcttcttctatgactcactcttcataaactttcagtcgtcctaaaatgtcctcgaacatgttagtgttaagattgatggaactatgtgaatgaatttttttcgaggaagactcttaagaaatttcttcactagttttgtgatagactaaggattcccctagcttgtatgagaagaagactgagagctggagggaagaaggcaagagtctgtgagaagcttctgaagaagatactcaagagtggctagagtgcacaagagacactgaaggagaaagagggttcactttaatattgttgtcttttaattcaagtgttgcgttttatgtaaggtttttgatacactctgtatttaaaggagggtttcccgtttagggcctcctcaatcattacctaccaaaaacattactattttctaatctctctctctttcctctccgccgcatctggcgcaatactatctccctcctatttcttcttgttacactctcgagttaactgtcaagtttatcattggtgctttcagttgttagagtcatggcctccacaaacacaacggccaccggtgaagattctcagtcaggatcaccagaaccaagtaaccctcccgctgcaaccttaccgccgttggataagagagtagaaatggtggaaaaagagctcctttacataaggaaagctttaacccagatcttaaggaaccagatctttggtccacctcgtgaaggtcaaggaaacttaccagctgcgttcgctagtccttctccgggcccagctttccaagcgacaccacctccgaactccgagcgtggaaacagagaggctattctgcctttcccgactccagacctgcaaatgagacaagtggagactcgtttccaaccgccagcgttggaacaacacgggttattcaccgagacagaggcaggaggctccggtgagacccctcgagctaccgctgtacgaaggagaaaacccagatgactggattttctgcatggagcagtgtttcttaactcataacacaccagaagacatcaagctcgaaaaggtgatatcttgtttgactggtccagctgtaacgtggtggagatgtgctaaagaaagagaagggatttacacaaggaaggacttccaagacaagtttaaaatgaggttcagaccgagcagaggaagctcagcggtggatcacttgctgaatattagacagacaagcactgtcgatgagtatcgaggcagattcgaagagcttttggtggagttgcctcatgtccctactaacatagtggagtcagcgttcttgaatggattgaagagaagtcttaaagaccaggtggtcagatgtcgtcctgtcaacttgaatgacattgtggagatagcaagacttattgaagcacaggagaggactaaccaaagttatcaagttagaccccaacagagaccatcgttcttagctagccaaacgccatccggatccagagcaatggagagcccgcagcctaaacgtccctatgatcccagtaaggacatgaaccgtgcttcaggaagtggagaacctgagaacaccaatccctgtaggaactgtggcgatagatggttccctggccatcattgcaagcagcagaggttgacaagtttggtaactgctggtgaagaggaccaggaagacccacctgaagaagaatatgtagagcagaatgatgaagaagagcaagctgaagaagaaaccttggcgactcatacattgggatcactatctgatgttgaaagagaaaggtctatgaagctcaaaggctatgtgggaagagctaaagtggtggtgttggtagattcgggcgctactagtaactttatagatgagagcttggttcatgaaaggggctggccgattactgagactagagggttctgcgttaaagtgggaggaggcagagtgattaaaggcagaggcatgtgtgttaaggtaccactggagattcaaggtatcgaaatcatggaggattccctgctctttgacttgggagatctagacatggtgttagggtttgcttggcttgctaagttgggtgaaacaagagcgaattggggaagattgagactcagctggcagattgggcgcacgtgggtgactatccatggagacccggagttgtgcagagaacaagtatcattccgcaccatggaaaaggagatcaaacatgcagatgaagcctatttgctggaattggctacactgtttgagagtgatgaacagcagaaaccaaaggaagtgacgccggttctgcaatgtgttctggatcagcaccagactgtttttcaaatgccacaggccttgcctcccaagaggaacagggaacatgcgattacactggaaaaaagtacctcaccaatcaacttgagaccttatagatactcttatgaacagaaaaatgagatagagaagctcattagggaaatgctagcagttcaaataatacgtcctagcattagtccttactctagcccggttctcttagtaaagaaaaaggatggaggttggaggttttgcgttgactatagggctttaaacaaggctactataccggatagatatcccatacctgtcatagaagagcttctagatgagttaaaaggggctactgtattttccaagctagacttgaaatccgggtatcatcaaatctgaatgcttgcagaagatgtagcaaagacagcctttaagacacatgacggtcataacgaattcctcgtaatgcctttcgggttgacgaacgcaccatcaacgttccaatcggagatgaacgatcttttcaggccatatctccgcaagttcgttttggtgtttttcgaataatatcctaatctacagtccagacatgaaaacgcatgttaaattttttgagattgtgctttaactgttgaagttgcatcaattttatgctaaccctaagaaggggggccttagaaccaaagggaaatcatacctaggggaccataaaaaaagcaaagggggtggaaccaaatccaggtaggggggaggcatggtgaggcggccctggcccaaggctggtaccgggccgagaggggttttgggggtggcccggtattaaccgcaaattgggaaaggataatggagggatggcaggaccctaacccaaccggtgagggaaaaagggtttgggggggaagaaaaaaccgggcatgccattggaggggctaaaccagcgggaacccacctaccccgggtggacttggcccgccttcaaaagggggtt

SEQ ID NO: 38352 - DNA, 2902 bp, Arabidopsis thaliana landsberg
  unsure (1)..(2902): unsure at all n locations
aaaatctaaggacctacatgctcttcatcttggcttcaccagctcatgtctttccttgtctgatgcaaattgtatccatctatatcagtgaccattaattctaaccactttttttggtccttgacttcacaaaaaagatttgatgtcccctgaatatatatttgatctattatttttgtgactcacatttgatttagatgtccaggactactaaccaagtatcaacagcctcttgcattcttcaataatgtctcagtacctaaatcttgtcatataaatgtccatataggaaatttatacccacatgatcatgtcttctaaccacaagttatctatagtccactagttgaatgcagacataattgattaccaacttgggaccatagattagaaacataatcatgtgttgtgtctggttggattgctcaggagcttgtcttaacctaatagtttctccttctatataatgaaacaaagcttattggtattcctcatcaaccagaacttttattcaaagagatctatacaaacagaactcaccaatcttatctctttccttctccaccttgctttccaatctcaagctttaactctccctgaaaatgatgatgaacacaaagaagctcatgaagttggccaagaaatggcaacaaagagcagccctccacaggaaaagaatttcatttcaaagatcaagtattactactagcagctcaaccgctgcagagaagggttgttttgtggtttacacgacagacagcacacgctttgcttttccgataagctacctaagcaactctgtatttcaagagattttggagatatctgaagaagagtttggcctcccaaccggtggaccaatcacattaccattcgattcggtttttttggagtatctcatcaaattgatcaaaagacgaatggatggagatacagaaaaggctttgttaatgtcaatctctagtgctagatgttctttgcaaaaacaagaacagagtactcaacaattgcttgtattttagagaattagtgtgtagcagtttttgtgtttgtaaagattctactgtattagattaggcagattatttcagaaatacaaagtaaagtattatttgtgtctgtcttttagactgccttcatcaaaaccaactttcatgtaaacaaagaaaaatgagataacttttacttcacttgatgaatctttcattcatcacaatttcatcaattgtccttatgaatcttttggaagtgtaatacaagactgagaaagaactaatacgaacacggtatcttttctgatccaagcttaatctcaaggaaatgtgaatagttgattcactagctatttttgtttcctggccagacactctttagaaactactgctacatgctcttcatctttgcttcaccagcacatgcctttctttgtatctctctattggatcattcatttcaaccagatttgttttccgattgtcccctgaataagtgaaacaaatctattatttgatttacctgatggactactaaccaacctgggaatcttatccttcacaaaaaaaaaaaaagttgtacatattcatgattttggtatttttggcttctcttgtattatatgatataatgtagcaactgcctcttgcattcttcatcaatgtattagtacctaactcttgtcatataaatgtccatataaaattttgatacccacatgagcatgtccttctaagttctcaaacgaagttgtatagtccacaagttcatttgcagacatgattgattaccaacttaggacccctatgagttctgatcacacagagtagaaacataaggatgtgttgactcgtgcttaatagtcaacaagttcaaaagtctgtctaaatctattaagatcttcttctatataatacaacaaagcttgtaacattcttcatcaatcacagctcgcactaatacaaagatttctgcaacacaactttcaagtaatatttttttttgctttcctagagaataatgatgaacacaaagatgctaatcaagatgttcaggaaatggcaacagagagcagctcttcacaggaaaagaatctcattccaaagatcaagtactactcctgtagagaagggttgttttgtggtttacacggcggataacacacgctttgttttgcaacaagctacctgagcaaagagctcttgaagatagctgaagaagactttcgcctcccaaccggtggaccaattacattaccgtttgatttagctttcttagagtacctaatcaaattggtacaaagacgaatggatgaagatactgagaaggctctgttattttcaatctcaagtgctagaagctcttttcaaccacaacaacattgtagtgctactcaacagttgcttgtgttttagagtttcgcaaatttctgtattttgtagagtttatagattagacagcttaattgtttcagaatacaaactattcttatttggtctctcatttaagttgtctcataaaaattcaaaaatgaacttccatataaatggaaactttatcccaacttcaaaaatcactagttctgacagtttcatataaatctctgaatactcaagccatattaatgaaatatactgtacttcactatgaatcatcgtatgtccatatgaatctctgttaaggcacagaagattgcacaagaacaagagatgttcttataatttgaacttacttaatctgtcacagtgagaagagaaaagagaacacttgcgtgtatgttcaaagaaggttccaattattctacaaaatattaactggatgaaactttttcactcatttagagagctattaacaaccattgaatnttctgtaagttagggttctaactctctgtaacgtcaagggtcta

SEQ ID NO: 38353 - DNA, 7722 bp, Arabidopsis thaliana landsberg
  unsure (1)..(7722): unsure at all n locations
taagaccggctttgttgattactgagcacttgattatttaattgacatatattattcatattgattatcttttacgctaggacccaagatctgaccgttggagcatgaactccagaaatcgataatacatgatttatgacataaatgtcccgataatcagatcccgctcctatttcctattatataatctctccgaccatcataatttgaccgttggagaacattactacttttcgcaaaagaaaggaaaaaaaaaaagagagataaagctctcttccattcttttgctatcttctctcctacggttgtttcaatctccgaccaaacctatacaccacttccagtgctttcgaatagaacccagaaatggcatcgccacagagtaccaaaaccggtttgaatcttcccgcagggatgaaccagacttcgttgcgtttagaaacgttttcgagctcatttcgtgggatttcgagtttatcctcgccgtcaaaatcgacttgcagcgacagattcataccgtgcagatcttcttcgagactccacgctttcgatctgcaggataaggaaccgactaccccggttaaagagggagggaatgaagcctattctagacttttgaaatctgagcttttcggatctgattttgcttctccttgtttgtctcctgcaggtggtcaaggatctgcttcttctccgatgagtccatgtactaacatgttgagattcaagacggatcgttccaattcaagtcctagttcgccgttttctccttccattctcggaaatgataatggtcactccagtgactcgtctccgcctccgaagccccctcgcaaggttcctaaaacacctcataaggtattatatcgtttagatccaacctgtttatgtgatgttattacagattcatgagaagtagaaatgatagattgttttgtttttgatgtggtctcaggtcttggatgctccttctttacaagatgacttctacttgaatgttgtggactggagttcacagaatgttcttgccgttgggcttggtacttgtgtttatctttggacggcttccaatagcaaagtgagtgttttgatatacttgactagttcttaagatttgcacaagtttttagttgtggtgtattcatttaacagtgaatttgttggttaggtgacgaagttatgtgacctagggcctaatgacagtgtctgctcggttcagtggacacgggaaggttcatatatatctattggtacaagtcatggtcaggttcaggtgtgttgtttgttaccttccaatctgtggttgtggaaagttttgttatgatgcaatgaagttactaacggtttaatttttggcaggtttgggacggaacacagtgcaagagttttcgaaccatgggaggtcatcaaacaagaactggtgtcttggcatggaactcaaggatcttatcatcagggagcagagacagaaacatccttcagcatgatatccgagtccagagcgattttgtcagcaaactcgtgggccacatatctgaagtctgcggtctgaaatggctcatgatgatagagagctggcgtctggaggcattgataatcagctgcttcattcgcataaccttaaatgtaaaccctaaaccctaaaccctaacgctaaaccttaaaccctaaaccttaactctaaaccctaaaccgtacatactaaaccttaaaacctaaaccctaaacgcaaaaccttaaccttaaaccttaaaccttaaaccctgaatcctactttaacttccaggttcttattgcgtttttagtttttataccgaatgataaacaaaacatcaagtcaatttggactacaaaaacacaaaccaagcttcttcatgattctcaaagctttgatggtgaacccgaagttcttaacagtttttggttttgaatcgtataacaagaaagcactactttactcttcgggatctcgttgaggttctagttttatattcaatcatacacatgacagcaggttatatttcacttagaaacgctaaccaagattgttttttcttcttaaaatattatagtatatttgctcttaaacactaaacataaactctacaccataaatcctgttggattccacccaggtaaccgagccaaccatgatcactgcctcggagatcatgtcgaagaaccatcccgaaccgggcctcaaaacacctcggagatcacatcgaggaaccatcctgaggcgacatcgagaattcctcggagcatcaccacaaaagggttccccgacccggtctcgaagtgcctcggatggcaacctggaaaatcatcccgaggcgggtttcaagatgcctcgggagtgcatcattcgactagcgcggtccaagccgctcagccacgacccgagggtcagctcaacccggctcggaagaacttcggatcgggtcagaaaaccttcaaaaaaagatattagagaatctccgaggatgtcaccgaatatagaagttcctaaaatcttcggaagataaagaaaatctccttcgccaactctaagataaagaaaaatcttccgagaatatcgcgagaagcgatctgccaaagccatatataaagcacctctaaggacaaacaaaggggacacgcacaaaaacgctctcaacctcaggctatcaaaatcgctttgattttgaaggcaaaacacttattttccatatttctaaacacttgtacgatcaaatcctcattatttcaataatataaccaagaacaccgtccgcggtaatcagcaattctgttgttctttgagaatctcacaaagatccgttctttgaaggaacccttagtacaatttctattgtgcgagttttgactctcacaattgggcgctagaaggaggggggatttagatttctcctacttcaagaacacaaaaccatcgaaccaagaagcaatgaccaacaaccaggtcctcgctaacactgtcgacgtggagggaaacccgaatcatccagtccagacgaacgctcctgaggttgccgctcctgcagtcctagcagaactgagaagcatgatggcacaactctagaagaaagtggacgaccaggaaaaaagtgcaccgatctttggcgcagcagctccaggcgggtacttcccaaggacagctgaggaccactctcatcggcgcgcaacaatttcaggctcggcgagtaacgacagacctcaatccaacaaggcttgtgttcgctacacctggcaaaacgacgagaccaccccggctaatcgcaccagcactcgttggaaccgaagcagaattgacatgtttaggagaacagaacccaacaaaccaggtgggagcgtttgatccgcaaaatcacaaacttcgagctgaaactgctggagccgatcaaatcgaagcttccgacgacaaggaatcggaagaaaacatccgatgggcagaagagtacgctagggagcaagagatgaaagccatcagactctccctggccaaggtagaaaccgagatgaaactcgtacggtcacagatgcacaacacggtttcctcggctccgaacatcgaccacatccgggaagaatcacacaacacgccctttactcgtaaaatctctaacgcgataatctcagagccatgaaagatgaagatcgagtatttcttcgggtcatctaacctaaaggggcatctcaaatctttcataatagttgtagctcgggccaaattcagaccggaggaaagagatgctggcctttgtcatctatatgtcgagcacctgaaggggtcgaccttggattggttctcgagacttaaagggaattcggtttacagtttccaagagcactcgacgtttttccttaagcaatactcagtgttgattgatctaggcacctcagacgccgacctttggttgctatctcagcagccaaacgagccactcagagatttcctcacaaaattcaggtccaccctacccaaagtcgagggaatcaatgacgttgcggccctctcccccttgaaaaaggctttgtggtacaagtctgaattccgtaaggaattaaatctatccaaaccacaaacgatccaagacgctctgcactgagccttagattatgtcccatgaggaagaaatggaattgttatcgaaaaggcacgagccttcgaagcaaacacctcgaattgataagtcccaacctagcgctccgagccagaaaaagggcgctcaaggcaggaccttcgtgcatcatgaggggcaaaacttcaccggagcacacaattaccaagccgacacgccccgaggtcgaggaagagagtcctacacttgaactaaatactgcgagttgcacaagagctaaattggaatactgcgagttgcacaagagctacggtcgtcacacttccaggtgtcgtagtcttggagctaaattggcggccaagttcctagcgggtgaaatcggatggggtttgaccatcgaatatttagaagtagagaaagctagagttgagcaggtgaatgctgtggtgaaactcgagtaggcagtccccgcggcaaaccccagtccccgcggcaaaccctgaagggcccaagagaggttagggcgaccccgaggcagatgacgatgaagcagaagctacttggagcaaaatcttcacgattttgggaggttcaaccttttgtcaagatacaacagcctcaatcaaggcttctcaaacgaaggtcgattcaaatcgtaactgggcgcaaccgttcaacggaccggatgacaaagtcacttttccgtgagagcgacactaacgggtagtcatatttgactccaaaacacttaccaaaattcttattgcttctcatagctttgatgttgtaaccaaagtccgtatgattctttggctttgaatcttctaacaaggaaacactacttaggcttttaagatgtggttgcggtttaagttcttatactcaatcatacacatgacatcaagtcatatttgactccaaaacactaaccaagcttcttcatgcttctcaaacctttgatggtgtagccgtaaaccatatgagtctttgtctttgtatcttctaacaaggatacaatacttgggcttttaagatcgggttgcggttctatttcttatacccaatgctacacatgacatcaagtcatatttaactccaatacactaaccaagtttcttcttgcatctcaaacaaaactttgatggtgtagttgaagtctgtatgagtctttggctttgcatcttctaacaaggaaacactacttaggcttttaagatccagttgcagtttaagttcttatactcaatcatacacatgacatctagtcatatttgactcctagaaactaaccaaacttcttcaagtatctcaaagctttgatggtgtagatgaagtctgttttagtttatggttttggatcttccaacaaagaaaacactacttaagctttcaagatctagttgcggttctacttcttatattcaatcatacacacnacatctagtcatatttgattcaaaaacactaaccganatccttcttcttcctcaaagctttgcttgtgtagccaaagtctgtataagtttctggttttggatcttctaacaggaaaacatcactttagcttttgggatccggttgtggttctagttctgatactaaatcgtacacatgaatctagtcatatttgactacaaaccactaaccaagcttcctcttgcttctcaaagctttgatggtgtagccgaagtctctttgagtatttggccgctacaagaaaaccttcaatttaagacggatgattgtgaccttttattcagttgcaagatatagggactaatctctgacgactttgtgaccgtacggcgaccacgacaaaagtcgctgcaaaaaagtcaccaaataacgactaaccgtaaacgtcaggaaacggtcacaaattagcgacaacattcggactgctttgcgacggaaaacaaatggtcgcaaatgcatcgcaaggagcgactacttactgactgtcttgttagtccgaaagtttagtagcaacttagtcttaaacccgtcgcgaaaagaaggtaaaaaacgtttaaaatatgaaaataattaggtgtactaactttacgtgacacttaaaaacggtctgcaaaatggtttcaatatattcgaaaacgtttgaaatcattagataattaggtgtaccaacttttatgactccatatagtcggtcgcaaaagcgtcacaaatattttattatatataacaaactttttcatttgaattattcattacgaacttcagagatcagtttaaaaaaagaaaaaaaaaagagagaaaaaaagtgagaacaaataattaaagttaagtgaaacgatgtggaataatccatcacgtgaatggatgtattatcgaatcgatccatttacgaacaatatctcaacggattatttggccggtgtggaagagttcattcaatttgcaagctctcatgttcaagacaaaaaaggtcggtttatggtccttgtgtagtttgtaaaaattctaaacgcatgaaagttgtcaccatttcgagtcatttgcttagtaaggggtttatggccaattattatgtctggtatgaacatggtgaagattgtaatgatactagggagggaactagtactcatcaagaatatgctgaaaacatcaattttactagtgatagtcataatgaacctataggatttgatggggataatgtttatgttgggatggttaatgatgcatttcatggttctgtaccatataacgagtatcatgaacatgaaagtggaaatgatcatgttcatgaagaacctacccaagaagcgaaacggttttatgatatgttagctgttgcaaacacgcctctttacgatggttgttgagaaggtcattcacaattatcgttggcagctcggtttatgaaccataaagtcgaccacaatttatcagaaaattgtgtggacggatgggcggaaacgtttacggagtatttacctgagggaaataagacgaccggttcctactacgagacagagactttgatgcgaaagctaggattgtcgtaccatacatttgatgtatgtatagacaattgtatgctcttttggaaagatgatgagaagttggagcattgcaagttctgcggaaaaccaaggtataaggaaagtgatggaagaacaagaataccatttagtaagatgtggtatttaccaattggggatagattgaagagaatgtatcaatttgagaagactgcagcgtcgatgagatggcatgctgagcatgaattagaggagggattaatgtgtcatccatcagatgcggctgagtggaagaatttccagcaattgcagcccgcatttgcatcagaaccgcgaaatgtgtatcttgggttatgtactgacagtttcaatccttttggtatgtccaaaaataattcgttgtggccagtaattttgacttcatacaacttgcctcctgatatgtgcatgaatagtgagtatttgtttctaacgattttgaattcgggaccatatcatccacgagctagtctagatgttttcctccaaccacttatcgaggagttacaagatttatggatgaatggaaatgaaacatatgatgtgtccttagagcaaaacttcaaccttaaagcagttcttatgtgactaaagcg

SEQ ID NO: 38354 - DNA, 2395 bp, Arabidopsis thaliana landsberg
ctttatttatatggtgcactcctatgttattagctaaaatgtttagattataattcagacttatatcataaataaaatcaatattaataaaataaatggctttttggcaagacggatttggagggacgggtttttgaatcaacattaataaaaagtaaaatataattaatccaccgtttcaatacaggttaaatctttgatttattatttttaataaaaaataatatatataaatacttaataacaattataaactgtaaaatataaatattttataaaaataaaattttcaagttttaatatatattactttgaaaaaataaatcgtcccgcgggttaaaatctagtttaagttaatatgttcagacctcaaaaatttatttaaataaatatgttatatataatgtactttgttttgtcgtactttttatatgtatatatatagatttaaacaatatgtataacatttataatcacagtaaaaacatagaataaagtaaaaatggtatttacgtagtttactaaactaacacaccaaaagaagttggggaactcaagaaattaaaaaacgatatagctttgttatgaacatttttaagttgtttatgaataaataattcaattttaaaatccatctgttatgctgtaatatttttctaatttataaagttgaatataggtaaaaagagaatcaaagatggaatttgagaaattctgtaaagatggtgattagtataaaaatcataatcagcttggttatttgtctctattatgttattatcccctctatctgatacctttatctggaattctggatgctacagggaacttttcaccggtgaagaaccttacgccgacttgcactatggagcgatcataggtgaaacccttgatccataattcttgtgtgcgggcttgtatgctttattttctattctaaccaaaaattgaaatcaggtggtatagttagtaatacgctacggccgcagattcccgacttttgtgacatggactggaaattgctgatggagagatgttggtctgcagaaccatcagagaggccaagcttcactgagatcgtgaacgaactacggaccatggctacaaagcttccttccaaagaacaaggctcaacacagggaccacaatcttaagactaactgtttcatatgaattgaaccatgttcaaatctataaccatacaagatgttacatgcaaataggtaatgctagtctataaatcatctactacttcttgcatttttttcgctgcgtcaacatataaacacacatcgcctcagaatctccgcaattttatttgttttatagcaaccacaacttccatgacgagtacacgatgaagtcttttataacaatcataacaaaaggtcagacataataatataatcaccctagccaaattgtggaatctttccaatcattgtcaaggtcaagagactctgtttttgtttcctcccaagccaaaccaagatccttaaaacattgtttggctgtcttctccaacgaagcatcttctgagaaacaagtaaggcaaatcttgtcaacagagttcttcaactcctccaaagataatgagtcttcctttaagatcttctgcccggtttgccggatgtaagagttcaaagcgtcgttcaaatgcccaagtaagtcagcctcagagaacatatagtacatcctactaaggtcatcatggcttctctcatccataaacttgacaaaaccctacaaacacacaagtgcttagaaagctattgttcacaagaaatcaaagatatcaaagggaaaagagagctaccttttcaagaatgacagaaacatgatccttgagaagtattctctcaacagcttccatcaacgattcctcaaactctttaaagaagtagagtccgtgtctgcaatttttcttctcctcacgccacatatactcgacacgtttcaaatacagtggaatgtctgactgctccttgaactgcattgcttctgctgagtaaaactcatcagcgcagtcgatatagggtttcttgaagaagggcgacttgtagagagactgtccataaaacaaacccctaagattgtttagctgagtcatgtgaacagacatgactggtctggtggtattctttagctgagtcatgtcaacagacatgaatgatctggtggtaacaatgaaacagcaaaagagttatcagtaaatccaaatctatcaacacctattgtatacaaaactttatatttatccaccctaatgtaacagaaatttacctttgatccctaatgagttgtagaatgatggaaagaagcttgtcacaaactttctgggctgagaagagatgcttgggaaaaagcacacaacccaagtcccacaatgaatgtg

SEQ ID NO: 38355 - DNA, 603 bp, Arabidopsis thaliana landsberg
cgcaactggggaaggttaaaaaacccacgctgtgaaggctactcgaaatctttgccacccgctcgtccattctaccgagggtatgcatgggcgacactcacacctgtcacactgggacagcctagcggatccatgctttcaacgaacacgcccatcaacctagagacagggtacattcgtcatacccttggccggttcaacagcgactccatcaagaggtgcaagaacatcttgtacgttgtattctcgaatacacacaaaactaggaggtaaaacccacgctgttgaaggctctcaaatctttgcacccgctcgtccagtctaccgcagggtcgatgcccatgcgaactacacctgtacactgggcagctagcggatcatgcttcaacaagccgccatcaacctagcgtggatcatcccatggacattcgtatttggcgcaagagactataccgccccaacggctagagaatatgcagccagccataccgccttctcttgcagaggtaaaatgccgtggggacatccggtaattcaggacagttatatcccccctagcctgaagatcatgcagcccgcataccgccttcttcggccaccaca

SEQ ID NO: 38356 - DNA, 3312 bp, Arabidopsis thaliana landsberg
caatcagattttggaatagaacaccacatttcatgggtatatttctaattcaccattctctttctactaatgtggatgcaactttatatacgtatagagttgtttggcagagactggaatcacaacattttcaaacaaggagaatgaccgacaaaggcaaagacactcaacttcaatattacaggacatcagcaacgtgtatcatcaattctcacacctcttacacatccacacactttctcttattctgcaattaacaattcaacaggttagtttgacttcttatagagccattcaatggacttgcaacattttatatatagataataactcacaaaataaatgtcatattctatgcaaggaaaactttatagacatcctaattcatgtattaccaatcagccacaatcaattattaattctccatctagcaactttcatatcagaatcgtacaagaagacttcagaaatgcttctctaactcctactgataaaggtaatatactaacatattcatcattgaactatatgtttatggataataaacagtcccatttactttttcttattttacaattaataggcaaaactccaatgtgtacgcaaccagcctacaatgataatagcattgatgacgaaagcatggaacatcttcaacgacaatatataactgacaacgaaactgatagtgaacaaaattactatcatagtgcttaagaggacgactgttctgaagagaatttagttcatatacaagatgatccttccatggatttacttaataacatttcagaaaatgtggagacaaatattggtttcgctgacgaaaatgtcgaattaatattttcacatgaagatactcttattgaatgtggagaaatagaacaaacagtttcctctgttccgcagccgaaaaagagaggcacaccatttggaaaacaacaaagtaaaaaggcagtagagaaaggtacaaaaatgggtaaattttataactaaaatcagcttatagctttctttagtatcattgtagttggttttcttatggttaacttctacatgggatcaaagctaagaaattttatactttattcgttctatttttctaaataatagtgtctccaaacaatcttgttttagagctaaaaaagagatgccgtcctaagaacttggccgaaggagattcggcacgttggctttcctacatttgttgttgaatcatatgagtcaacaagatctgaatcattcccaacttctgttgagtctccggcacactttgaatattacgaccttccccatttccttcattaacttctcttggcagcgacagatttgggtgtgcagtgggttgattcacaggaacatgtggtctcgtccctgaatgtgacccttcagatgtgctatagtgcacagaccttggtaaggagtattccggtgtagttccgggaacatcccaatcaagcgctccatacatattggggtaatagtatccctcatctccttcccctccagcgtacggtacccagtcttccggaccgaaatgctgactccagttttgataaactggtgagaaattcatcgactcactcctttccattctttgaccagacatctgcatccattcaaccaaggtaaacttaacccatctacctaatagtggtgaacagaccggattatcctaaatgccttttgcgactcatttacacgataagacatttgaaaaacacgagtcatgctagcatgattaaccatgcttagaaaccataaattgtaacgcccccgagacgctctatgaccggacatctcacgggcgcctcaaaaacgccacattgagattgatcatcaatatccaaccgaggttcgggaacccatcccaaaccttggccggtgtattgacgaccactctcccacttaaacatcgtttaggcttgccaaccctcacgatatttaaatgttgtgccgactcggactaagtcattattagtcattactcgcaatttgtacaagaaaacccgatttatttcataagtattaatattacacaacatgttaccaaacatttataagtttcatggccagggcctagtgccaaaagcacgatacataatagaaacatacttgttttagaaaaggcacaaaactactccgggtttcctaatgtccaccatgccctctatttcccactacgggtttcctgcaaaacaaatagaatcatgagtaatctaatcatgagtaatctaagattactctatgagctcgggattccctgcagcagacattagtttaccccaacccaaatacccaacatgaaacacgcaatagagaatggcaacgaaatgtagcttgccgaagcaactacatataaatgcaatgcattaagactccagttttattaagtttttaaaagggcccgatatgctgccttcaaacccaacaccaaacacacacactcccgtgatctccctcgttacaaccacaaaggtatgcaaccggagcatcactacaaaatgttacaccgtcgtgtatacactcgaccagggtagctagccccatctcttcgaattctttgcacttcatggcgatcaagtaacatcgttacaagaccccaaaatagtacggttcattaaaaaggtcaaacatatcacgatcttggcacgcttatggtctttgcctcctacttcaagcaccacgtaccaagaccccaaagtttaagacatctacatatacatttttgtagctagtttagcaaataaatcctcaagttggaatttatttacaagaaatgtcattgaaattaattattatcaattaaattaatattcttaattattagcatttccttatccaatatatctccatcaattctaattattttttaaaaagagaaattttagggctttattaatattgtactttattaaagataaatattatagttatttaaagattataaattgtttagaatatttaacgaaaaaatgtttagaatatatataatatatgaaatttataaaattaaataatcatttcaaaagaaaacttttaaattgatttaaattataaattttataataaaaatatattattagaaaaaggagaaaataattaaataaccaattttaccgaactggattagatggtgagacgggtttagaatattataatgtatggattttagaacaattaaataaccatttgaaagaaatttttcaattaaataaccatttgaagtatatatcttttaaattaaagtattatttaaaacgaaattaacaaaaacaaaatgtttaatttcacaaaacagggttagatggt

SEQ ID NO: 38357 - DNA, 9106 bp, Arabidopsis thaliana landsberg
tctttttttacagtgaaggcagtgacatcctcaatatccgtaataagtttacacgtttctgacaaagatctacattacaaacatatattttgagtgacactctctctctcactaaattacacaaaacggaccatatttacatacttgaagaatcttactacctcttaggatcttcagattcagctatgttctcaagcctgcgacgtttctgagggctttcacatttatcgtcttcggtttccgacgctttgttctctgcaggtaatggcggctgaggcgaagatgctttggttttggacatgttttgagaatctggtatagagtcatcactaggtgataacactgtctgcgaagaagaagaaatccaccttcctgttttgcgttgttcttccaacatcttttccaagtatttagcatgctcttcaattcgtagctgaagcacccgttgcacctgcacattgatcaattatgggactggttatagtagcaaatcttcaatatttcttttccccaagttaagtgtaatcggttttacctccagctgttcatgcaattgcttctgaacttccatctgcatacgcagtgcttcagttaattgtatggccctgtccatggaaaaagagagtcattttagggataatgttgaaaaatgtctgcggattgaacatggaattagagaaacacaatgctttaccctttcttcttctcgtcagcttcactcttactcaaagccagtttcttttcttctgagttatcagtccttttctctggggaataaacgaaaaataataaaggaactgtcagatagatcaaaatcatggctgatgatcatgcagaaacagagaatctgtgaaatcacaataacaagttggaggctttaccttcttttttctctggcatatacttggctagtctatacttctgcacattcgtgaatttcagagatattcagctaatttggtatcatgtacttataaatttatcacactcaaactgatttagtacctgcaagtggctttttacatgatagatcgtcaagccctcaacattcatgagcttcttaacagcctttggagtggcctctacatgtttaatgcaaaaaccgggttaagcgttatcagcagaaagatgagaagaaacaaaggatatctaaccaatggcaaacacaagagtagctctagagttctactttataagtgcctactcgtatctcaaaaagctaaaactcactttcaggcccttcaagtttgatcaccgcctttacaaaagactcgtggagctcaggagtccatctcattctcgacttttgattggctgctgatcccggagaagggtgagatgaaactacgtctacagacattgctccaggaacacagctttggcttggactcaatctcgtcactggatttgacgccaatggcgtttcatagatctcctgaatcaaacagaaactaagtgttaaaggagcaaatgacgtttcacactctatgtatcaacagcaaagaccgaaagtcataagcagtgaaagtataagtcaatgtttgtcatagccatgcaaagtaactgatgcaaactcataagagctgtacaagactgagattaacttacatcaagcctgggagtttcagcgcggtctgtgatagccagctcaagttcatcagacaggaactgtaattccatttgatctgataagcaatagctgtcattcgaacagccaaaatcatgaaaatcgccatcggaacaagcatctccagaaagattaaggaagtctttgagaagcgacccggagttgcctccatcacattgattgcccaaatcctcagtgaaaatagatggagatcttgcagactccacaccagaagctgagtgggtgtaagaggagggatcagggaggaaaggaagactgtttcctagatgtttctgagtctcagaggttgaagatgatgacaagtagaggtttgtgcaaaaggtggaagaccgagagaaggtgctctgagaactattctttggccatagctgaccaggtgaatctggagattgtgaccttatgaaaggagttttccggtgttctggctggacattcagaaagttatggactggagataaagaagaagagcaagcttgaccaagttttttattgcattcatctgttgccgctgagagaagcctgtgtctgttcatgattgctttgatgtacatcaacaatcaaaactgtctcttgacaagatcccccattagtttgcagttagcatccaagccgctgagaaccaaacattttgatgattaggataagaatggtggggtcaataaacatgttagtgacaagaattgagtcagtttgtttagttaactttcagaacaaggcatacagaatcatccagtgatccatcttggctggatcttgacaagttaataagttccttgagaactaaaaagctaagtaattggagcaacaagagtacatccgagattgagatttaccatatatacagacacagagagatgcaacgattaaatatggagttccaaaaaatgcataacgagttgccgacacatggaaactttaaaactcgaacagaggaatcaaatcaggttacgcaaagacacgattacaggaggacagaaacgcaaagagaaatgaggtattaaattctaaattcagaatgttgagactgacaagtagtagtacgaatcattcacagagaaaatcaaaagcaatttatttgattttatatttgattttatcaaagggcatgatagaatagaaacggacctgagaggatgataaagtcttcacctttttaatacttgctgcataacaaatgaagaaaaaactaacatttgagaaaacaagctgaatcccatcaaagagatgaagttaattcgaatgagaaagcaaaagaagaagaagaagagatggggttaaaggaaggagacggagatttcgctacgaaatcgccgtcgaagtgtgtactgttggctttgcttgattggtctccgtcttgctggacctctttcttgttccacccgctctttcctcgactgtaactcacggaccaattcaatccgttagttcatttgccacgtaggattcaagtgctcgtgcgttttgccacataaattttattttattttatcgacatcacgcttagctctctctcgtattctcttcctaatcacatttcatacctggtcaaccaaattattggttttaaaaaaactatactacttctttgggttatgagatttgaggatttttttaaaatcatttatcattgttgattcgaattatttatgtgatcgatactagtagtacttcgtaagctttgttttttcttttccaatggagtacatactattgtgaactattctctgcttttctttttcagttagtattgatatctttatgttgtaagaaaaatcgtgacacaattacgaattattgatataaaaacgaatgataatgattaatgaatatgaatgagaaaatggttgcccaaaaatgatagtgactgatctgtaatgcagtttagtagaattagtttcttttaatagcaaaactaatgatcattaatcttccaaaaggaaagacaaagtagcatcatccattaacttgtgggtcatatctaaagccttagccacacaaatccatccaattttttttgttttttttttgtctttagtcttttttaccacataagtaagataatgctaatttaatgctcatcatagagaatgagctcagcaaatgctttctacctgattatttattatcttcaaaatagtcaagtttgaggcatcaagtggtagaatgtctaaatccttacataatttatatttatttttggcaacatacataacataattcaacactgttctaagtaatacatggctagtgggttatataagattatatacttcactaaaggttgataaatcaattctcagtttgcattttgccaatatacctcaatttatcatctttagtcccacaaatgatggccacttttgtcgtactgtatgtttgttttcgacttgtttaagtgttgggtcccctcattgatcaattattgaaaaataaaatgggccttactaaaaacatatatttgggttaactagagagaaagcccaaatacaaaaagagaatcatcagcgattcaacagaggcttgaacgcgcgtcaaaaagcttagctcaaagattgaattttgattttcacatgtttttcttcataggccaaccattaatggcgttgactttgtcaattctctgacaattgtaatttcgttctcctgaaaccgtgggagaaaagaatctgcatttccttcaagttcaacgtcttccaggtttgattttgatttccttttcccaattccatgacttttttgatccgtatccagtaattgaccaccgtgattcgcgaatcatgattagggtttcgttgttaatgaatggcctttggatgatcaatggtggtgtttgagatttaattgggatttagttatgccctcttggaatttggtatcagcatgaagtgtgaagcatttagtatctgaatccgattgataaaaggttgacacttttctcttttgttttttccagattttaaaatggcagatgggaacacaagattcacggtggatgaagctcttgtggcgatgggatttggcaagttccaaatttacgtccttgcttacgctggaatgggttgggttgcagaggccatggagatgatgcttctctctttcgttggacctgctgttcaatctctctggaatctctctgcacgccaggaaagcttaataactagcgtcgtttttgctggcatgctcattggtgcttactcttggggcattgtttctgataaacatggccgcaggtagcttttatcatacttgttgtctttgatataagtttcttggtacctcaagtagaaaggggacggctgaattgttccgtaaatgttcatattcttatgagctcttgaattgaatgatctctgaccttgtctaatgctgaatttcagactgtttagcttatgaccatcctttgttcatccgatttctgtgtgtcttgtgtcaatggtcatcaatcaatgctaaaatggactttgttttgggtcatattcttctgtttatgatgcattgtggcttcatttgattttgatgtttgtgccttgaattcctcaggaaagggtttatcataactgcggtggtgacttttgtagctggtttcttgagcgcattttcacctaactacatgtggttgatcattcttcgctgtttggttggtcttgggttgggaggaggtcctgttcttgcttcttggtatcttgaattcatacctgcaccaagccgagggacttggatggttgttttctcagctttctggaccgttggaaccatatttgaggcttcccttgcttgggtataactcatgcctttctttgtttattttccagtataatttggacgctagcttttcacatcaccatgcaatgcaatcttttgcagttagtcatgccaagattgggttggaggtggttacttgcattctcttcggtaccttcttcgttacttcttctgttctataggtggacatctgagtctcctcggtacttaattctacaaggccggaaagccgaagctcttgccatattagagaagattgcgaggatgaacaaaacccaactacctccgggtgttctcagttcagagttggagaccgagctggaagagaataaaaacattccaacagaaaatactcatcttctcaaggctggagaaagtggagaagcggttgctgtgtctaagattgtactaaaagctgataaggaaccaggtttctcattactagctcttctatctccaacgctaatgaagcggactttgctactatgggttgtgttctttggaaatgcgtttgcttactatggcgttgtccttctcaccaccgagctgaacaattcccataaccgctgctatccaaccgagaaacagttgcgaaattcaaacgatgttaactacagagacgttttcattgccagtttcgcaggtacatcaatatatttctgttatcacaagaaatccaaagcagttgttacttgttacaaataagaaaaagtctaaatcttattttttgatctgtggcgtcctcagagtttccaggtctactgatatcagcagcaatggtggatagacttggacgaaaagcttcaatggcatcaatgttgttcacatgttgcattttccttctccctctgttatcccatcagtctccattcataaccaccgttcttctcttcggcggccgtatctgcatctcggcagctttcacagtggtttacatatatgctccggagatatatccaacggcagtgagaacaaccggagtaggagtagggagctcggtaggaagaattggaggaatcttatgtccactcgtagccgttggattagttcacggatgccatcagacgatcgctgttcttctgttagaggttgtgattcttgtgtcaggaatttgcgtttgtctcttccctttcaacacaagtggtagtgacctgacagatagtatctatgcgtccaaagacccaccttcagcctctgaatagcaaaattcttctgaccatcgtagttgtttagttgttgaaggaaagaaaagaaagaaaacagagtgattacaaatagagatattcacagattagtgatatgatatgatcctgtgtaagacattatacaagcttgtaattttgtaaaacaaagtctcctatacggtacatttaaatatgataacaattttgttgatcaccataaaattcagtcacattaccgttgacactcttgagaatcaaagaagttgcaagaaacaactaaagtaatgaaaatagacctgattaataatcatcgatttctttcctgaggttggttgatttgcagttgaactaaacttggaacataagaagagcacacaagtctgcctggtttccgctgggaattcggacttactccaatgttgacagatttgaagtatccatcatctccaacgatgtaagccatttggtagcgacaggtcttgatctctttactatcaaaaagcacaacgactttcttctcctcgtcgatgaagaaactcccaaaagttaactgaagctgagggccgacgagttgttttaaactcactgataagaacaccttgctgttccacgacacagcgttgggctcaatcttagacgtcacccagatgtccaactataaataatcccacggctgatataatacaacaagctgctcttctctaacactagatacactcatagtatcttcagaaacagcaaactcaaacggaagaggcaaaggcggcccaaatgtctcgcttgtgaaatcaaaacagagtaagaaaaaatggtctgtgtccattgtttcggtataattctctctagcaaaccagtatgtatttcccttgagagacacgccacgaatataagaatctatcttccagtctggagacacatcaagaaccttccatgaatcagagttgatattgtagattttgaactcagaacaagtgggagaaaaatcaataaatctcaagattttgtagctgcggcttgatttgctgctcttcttgtatccgagagcatacgtatacatgtccaatttgtggaaattatttgtagactcgatccaccgtgtttgcccccaatacgggttccaaagaacgaccttagcgttatcttccgtgatgcatagcaataaaccgtcgcagtgaaagacttgagatacatcgacttcatcgcccaagctaataagctcaccttcaggcttaatacacgactcaatgtcattgtgaacgttgactcgaatcaaataaaccctaaaatccatcatcaggaccatcataaactctttttccttcgctgctactattgcttgataaccaaggtgattctttgcaaagctctcacctttagataaagtattccaatctttacaagtaagtcggacgtttctcagagatgttaacgaaaccctagagagcacctcttccgccaaatccttaggaagattagacatcttcgtcattgttttaagtctcaacgatgatcgttgtaacgtagtaagtctcaacgatgatcgatgtaccttcaaaaacgatttctatatgcttctgtgattatcggttttctttaaccttgatgtaacatcagatatccctaaacgaaaagattcgatgacgacaaaacaaaatattttaaaaagagaaaaaaaaaaaactattaaccttttcctttgtgattacagatttcttccgccgcaaaatagagtgtatagagaaattttggggaaaaaaaaatcgcaaactatttttttgtttataataaaaacggtttgattagtttaaatttttttcgtgtagggaaattttggggttttaaaatcctaaaaaaaaaaagaggttaaaaatgataggtttctcatttgacccaattttcttcatcgtcaacacaaaaaacaaattaaattagaatattaaatgttaatgggccggaaagaaaatgttgattggcaaaagcccaatgacattgcaacagcctttttgtagtgttgactgttgactcgaaacaaaaagtgattaaaaattaaaaagagaagaagacgtttaagaagagagcttaagcgctgtgacaacctctttcttctaaccaatcacaatcgccttcttccacggcggctctccgtcacaggtgacaggtcccaatctctctctctcgcggcgccggcgaagacggctggtacataatgttgaagctttggagatggtaccagcgatgcctgacggttcatcctgtgaaaactcaggtcatcagttctggatttctttggggatttggcgatgtcaccgctcaatacatcactcattccactgcgaaacgtcgtcttcttcgtctcaccgttagtcattttccgatctccttctctctctctcaccttcgattgaagtttcaaattggagtttctctccgattcgtgcggattgatgaaattagtttttaggtttttgaatttgtatctatgtatctctgagtttcatgatatgtccttaga

SEQ ID NO: 38358 - DNA, 2008 bp, Arabidopsis thaliana landsberg
tccattccaaggggtcgggtctagaatgctgtaatggagagacatcgaactgatgattgatactattcttgttatgtgcccggggaggagggtgagtcgaagaggatacagcatttgaccaatgctccaaacgtttattgatctggtgtcctgggaagcctggaggagttgcttgtgggtgaccttctagaaccacgacattgttattaggagcactgatgagcgagttttgttgcgtagagaagctaggaaaagccatggaggtcccagcaatgctcttgttactgttcatgtttctacttttgttgttgtttgtctgaagctggtcgaactctaaaggcattggcaacccttgaagtatgtttcctccatcactgtggttaagaggaagtgatgagacatggtgaaactttccgatatcggtctggttttgcaagaacattcctgcaggaggagaagaaaggctgcggacaccgatccccgaaggagtattgagtctgccaagaatcccgtttggagggaaagatctcattgcaggagccccaccatggtactgaccagatccaacagggattgggcggtgatggaaaccatcaagtccattcatttgcataaaatgtaactcagagtttgccataatagcttgctgattagccacaccactgatcctcttcaagtaaaggcggaatttctgcaaaccacagcgaacaaagtcataagcttccgaggtgttaaaaaacaaatcttcgggttacgcaagttaaaaacatgaaagattctttgtaacctgaagatgactggccacattttctctagtgagcttctcaacattcatcagatccaaaatctttttaggcatagcctctgcaatcaaaacaacacacacaaaacagaacttaagtgacatactgataagcttactctcatatcaagtgacatattaataagcttactctcatatcccaattggttaacagctgcaacaaatttcttatgcagctcaacagtccaaacaacacgttgcttcttttgagcacacgaatcatcattatcatctctatcctcatcctcatcttcattatactgatctttacgttttctattacctttcccattgttctgatcagaattcccaacaccttcattacctgatccatctctcttatcaccattattattactcccacggttcttatcaaatctacttctcacgacatgttgccatatgttcttcaactcctcaatacgaaccggcttcagtagataatcacaagcaccatgagtaactcccttcatcacatactttggatcactatgcgcagacaacactgcaacaacaagaaaatcatcatcacaaaaccaagtctagagatcaaaactttattcctgtagtgagtcattaaggaaataaatgacaaaagtttaattagaaaataataataataataagacttacttatgacaggtaggtccatttcaagaccaacaagctcaaggagtttgaaaccatccatgtcaggcatgtcaacatcactaataaccagatcaaacttgttcttgttctctctcaataactctaaagccttttgtgcttggttcgtcgttgttactgcaacagattccataaagtcttaaacttttaattcaattcaacaatgaaactctctctctgacaaatgtcaaatcttacaaaatctaacaatggaataaaacaaatcttagttttttttagatttgtgtatacaagaagttaggtagatagatatcaaaagattccaccatatgtggatcaaatcacagatcaaagagacataaaatctaaaaacttgatgaaaaacagatccaagaaaacagagagagagagagagagagagagagagagagagagagagagagagagagagagagagagaggaaccatggtattgggcagtgacgacaggagagattcaagggattttgagacaaagtttgtgttatcattcaacagccaaggaacttctcattt

SEQ ID NO: 38359 - DNA, 13134 bp, Arabidopsis thaliana landsberg
  unsure (1)..(13134): unsure at all n locations
ttgtaacaagagattttggtaaaatttctgagaaatctagagaagtgagagtaagaacttgaaatgtttggagagaaggagtaaaattcgaaatttttgagcaaagagaaagtgtgagtgacttagcttgttgagtgtggttttatagacaagaagatttgatcctagccctccaaacaccatagatccgcacccttcatttggtcaaggggacatgtctcactatttgcagaagaatctttgaagggctttggggagcaggatttgattggtggggccgagcaaattcgaattcaaattcgaatttgaattgtgttgacctcgcacgtgtgaactcggccgacatactcgacgcgcgtgtcgagtacagtgttgggcctgatgggcttctttttctgactcggcttcgggccgagtgctgcatcttgttgggcctttgaacagtgaggtccatactcgaccttgggccgagtggtgtgggccgagtactattcaatcttgggcctttggtcaattgaagcccacactcggcctgtagccgagtagtacggtcgagtgtggcctgaaattctctagaagtctttttccctgaaacacttaaacaaaaacatcaaaaataacaagaaagcaatatatacaaggatagacatgggacttcctcccaagtgagcttgtttaaagtcactaagcttgactctcacaatgtttaggtagagaagagattgaggagaggaactgagaagtcctcatcctcacttgttgaatcctcaaagtctgaatcatactccgcattttctcttgatagctggagtgtggagtactcatttgatctttcctcaaagtaagcctctttcttatcagtactatagtcttcttctccaagatcgggttcctcaaagtattcatcgatctcaggacctggataacctttaatcatctccttaagctccaggatagcgtagttcagctcctccatcttgaggtccaacttttccatggtctctccttgagctccatactgtttcctgagctccataagctctctagcaataggaccaacataaaaattgttccccttagtctcaacctctaagctaggtcctccttctaacataagaagcttctcgggctctcctaggtggcgagtcggaatggagtacggaataggattttccaacccactcaacaactcagcatctaaatttccttcttcaatgaagaaaagctgcccttctatagtgggcttcttcatcttcttagcaatatcaaagctcatatggagattcttaccaaggttcaagtcgatcttacccatttgcacatcgataagagcgcccgcagttgctaaaaatggtctcccaagaatgagaggctctttcggttcctcatccatctctagaaccacaaagtcggttggaatttcaaccgatccgatctttaccggtaagtcttctagcatcccatgaggcactctcactgatctatcagctagaataagataaatgctgctaggcttgaacttatcaaatcccaatctctttgcaacagacaaaggcatcaaactaaccgaagctcccaaatcacaaaggctgttgttgaacactaagggtccgagtgaacaaggtagagtaaaggaacctggatcacctagcttctttggtatcaccttcctttgaatgatagcgctgcactcaaaactcnnnnnnnnnnnnnnnnnnnnnnnnnnnnnnntttccatgattacttccttgggagtatcaaccaaaggtatcttctcttctagctctttgatacactttatgaacatcatcttgtgtttctggaagatccttgcattaacttgtgcaatcctttctggaaagtatggtttaggttcataggcaggtggaatagggattgggttgctcgggtcatatgctcgttcgacaagccaagcaaagaagtcgagttcaatctcctgtcttgatcttggtctcaaaacctccccttcttgaatcccactgtccgcagctcagtatagagtactgagtagggaggccttcttgaatccgtggtgcgggcactgagtgctatatcctttaaaacgctctcatgcctcagcgaatgattccgaattcttctgattgaatcccgagatctcattcctcaatctagccgttcttgagttagagaagaacttggctaagaatgccgtcttgcagtcaccccaagtgcttatagatgaagcaggcaaagtcttttcccaaagatgagctttatctccaagtgagaaagggaataaccggagcttgaaactgtcctcgctaactccgttgatcttggtgagactacagagtctatcaaagttatcaagatgatccaatgggtccaacattggccgaccatggaatttgttcccctgattcatcgagataagaccactcttaatctcaaaattctcattctggacagcaggaggtgcaattcctttcctctgacggtgatcacgtggtgcatctccattctaatgttggcaggaccattttgctgattctgttcgtcagccatatcgagtggttgttgaggaacaaggttgactgtgtttctcctttctttgagttcgcgagctatgcggccgatgctgtcgctgaaaaggaggctcttattccttttgatcgagttcgcatacagtagaggcgtacctggatcaattagacaacaagaaaaatacacagttagtgaccgaaatgaaaattaaaaaataacttgatcaaagcaagtctgaaatctcaaatgtaacaaacaaacacccaattggcaacggcgccaaattgataataggtttttaagatcaattaatcctaaagcactatcatatcattgtagtactgaaggttgtcaatccaaatgggtgtgatgctaacaatcaagatgtgatcagaagtcactaagtcaagccaagcaataacaggttgtggtgtgttctagcagttctaagtgaacatgcagaaaacagaaattcaagtagaaacagaaaaacactcgaccaacacagctctttgcagagcactgggtgaggtcgagtgacaggtcgagtaacagacagaaaataaaacacagatactcgactgcacagtctgttgccagacaacagggtggttgagtatgaggtcgagtaacaaaaaagaactgcagaaattaaaccacagataacaagatgcagtaaacaacagtagagtaaaaaaaaaattcaataagataaaaaatttccgaggatggggtaattgagtagtttcgtttcctcagtttacaggtgattgacatgctcaataaattaaccctagacaacaagttcattaaccaaatctaagtaccaccgcaacagagactctcaagttaaactagtcccagactcaatcaccattgacgagagctaacctaacaggcattacgaatcaacaagttaaagccaaaacgctccctgcaaccaataccttggtacagggtcacgaatctctggaattagtggttcaggcatttcatcgaacaccttttgggcgcggaaatgtctgggctcaaattccagttgatcagaaagcaataggcattaagaacaactaatccagaagggatctatcaatcaatactcaatcacctagcatactgagaattctacactactctaacccatcctcagaaacctattcactactcagacatcatgacagaaagcataaacgttgaacaggttgaagacatgataacagcagtatgataacagaatgaataacagtaaacgaaaatcaagaacggaaactgaatattgaatactgaatagataaagagaaatccggattacaaaaagtctagaacacaaggtctgcggaaataaaactaggtaaaaacttcttttttcgaaaatgagaagtacatgctacctatagccaaatatcccgaaaccctaatactcaaaacgacgaagtatttggacgggttaagaactgtactcgacccaggtggtcgagtgagaactcgagtgaatagctggagtcttcttttcttccttgtgctcgagtgtctggttgagtgtggaatgaagaaggctctgaagcttgtcatcgagtatgcagtcgagtggtgtgatggaggtactcgacctctaggcagagtgatgtgggcgagtagttgtctggcagtgaaggtgaagacactcgacctcatggtcgagtgaagtgatcgagtgatggagacgagggcactcgacctcgtggtcgagtggtgaagtgaagtggtgatgtcctctgctcgacctgggggtcgagtggtctcttgaggtcttgaagctccttcttagaacaacaaagccaaagactcatacggactttggctacaccatgaaagatttgagaagcaagaagaaggttggttagtgttttggagtcgaatatgacttgatgtcatgtgtatgattgagtataagaacttaaaccgcaacctgatcttaaaggcctaagtaatgtttccttgttagaagatacaaagccaaaggctcatatggactttggctacaccatgaaagatttgagaagcaagaagaaggttggttagtgtttttgagtcgaatatgacatatcatgtgtatgattgagtataagaacttaaaccgcaaccggatcttaaaggcgtaagaattgtatctttgttagaagacacaaagccaaagactcatatggactttggctacaccatgaaagtgataataggtttttagtcaattatcctaaaacaccaatcatgtcattgtagtattttaggttgtcaatccaaatgggtgtgatgctaacaatcaagatgtgatcagaagtcactaagtcaagccaagcataacaggttttggtgtgttcctgcagtcctaagtgaacatgcagaaaacagaaaatcaaacagaaacagtaaaacactcgaccaacacagctctttgcagagctctgggtgaggtcgagtgacaggtcgagtaacagacaggaaatgaaacacaggtactcgactgcacagtctgttgccagacaactgggtgatcgagtacgagatcgagtaacaagaaagaattgcagaaactaagcaacagatgacaagatgcagtaaacaacagtagagtaaacaaagaattcaatcagataaagaattcccgaggatggggtaattgagtagtttcgtttcctcagtttacaggtgattgacatgctcaataaattatccctaaacaacaagttcattaaccaaatctaagtgccaccgcaacagagaccctcaagttaacctagtcccagactcaatcaccattgacgagagctaacctaacaggcattacgaatcaacaagttaaagccaaaacgctccctgcaaccaataccttggtacagggccacgaatctctggaattagtggttcagacatttcatcgaacaccttttgggcgtggaaatgtctgggctcaaattccagttgatcagaaagcaataggcattaagaacaactaattcagaagggatctatcaatcaatactcaatcacctagcatactgagaattctacactactctaacccatcctcagaaacctattcactactcagacatcataacagaaagcataaacgttgaacaagttgaaaacatgataacaacagtgtaacagcaggatgataatagaatgaacaacagtaaacgaaatcaagaacaaaagctgaatactgaatactgaatagatatagagaaatccggattacaaaaggtctagaatacaaggcctgcggaataaaactagataaaaaacttgttctcgaaaatgtaaagtacatgctacttatagcaaaatattctgaaaccctaatactcaaaacgacgaagtattgggacggattaagaactgtactcgacccatgtggtcgagtgagaggtcgagtgacttcttttcttccttgtgctcgagtgtctggttgagtgcggaatgaagaaggctctgaagcttgtcatcgagtatgcagtcgagtggtatgatggtgatactcgacttcaaggtagagtgatgaggtagagtagtggtctggcaacgggatgaggacactcgaccgccggatcgagtggcgtgatcgagtggtggtcagaagatggagatgaagtcactcgaccagggggtcgagtgatgtggtcgagtggtggtcagaagatggagatgaagtcactcgaccagggggtcgagtatatgctcactgaaatgatacatgctcgtgtcaaactccgcctcatctatatcatccctctcatcaatatcttgtgttgtagctccttcggtatgactgatctcctcagttggcggactaccctcgaaataaagttcttcaagcgcaggcttgaagtcaatgttcctgccctcgagaatcctagcagcgtcaatgcccgggagaagaatgttggcgattttaatcgatgaatgctcgaacgtgtagcggtgaaagttgccagccatgtcaaactccaagaactcacatcggcgcaaatgatccaagtccatcatcctcggtgccaaccctggttccttgagcggtactccacaagcttgcagaattggcgtcacaacaccacccatgcatagtgctcctctcaccttcttcttcccgttcgtcaacgcccactttctgtatccacacagatggatcaactgaggcattactggtggtgccttgttgagatcgcctctcaagacattcttccccttcgtccggcggagaatccctataagcgcataatctatcatctccatgtccgtgttagacacggtgcctgtagactccctggagtaaaagacgttggcaactaatnnnnnnnnnnnnnnnnnnnnnnnnnnnnnnnnnnnnnnnnnnnnnnnnnnnnnnnnnnnnnnnnnnngattgttccctatagtggcccacaaatccttaagctcctctctgtcaaatctgggtttggttccctttccactagggaaaccaaacaatccttctaacttcttgatcgaaagttgataccactgttcattcactgagaacgtcaagaagcctaaccccatggtatccagctcaaagtctgtgagtgcctcatacatctccacttgtagcatggaaagaaactctattgtctcctccttataggcagggtaagagtaagacatgagtgtctccagatgacacttctcgaacagatgctgcacgtcctccagtaaccccagctgggctaaagtctcataacacggatacctcgttccccagaagtcattcatctcgaagaatttgatatactcctccactgtaacctcgtcgggtttgttcagcagcttcgtctccctgcgccatgactctggctcatactcagtctcgatatcctcatcaatcagctcatatctacttgacatcgccctctttcctctggcgatttcagcccttctctgattacgtcgggctgcagagcgttcgaattcatccctgaagctctggtaaacatgttgctctctcggtctagcggaccaggactcagcttcatccacattgtaatcaggatccatagagaatctccactgtagttactcatgatgaaacctgaaaatagataaaactcaaagatgaacgttaatacgttagttctcgcaaaaacaaaaacacaatccaacggtgtataccggtcgagtaaaccagtcgagtaaaccggtcggttttgattttttttttttatttttttgttttgtaggtaatttgtcgagtggttatggaggaccgagtgaagcgatggagatagagttgtgaaaacgacaaggttatgcaggagctgcggtcgagtgagtcggacggcaaggtcgagtagcgaatgatgagagtagagtcgcggattggtgatgatatgatgtgagaagaagtggagtgactgtgagcgagaagtgttgaaggtgaaatgatggcagaggtcgagtgttgttagaggagcggtgattcgagtgttttccttggagaggaaaaacggctgcttggtcaattggtgaagatgtcgagtggtagcgtgagacggtggtgaagaggctagagagaagcggtcgagtggtgctttggacggaagatgatggcgctaaagtcgagtgattgaggggacgtcgagtggagacgagattgaagagagatggagaggtcgagttgtcgagagtaaagtgatgaaagtttggttgagtttggatgagaggtggaggtcgagtttaatggggatggaggagatgaagaggtgataaggtcgagtacagatggatggaggtcgagtgatgtggtagacgtcgagtggaggagaagagatgaggggggggggattccttgttcgtttgtctgttgcatggaggacatgggcgtcagcggcggatcccacagtgtcttcttgtctctactttgttcactagaaaacctccaggaaatcccacaatcttctgtaaacttgataaactccccggaagactctgtagcttctgttggtcgagtaaaacgatgttttaattttttttgggttttaaacatcactcatactcgaccaatgtactcgatctctagaccatcagtagagtaaaagttttgaatttttactctactttcacgttacttctcccctttttttttctgagaaccaaaaacacaactaaaacaaatcagaaataacaaaaaattatttacatggataatcatggaactttctcccaagtgagcttgtttaaagtctctagcttgactcctcacacttattgggcgttgggcggctcttccagtggaacagaagttccttctggaattgtttggtctgccatatatttctttagtcttaggccgttaaccgcgaagtcgtcaccttttccagataatgtgatagcttcatatggtcttactgtagtgacactgaaggggccagaccacctagacttgagttttcaaggaaaaagcttcaagcgagaattgaatagcaagacttgatcaccaactttaaaatcttttgaagttattttcttgtcatgaaacgactttgtcctttccttgtaaattttagagctctcatatgcttttagacggagctcatcaaggtcgttcagctgtatcaatcttttctcttcagcagtcttgatgtcgaaatttaaaagtttcactgcccatatagctttgtactccagttcaataggtaagtgacaggatttaccataaagaagattgaacggggttgtaccaatgggggtcttgaaagctgttctgtatgcccataacgcatcgtcgagctttacagaccaatctctcctggtgatcccgacagttttctctagaattgattttatctccctgttagagattttcacctggccacttgtctatggatggtaaggagtcgctactttgtgtttaaccccattctttctcagtagactctcgaaaactttgttgacaaagtgcgtgcctccatcgctaatgactattctagaaactccaaatcttgggaagatgatgctcttgaataacttcaggacgactctagcatcattcgtaggactggctattgcttccacccattttgacacatagtctactgcaaccaatatataattattcccatacgaggacggaaacggacccatgaaatcaattccccatacgtcgaaaatctcaacctccaaaatcgggttctggggcatctcatttcttctgctgatgtttccccttctttgacatgaatcacactttgaaatgaactcttgagcgtctttgaacatggttggccaccaaaatcctgcttgtaggattttagatactgtcttgaacgttgcaaaatggccgccatagctagaaccatgacagtgctgcaagataccgtttatttcatcttctgagacacacctcctatagattttatctttgcagagagtgtagaggcccgctcatcccagtagaagcgatttatgtcttcgaagaacttctttctttcgtaccctgacagattcggaggctcttcaccacatgccaagtagttgacataatcagcgtaccacggaagtttctcctctactgcaagcatctcatcccaaaactggctgcttttgaattttttgttcacttcccggatggccataagctgttcctcaggcatggtgtcgtcaatggggactgcatcttcaattctcattcgcgataagtgatcagctacaccattttcaatcccctttttatccactatctccatatcgaattcttggagcagcaaaatccatctcagcaaccttggcttggtatctttctttacatagatgtgccttagagcagcatgatcagtgtaaactgtcactttagagcattccaggtagctcctaaacttttcgaatgcaaagaccacgggcaatagttctttctccgtagtggcataccttacttgtgcatcatccaacgttcggctggcgtaatatatgacatgaagcttcttatctattttctggcctaaaacagctcctactgcgtaatctaatgcatcacacatgatctcaaatgggtagtcccaattaggcgctcgaacaacgggagcatataccaaagcatctttgatggtgtgaaatgattttaggcagtcctcatcgaattcaaatttggtttccttgcacaatagtctggttaacggcctggctatcttggagaagtctttaataaatcttctgtagaacccagcatgaccaaggaaacttctgatgtccttcaccgtttttggtggctgcaactgcatcatcacttcaatttttcctttgtcaacctctatacccttctctgatatcttgtgacccaacactatgccttcctacaccatgaaatgacatttttcccaattgagaacaagattcgtctcttcgcacctggtcaataccctgccaagattcaacaaacatgaggagaaagaggggccatagaccgaaaaatcgtccatgaaaacctccaccatctcctcgattaaatctgaaaatatagaggtcatacacctctgaaatattgcaggagcattgcataaaccaaatggcattctatgataagcaaaaataccatacagacacgtgaacgtggtcttctcctgatcatctggatggattggtatctgaaagaatcctgagtacccatcaagaaagcaatagtacttgtgattagctaacctttccagcatttgatcaatgaatggtagaggaaaatgatccttccttgttgcagccattcagcttcgtgtagtcaatacacatcctgtggccagtaacagtccgtgtatgaatcaactcattcttatcattcttaacatctgtaacacctcctttcttaggaaccacatggagtggactaacccaatcactatttgaaataggatagatgattcctgcttcaaacaatttcatgatctccttctttacaacatccttgatatttgggtttagtcttctctgatgctcaactgagggtttagattaatccttacggtgaatcctatgcatacacaagtcgggagagatacctgtaatatcatcaagagaaaagccaagagctttgcgatacttgcgcagcttgcttagcaattaagtgagctctgtgttgtttaaagaaggattaacaatgacatggaagtagaattttcaccaagaaatgcgtaccttagccttgtaggaagtggttttagctcaatcttaggggctttatctagacccctatcggcgttagaaatcagttttggggtcgtagatgaaagatcttcttggactattagttgcatcacatgttgggtttcatctagcagctttgttgtccaattctgagatatcctctattgataatcccagtctctatctataaaatactttttacagctattggtgcgaaagaatctatcagaaacgttttaccttctataatcggcttcttaaccaacttgttcatatcaaattgctcagtaagatcaccaacattcagccctattcttcccttctgaatgtctatgatagctttagctgtgtgcaagaaaggtctaccaaggattaaaggatccttaagttctctttcataagataaaatcacataatatgtgggaatcatgctattctcaatcatcacaagaacatcatataggacaccatctggaatacgggttgaacaatgtgctaatacaagagtgatataagtaggcccaagattgaaatacccaatatgtgttgctacagaacgaggcataaggtttacactagaaccaagatcgcatagagctcttgggaaggtagctggtaccctaaaccctaaaccctaaactcaatagttgctccgagtaaaaaggtaccaagatcttgtagcattcttggagtccggttctgagatcatcataacgctgcattcattcttcagattcttggtgaccaatgtcttgatatatttttgtatcgtaagagagattagaatagcttccacaagaggcatttcaaaagtcagtttgtcaatcatagccttgcatctaacatcatctaaagcttttcttgccttcttaggatccttagaaaaaggaatacttcgatttgctgattttgcttcagctgtaattgggattttatctgaatgaactgggtgttgattgacatgggtaagtgtcgatcgacattatcgggcattggttcctcctccttcatgaaattttcgattcagctcgacacaggaataacagcttcttcaagattaattggtgttggtcgacaccctgttgtatcgatcgacacagaaggtttttctgcaactggagaaagcttagctcttgatgaatgttctctctaaagaactgggttgactagctttccactacatagcgtaactacattgacggactctgttgtataggaagactcttggagcttcctgatgtctgtttgcatatgaaataaaccgatttttagctatctgagtagtccctctagcatggctttagttttattcttagtgacatggaacaaatttacccctaagcttaccctcttaaataaagagttcgtggttagtacttagtgtcgaatttcaaaaagctcttttgttacacaatatgcctgtcg

SEQ ID NO: 38360 - DNA, 221 bp, Arabidopsis thaliana landsberg
gatcaccccaattttggtttaatagtacatcctaataggggacgtccatacctcgacaattaaactccttcaacttggataccatgaggcggtcctgggacagtattaccataacgcaggagggattgggagatcctctagacgccgaccaccctatgctccggacccgaatacattacccacaattgaggcacacatgcttgtaaccgctccttcttcaa

SEQ ID NO: 38361 - DNA, 2236 bp, Arabidopsis thaliana landsberg
tcttcctttcctataggattgacatctttgactcagcatatataaggaccctatctatacgaactgaacattgtacatttactgtaactcttggtaaacaatctgttaatgttgttggtcattgttactcatttacaatgtatgttacaaatgcaaggttcatccaaattctttgtatttggattttagtacaaacattggttatttgtagcatagagtgaaatttgtcatgtatacttggaatgtgtgtatcttagttttgttgataccacaaacatgaccgaaactgatacaactgtggacaaagacctaaaacgtgtccaggttgtatcacaaaaaccaaagtcaatttcaatacatatgcactatcatatatgatggcagaagatgaacaatcacataccaattaagcttagaaacacgaaacaaccatcttatcctggaagaggaactagacttggaacgtacacgtagctcttcattatctttgtttggtctcttcattaggttaattgctttttatgtctttgtatttgttaagaaaataagcatgaaacccccatgttgctcgaggcggcaatgcagatcttttttgatcacgaaactatataataaaaaaactgtcttaaagtaatgcaacaagtatgtatgaaacatttgttagtcaaaacataaagatatgaccaaagataacggtgagaaaaagaaaaaaaagaaaaaaacaggtttgcgtgaagcttacttattcgactcttgttctctccaacaatgtggaccaagtttttggtatcgtattcatcctttccaaagtaattatcacaacatacgacgaattttttctccgcatcgaccaagaaacttatgccagacaaaatagttcggacgggaaatccactgctaagaccatgatgctccacgacaccactttggtctcaccaatcctacttgtcacccatatctatgtccttgatgtattttcgcgttgtcataacaccgaaaggcgaaagcttctcttctttaacaacggatagagacgcagtgttatgattgcattgatacggaagatgtagacgtctaaatctttgagttgtataatcaaaactcactagaaatacgctgagaaattttctctttctcatctgacgcaaacaagtaagtatgtcccttcaaagacacaccgtaatcagtatatctttcaaggatgcagtcacgagtgacatcaaaaaacctcacatgaactgagagttaattacatcgatagcgaggtcttggttctagattccataaccactatagctcaatatattgtagctattacagggggatgggggcaagtatgatccaaaagcatagtagtagcaacgattattgggttcaatccacctagttttacctagacacgggttccaaaccaccatgctagtgatgtctacgtcggggcataacaatcaagccgcacagtgagagacttgagaaatctcgaatttatcttcaaaattagaaagagaatggattaggctaagctcacatgcggtctctacagatgaaagtccatggaaactgacactcatagaaaaaaacctacactcgtgcaacatgagattatgaaaaacctttggggctttatggcagtgtttgcttttgaatctcttatcgttgtataaatagttccaccgtttacaagtagatcgtaatcgtttcaaagatgtagccggaacgcggcagagtatctccactaacaaatcctctggaaggttcaacaccatcattggaagaaagaatcggtggctttgattactatcattattttttaggttttcgtgtttcaacgtttactcaatgttatcttattggagttgtatataactctttcctttttttcattttactgctatttttagtttttccttttcctatttgatcttttttttttttttttaaagtttttccttatcccatctggtttctatttttattgttttacaaggtttttatttcctgttatttctccaaatgattcatatatataattaatgtcagtaaaacattattatgccaagacaaatgtcactatgaagaacttgctcggttgctccacgacattactttggtgtttgatctcatcatcaatcttatttgttacccatatctctttctttgatgtatgtgtacgctataataatcaacaccgaaagtttctcttctctaacgactcataaagagatagtttcataac

SEQ ID NO: 38362 - DNA, 4721 bp, Arabidopsis thaliana landsberg
ctctcagtctgcttcagacatgtttgatttgactatttgagatctttgttctgtttctttcattgtttgattattatttattctcgcagcttgaaccaaaatgaaagatcttcgaagtctgattgggtctctttatggctgaaaacctcgagctcctaggcaaagaaagagaagtctgaaaatgatcagcaatgctccataagcgaagcttaaagatttgtgtcgtggttcacttacttaccttgaaactactatacagactctttttttttgtggtttaatgtaatactatatataaagatatgtaattgatcagaaacaaatttctttgattcaaattcggattcagataagtgtatatcttgcatactcacaaatgctattagctgaacgcaaccaacctgagcaaagaaataacccttggattgacaatatagcttttgggattcattttaaagtcatacaaataataaccctttggtttggattcagactaaaaaccaatgatagatagattagacaattccacactcacaagatgctatcagctcttgatggtaatctcctgaagaaattctgaggaatagaaggtatatcgaaaactctaaccctaggatgtctcatgacgtagaacgcaagaaacgtgagcagtaacttcatggagacgaaacaaatcactccacagctaacaaaacagaacgtcaagaatagagacgttgctcttggatctctccaactcaacaaacttttcactctttctccttgtgtagccaaatctcccaacacaatcatcatcctccctgcgatcccacgcaacctatcataccttcttttcagtacatcaccggatttcgcgctcggaaacacatcaaactcctcgtctagctcatcgggcaaagccgaatcagctttagatagctttatatccatgtgtggaggatgtctcggtctcaacccgaacctgtataacccaaacacgaagcagtacagtagcatcgagaaaacacagtacttagggagaaaaacaacgaacaagcagacaatatggactaaaaccgacgtcacgggacttttccatttgcaaatctcatcaaaccatttccaagcatcgatccagccatcgaaaaacgagacaagacgttcgaaattcgctcttcctcttcgtagactccaaatgtttgatcccacatcgagcatatactctacaacatctcttccaagtgctggctcgttgcgccctaagttgatgcagagaatgtgagtcgcttggtgcctaagactgtctaattggtatatagacaatggagatatgtaatgcatttctggaagcaacggctctgtgtacttctgaagcatatccatcatagatgtcgcggtgaacctaaccgcgagcttgaatctcacccattttcttaaccccgtctggttttaaaaccattaaaggataagaatgtgtgtagatcttcgaggttacaagggtcgataaacgtatcctgatcttcccaatccttgaatcgttaatcaaacggttttcgttacccgcaccaaacaatttcagattatcaaaaacaccgattgttatcaccgtgtaaggatcatagacttcccaagtatactgctcattccactttggatcgaaagtgtccacaatggtcctcgttctcacccattttgttccgtatttcgccacacaatacgcatcggtagttcctcgaccacctcttgacttcattggcattaaacccgtagcatttaaaactcctagctccaacacaccaatagctggagtccatagaagcttagcagaagccctataatcgctgctatactgaatcgactcatcaagaacgtgataacctccgtctaaagaaacccgcaaatgaatcctcccagcaaatctcctcccttctccggtctcaccaatgtgttcaacgttgtaccacaatgacggcaccggaccaggaagcacccttctctcaacctgagataactttatctcacaccttcctaaacactcttctctcggccctaccttatcttccacgctaagtatcaaactgtcatcaaacggctcaaccgctacaaacatcatatcctcgttccacacaggattcacactcttcgtctgcgaaatccgactcctcacaacaacgtttccaagaaaccctttaatcagaacctctggattaatccggttcggatgcaacggaaccaaatcttgagcttcgattacattaactcgcaagtaccaaagcctcggtgaaagataaactttagatcgcgtgttcaccacgttttctccggtaacactcgcggaatccgaatgccaagcctccgagaaaacttcatcagcttgtgtcccaatccaaacagataccataatctctccaccgatcttgacaccgtttctatcttccaatctataccattgaggagccaatggactatcaggaggaacacgtgtcggaatctccgcaacatcgaacttacatttcccgacaatatcgtcttcgtttgggttatctctatttcgtacgaccacttctaagatatccccttgaagacgagttttcgtgaatgcgaaggtttcgtgaaactcagggttagggtttgagtttaagatctgttttgttcttcctttgtagcttccgattttgactgcgacgaaagagtcgttgaccggtaaggctcgagcacggacaattctagcgtagaggaaatgcatcgcctccacgagatcgaatgatgacgtcagcttctcgccgccgttaacaccaccattgccgatattgggagatgtctctttcaatgagaaatcgccgtcaccggttccgtttccggtaccgttcaccgccatttcctgttgtattttgaagaaaacagttagaaaaaaaacgctaaaatgaatctcaaaaatgttgtgaagaaagatccaaacctgaacagagtagtagactttgttcttcttcttcaagaacttttggaattgcagggttttttgtttgtttgtttagtcaaacgtagtttgctaggtttaagcaacaatacaagtggaaatgatacgcttatattttttgaaatgatttcgaaattatgagattttaatgtatttttttcacatttatggttaatcaacgttaattgcatgtgatattcgttaagagaatccggacataaaaatcagattaattggtttataagccgtttctgattagagagaaatcaggaacctctttcaaaaaattaggaacctctcatgcatattaacttcaatattcaaaactaatatttatccgccataaatgtgtaacatacactatgatttattgtaaatgctatctataaatatgagattgtaaaatggcttattagaaagtagaaacaagagatattaccatcaaaaataagccatgttcatcaaattattgcatgcaatggacaataccatgaaagataagctaataatatatcatacatttttaaaaatcggactaattctatacaaatgcagttccaaagagtacacagagagaagacaaataacaacaaatgatactatacatttttcatggagtctctatgagacaagactccactctgtttctcatatatttgtcatgttttacatttgagactctagaaactccaagatggccaaaccggctgcaccaacatcgtcatccaatacatgttctgccggagaatgacttattcctccacgacaccggacaaacaacattcccaccttccgaaaccaaaagaaatctcccattaagttagtgtctgaaccaagagacaaaacccacatggcttatagcttataaggcctgaaacaaacatgtggatgacttttgaaagtcaattaccttggttaagtgtgccatagccattgcatcatgtcctgctccactcattagcacggggacctcgtcttgaacctctcctgtcatcttcttaagtgcactctgagctgctgatttcagctgtaaactcaattgcgggtctgacattactgcgtctgcatcgtgctgcaatgatgataaaaaccgggacgaagttggtaagaaggaaacaatagggagtataaggttttaggacttgtacaacactctttacctttcgttcaatggagcacaaaagcgatcttttgtcacatatctggtacatcctagttgataagtcatggagaatagccttgcgtcctacatcatctatcgtacgtaaatccacagtgaaagttacctgaattcatctccatgaaatcatttagagttcattcacaataccaatagagaaaaaacataagtgcaaagaagagaatagtttctttgtcttacctggcctgggatgacattgctagcacttggccatgttgagatctctccaacagtacaaacaagtgaattagcaagggattctactgtatcctcgttgcattgaacgttgcaagataagtaatctttagggtttttgcaaacactttccaatagtacaatcagctccgcagcaccagtcatagggtcctgacgcattgacattggaactgtaccagcatgtccttgagatccttttgcagtaccctgtagaattctgtccatttgggtttcaaatagccttctccaagattagacatgaagttaaaaaacattgaatacgttaccttgagtcttgtctgtcctgcaattccttttcctacgcctaagtgatagaccgggtctgag

SEQ ID NO: 38363 - DNA, 2298 bp, Arabidopsis thaliana landsberg
  unsure (1)..(2298): unsure at all n locations
ctcatcattcttgcatactttgcatgattaggatagctttgcatacatattgcatttctgagtttttttcaggtgatttggagctgtttgcaagcaaattagaagaaacgagccagaaccagaagacatactcgacccccaggtcgagttgactttggagccattcttcccacatactcgacccctaggtcgagtgactttggagccattcttcccatccactcgaccaccaggtcgagtaacctcaggtcaggccactcgatgacactactcgaccccctggtcgagtatcacttcgccacaccacctgacaacactcgaccgttcactctaccacaccactcgaccccacggtcgagtatcacttcgccacaccatcaccatcactcgaccattcactctaccaagttactcgaccccctggtcgagtatcatcactcaccaccatcagcatcactcgaccggacactcgatcacgtcttcacagtctactcaaatccgcactcaaccagacaagctgagcacaaggaagagaagaggagaagacaaagtgtttggaagcggcttggacttccatcggatcacgaagcatcggcccattatctctctatgggccgagcgattaggttattggcccgtctactatcattttattttgttttgtataaatagatgtcttagggttctgtcctgagacatctagtcgacattgagtttttgctttagttttattttctgttttactctgctgcgccgcttttgcttctgcaacctgtaattcgagatttttccaagttattcagattccgcatttgattcaatttgtcatctatttctctactctttatctctttacttatgcaatattatcgtttatctgcgtttatgtcttttagcatgttgtctgagtagtgacttagaattcttagggataggatagagtagttgtggaatctgtagtctgtagaatggttaagttttagaattgattgaatccctttaggactagttgcgtttactgcttatttctttctcatcaactggaattcgatcccaagcattccctcacccagaaggtgttcgatggaatgcttgatccactagttcctgagatattcgtctctatcccaagggattggccgtttagagcgtttattgactttatcagtctgttcttattgcctgcatagttagattccgttaatgggaattagtctgggctagctttgcttgaggatttctatcacgggagtgaattgatctgttgttgaacctgttgcctagggataacttgattgcgcttgttaaccattcgaataggctaggataccactctattcgactaccccatccttaggaatttctcgtctatctgatttctttgttttatcgttatcgctaaatcgttctcactacttgtttcttcgtttttgcaattactcgatcaacttactcgaccacacccagtgtctggcaacagactgtgcagtcgagtacggttgtctcatttcctgtttgttacacgaccagtatactcgaccacacccagtgtctggcaacagactgtgcagtcgagtatatctgtttcatatcctgtctgttactcgaccacatcctacttctagcatcagcctgttgtggtcaagtgactttagtaattctgttattatttctgttttctgcatgttcgcttaggactgttagaaaccccaaaactgttattgcttggcttgacttagtgacttctgatcacatctcatctgtttgcatcacacccatttggattgacacctaaaatactacaacgacatgattggtgttttaggataattgactaaaaacctattatcaaacctcaacgagatcccgaagagtaaagtagtgcttccttgttataggattcaaaaccaaaaactgttacgaacttcggcttcaccatcatagctttgagaatcatgaagaagcttggtttgtgtttttgtagtccaaattgacttgatgttttgtttatcattcaatataaaaattagaaacgcaataagaacccgaaagttaaagtaggattcagggtttaaggtttaaggttaaggttttgcgtttagggtttaggttttaaaggtttagggtgtacagtttagggtttagagttagggtttagggtttaatgtttaacgttaaggtttagagttttgggtttaggtttagggattagatatttgggtttgggatttagggtgtagggtttnggtttagcgtttatgtttaattttcctttttttcttcaagatgtttggtttc

SEQ ID NO: 38364 - DNA, 2076 bp, Arabidopsis thaliana landsberg
gcaactgaccgtgaactgctacttttagggtttgcactgcacaagaaactctaatagagagaaaaggtttgaaagcctctatgagaaatgaagggttttaaaagagttggtttttctttcgcgggttacctgcatacgcgtagtccgcaacgggcttgcccgcttgaattcgcagtctggaatgggcctgcacgcgaggcccgctaattatggacaaataaatcaacgtccaagcccactccaccatgggctacttggacaaagcccgcgggctagcggcccgcttgacaactctagaccctgtgatcgagtacaacaggatgacagagagtgaaaatgcagaaatggaccagtttactctatcacacattctcactgttagtagattggtgtgatcgagtagaatggttgaaaacagaaaaatactaaaattcaatagcaagtgaatgaagcaggtaagtaaacagagaaatcaaatagattagaaattcctaaggatggggtaatcgaatagtgtggtctccctaatcatttcagttggttaacaaatatcaattaagctatccctagacaacaggttcaacaacagattaattcactcccgtgatagaaatcctcaagcatagctagacattgacctaattcccattagcgatctctaactaagcaggcaataagaaccgactgttaaagccaataaccgctctaaacggccaaccccttgggatagagacgattatcactggaattagtagatccaacgttccattaaacgccttctgagcgctggaacgtctggaatcggattccagttgatcagaaaggaataagcaatacacacaactaaatctagaagggattcaacacttaaccaacatattcgaccaggggttccacaactactctatcccatcctcagaaaatgtgtcactactcagacaatatgcttaaagacaataatatataaacgattgaagattgcatagttaaaagattaaaggaaatgaaacaaagatgaataagcaaatgaaagcaaaatctgaataacttagaagaaaaatcgaaatacaaagttgcaagaatgaaaagcggctgctgaataatagtgcgaaattcgtgtctctgaaagtgcatgtctcagggcaaaacccttagagacttatttatacttaaaacgataaggataaggaagcgggcttcaagcccacttaacggcccatggacgatgtgatcaagagtgtcggctcaaagcaggcttcctgatgggcttcgaagtgggcttcgaatggacttcgaatgggctttcaatgggccttatcttctcttctcttttagttgctcaggttgtaaggttgagtgcggactgatcagagggtcgaggtggtggttgagtaggttggttgacagaatggtctgggctgcttcttgtcctctatgatcgagtatattggcagctgtcaggatggattggttcttctcctctgcgatcgagtataactggtggactggcaaagtggactacttggtcacctctgttatcgagtagaattgcagaatggactgcctggtctcctctgtgatcgagtatatctggcagaatggactgcctggtctcctctttgatcgagtagaagtgtctggatggactggtgagctgactgcttccctttctactactggtgattaagtatgtttggtggaagtgtgactttctgttctgtttcccctctttctgagcaccaatagatccaaaacacctgaaacaactccaaaatgcagaatgtatgcaagactagtcctagactcgactaaagatgcaaaatgtacaaaaatgatggtgaatgctatgaaagatagatgaaagtagactcaaaatggtgataaaagtttgtgtaaaacatgcaaattataaacatatcaactcccccaaacttagtctttgcttgccctcaagcaaacaagtagacataagctgaaggagaggtttgaaggtggggattcagaaccaaagcatcagataaatcagatagaaacaatgtccaagttggcagttctaggatgcgatattatcgaact

SEQ ID NO: 38365 - DNA, 8089 bp, Arabidopsis thaliana landsberg
  unsure (1)..(8089): unsure at all n locations
actgtgcccgacaaaacccggctctttgtaccagaaattgcactggcttaacttaacgaacagcacttgctcgcgccgcttctcgatcactcttgtaagaagcattccatgactcgaaggatacaccagaacgccatctatactatatgagcacggactcatcctaaaacatgtggaacacgctgaatatcaacctaatgaatgctgcacgtgcattacccaaaccagacggcatcaccctgaactcagaatgtccgtatcttgtcctgaaagcagccttgcgagtataaggctcacgctatcgcgtagtgatatgatccttgacaaagggctcaacccctggtccgcaatacataagcggaaacttccgttcttcttctttacaaacaacatctatgctccccaaggtgaagtactaggacaaatgaatcccttacccaacaaatcctccagctgcttcttcagctctgccatctctgctggagccatcctgtagggtgccttagacaactatgttgtccctggttccatctcaatcctaaaaggatcagaccgtgatggtggtaatccctacaacgagtgaaacacattcatcaactcctgagcaacccgaatgtcgctcactgcttgtaacgcccctgaatcgctctatggtctgacaatccaagggcaacccgaaaacactatgatgatagctcacacagacaacccgacttaggttccaaacaaatttagacccttagccggattacccacatgaaccatctctcacgaacgcggtctaggcttttcaacccttgtcgtgatcatgagttgtgttagtccggacaagactaatatcgaatgaaatacactctatgtaagaaaataatcttttaaaacatataaattctcatacaaccaagtatccaaaacgttttaacaatggcgcctcaagcatatactctcaaatccaaccaagaacgaaaatcattaagttttgcaaaaagcaacaaactctataccgtcctgagcatccctctaatggttcccactaaggtttcttgcaaaataaaatggagtcataagtaatctaagattacttagtgagctcggtctacctgcaacagatattagttctccatcccataatcataacacgcaacacagaatatcaacgaaaggtagcttgccgaatcatctaccaaaaacatgcacatgcaattaagactctagttttattaatttttttaaaatagggcccaatatactgccttcaacccacaccaaacacacactcccgagatctctcgctttacaaccacaaaggcatgtaaccagagcatcccttcaaatgctacaccgtcgtgtagacaactcatccagggtatctagccccgtctctctgagcccttcgcactatatggcgatcaagtaacaactttaacaagaccccacaatagcacggttcactacgaagatcagacataccacgatcttgatacgcttatggtctctgcctcctaccacgagcaccacgtatcaagacccaacaattcaatatattatgagacatatggttaacacatacaatcatccatatccttactcaacacaacctcccaaccataagcctttaagcataagaatcgataagatcacatatgcgacttagtaccatcacaccattaattaatactcatataattcacaaaatcattcaactaatgcaagagtatatgaacatgcaactaaacaagcaatccatcacccaaataaataccaaaacctatcatgtcccatatcacacgcttcgagacccacagagattcggctgaaagtttaaggttagcttcaacggttctcggacatctcacgacttctccacatcatttgcatcttgatatagcttctttctaagtaacctccctcattcttgagttttaacacaaatcggcatatcaaatcttttaaaagaagtcttgattcgactcaacaggattcacacacgatcttcacggatgtctcggtcgccgacatggatatcttatccacgaacaggttctcttgatcatggacatgaattctttagttaagggcaaaggatcttgatcacgggcaaagtttctcaatcgcgggcaagttttctctcggttacgggcgatttttatgagtcgggcagccttccggttctctctcctttctcccatcaaatggctcgactttggccaagcaattataggtggaacaacttgggctccaagcaaacgcatgtcatctggtggtgacaccttgcgggacacatgtcgcccgcccgtaaagacacatatgctgcaagactgggacaatgacacgtggaaggggaaacttcggctccaatcctcataaatttggctctaagcaactttgcttgggctccaagtaagtcagcccacgtgtccatggcgttgtcaaacggtcaacgcttggcggggcaaacttcgcccgcgacacgcccatgttgcccaaacttgcccattcttgtccaaataggtatttatttttccctttgatgatttaacaccttttgggcaaatacggtcaattggccgtgtattcgggacaactttctctcgtttcggcttcgtcaggatgaacccatttcgaactagacttggcatgttcattttttccttgcccatctctttggctttcgtccctgaactatttctttctctcccggttctttctcgttcgttcctcgatgtttcccacttagccgcttaccccttatcgagggtcactacagtggtcattcctgatgaatgactcccatacttcgtgtactttgttcatgacaatttccacttcgggcccaaagatgcatattaagtaagggtcactaacacctcgcctatacaatgcgtccttgacaaacaaaattttgcgctaacgattcttatttttctggcttgccacttatattttgggagctcgcctgtcacaatgtaatgttttattggatccatacaatcagcccccaatctttagccggaatttggttaacctcatgaaatactcgtggctccggttcgggatgctcatttggcttgaggatatcctcctcgatcggtggctcggtctctataattgcctatggaactacatcctctatcaggttaatgggctcctcgcatgagctttcattgggtgcaccgggatcagatacggttgaaccttttgacttcctccgcttgacaggtggtaactctatatcaagctcaccaagctcacgtgccgcaggtcgagaccttgttatgacgaggttctctttctcctccttaatgcttcgttccgaaatgcattctactggaatgactctttttacctcaggatctgacattgacaccagtgctgcaagcgcgtccgcggttgtattttctcctcaggtatgcgaatgagttcgaatttcttgaaattcttagccagatctttaactacttcgagatatgcttccattcttgaatctttgacttcataatctccattgaactggttaacaactagctgcgaatcacaataagcgaccacctcttcagctccaattccttgtgccaacctaagtcttgcaattagagcttcatactctgcctcattgttagaagcactaaataaaatgattgctcaaggacttccaaagtgggagattccaactttatccccacttcggatccctgttttgacaaagatccgtcaacatgcaactttccaagtttgattttttggttgctccgacgcacaaagtactagtagttcggtcaggaaatctgccaaaacttgggccttcatgctaactcggcttttgtactctatatcatactcacttagctccaatgcccactttaccaacctcccagattgacttggactatgaagtattgttcgaagtggctgtttggttaacacctcgataggatgagactagaagtatggacgcagcttccgggcggaggttaccaccgcaagtgcgagtttttccatcattgtatatctggtttctagatctatcatcgacttacttatgtaataaatcggcttttgttctctgcgatcttcccgtatcaagactccgctaaccgcatggtttgacaatgaaatgtacaaataaagcttttcatccacttcgggtttggacaacacgggtggagttgttatgtacgccttgagctgtccaaatgcctcttcacatttctcatcccaaagaaatcctttgtttccttatagaatttggtaaaaaggtaaaaatttgtctgttgatcttgaaataaagcggttcaaagctgcgatctaaccagttaaacgctgtacttctttgaagttttttggagatgacatattgaaaaaggcgttgatttggtcggattggcttcaattccctttttcgtcacaatgtaacctaggaactctccggacgggactccgaatgtgcactttgtaggattcaacttcatttggtattgattaagtatccaaaagcatttgtctcagtgctcaacgtgatcttgtttctataataacaatagatacccctatccgtgataaatgacgtcttctcttgatcttcgcgattcatcattatttgattataacccgaaaaatcgtccatcaaagttagtaactcatttccaacggttgattccacaagacgatctatatgtggaagcgggaaactgtccttcaggcaagctttgttgaggtccatgaaatcgatgcataccctgtcttttccattcttctttttgaccacgacggttcttgccacccaatctgggtattgcacctcccttatagatcctatatttaaaagcttatccacttcgtcgtaccgcttttgctcgttccacttcgagtttccttctttttttgttttaaaggtttgaaggttggatccacgtttagctcatggcagataatgcttggttctatgccaggcatgtctgttgctgaccatgcaaacgatgcttttattttctttaaaagttcaactaaagcttcttttatttcgccagttagagtggctccaattcaaactttccgatctggtttgtcttcttctaacattacttcgatcacgacatcgtcccccttctgcccactaggaaatcttgggactattcctttctttgcgggctttgttaattgctattggaccttcaaacggtggctagttagataacatgtccgcgaagcttcttggtctccccaaattgtttccactccgcttggagttgggaatttgatgcattgatgatacgtagaggggactaccttcatttgataaatccaaggggttccgaggatgatgttgtaagccgccggtttgtcaaaaacgacaaagtccacaatctttgacatttttcaagctaaaacaggtaacttgattgttccaagagacatggctgattcgctcgggaaaggtaccaaaggagacggaggtccaactacatctgccctactaattccctttctttccaaagtacctagaaagatcagatcaaccaaacgacctgtatcgacgagaatttttgacacttcaaagttagccacgtccagcataatgactagagcgtcatcgtgaggtctttgaaggtgccgcgtttcttcgtcgtcaaattatattgaagcgccttggtagttcacttcttcactcaagcttgatttaagtagaacatttcgcctatgctttttcatagcagtaacagaatcacggcaaagtttggagcctcagaggatcacattgatctttcttttcgaacttctttgttcctcttcattagtcaacctcggccttttggaattttgaacttaggagttatcccttgcttcatggtatttcttcacaaaatcatctatgttgaatttggaaagatctctacttgcacatagctccgttaaatgccttttaaggacactacaatctttggttagatgtccggttatcctatgtatgtcgcaatacaaatttttgtcccggacccaagtgtttaattttccttttccttggaatggtgtcccgacattgttgttagatggattgaaaccaaacctctttagtccttggttatccctaggctcgaacttctttggtggaaacgtgacagtctgtctagcctgcttattcttttttgcgaagctttctttttcgtcttcgacttccatccagttgtttgctcggaaaattgcatcttgaattgtgtctgatttgtgaagtattagatcatgtttaaaccttgaatcatgccacaatcctttccgtaaggcagataatgctgattgttgcgaaatccttgggagctttgaaagtacacccttgaacttggtgataaatatctgaagtgactcattcggcccttgtgaaaaattccaaagatcggtgtccgaaatgcttttatccataagaatggaatactgtttcaaaaacacggctgataattcgttaaagttactgattgaacctggctctaactggnnnnnnnnnnnnnnnnnnnnnccacaaagattctcagaaaagagtttgcaatatcctgcatcctcctcagcttcatccaagtcgactcgtccagcggcgattagaaaagctgcgagatagcctttcggatcttccaaactattatatggttctaagttgagttttcgagaatctctgattctcaaactcgcaattcgcggggtgaacagtgttcgcctagcctcctcgataacccggttgatatccggctccgagcttgtagcttggtggaatttcaacctcgtttctttcaactctcggcttacttctttcatggtttcgagctggtcgaagttttcctgctcatgttgatcaccgaactggtgatcgtcttccggttgattctccgcgtttgtaccctccggggtcgtttgatcacttgttgcatttcgcggaagggaatttggggatccgaagatagttcttcgaactctagaatttcctgcatttaaagaacgaacacgagactgaatggtactaacattttggcttagcgatacctgggttatttgcagtgtttcgacagttttttccacgtttgaaaacttctgcgccatatcagccatagtttgttgcatggtcttgagggtttcgactatcgaagcgttggtagcatactctccagacattgcggatcacttcgggtatgtaacacacagaaaaaatctgatgactcaagaatcctccgtccccacagacggcgccaaaatgtggatgtcggattcacacactcaagtgtttatttatttagtgggaaggattattcttgaggacaaatatactagaaaatagataaatgattatagagaaaactatgagtattacaaaagaatgtgtatagctaatttgcaccaagaaatgcgtgtccctttacatgatctttgacccacaatttatacccaaagaatacatttaatacctatttactcacaatcattctactttaaatgtatccgtttttagtgtttgaattaactatttaaacgtttaaatcgagtccactccgggccttctcgacctcacctctcggcccattcggttccttcaattcgagtagttctgacttcgatgctgcattcacctcgcaaaccaacatctcgcccatactctcacctcgaggatgcttacgggccccccccccgtcttatgggcttcttctacttgtgcaacaatctttggctggatccgagcccatggtgcgggatccgacaccaacaattattagctatagatatagggagttttgcggcacggccaccggttattccataaataaagtttgagtttaagaatggttcgataataacctagttttaattagatctactaaccaatagctttctgagaataccctattcctagcttttttcctaatcgtttacaacccaatcaatctgctgttttcttattttattttcttactatttcactcataccatgctagctcaatctcgatttttaactcactgtttgaacaaaagaactccgtgaatttcgatcctaaaatactgaaattgatctcttatttgagaagagtagttctaggtaaatttgaaccatatc

SEQ ID NO: 38366 - DNA, 7755 bp, Arabidopsis thaliana landsberg
gcttgtcctttcttcgatcacggagcttgtcatctctcggatcactgagcttatatgatctgtgactctgctgtctctgcgagctacctgaatcatactcatcatgtcgctttactttatctgaattttgtctattatcgattggatattcaatatctgcacggttctctcctttccattgcttatctgttgatggtatactgtatccaaagtcactttctttctggtcgttgcctatagaagaccgggattgtaatggcattcctttctcaaaacatccaatacctcctgctagcttaatttcttctgtatattcttctatcatatcatgtaagacctacaagacaaaagaaggagaaaactcactggaagaagaggatagtataagtttattgctctcaggagggccgacaaatcactcaaagagttcaatgagagaagattaacagaatcaaaaagtgaaaaggaacctccactatccaagcgatctcttgacttatctgatccagacatctgagctttatattctgatgatgtaagggcataagctatgatactagtaggttcgtcatcataaactggcagtactaagtcattacatcccagaggaagcagcagccttgcaccacttcgccattcaagctctctatatgaagaaacataaacaggccggtcttcagccatgatatgcttgcgagaattaagcgaataattcttgttgagtgaatagtagaaactaggagaaggcaactgaacttgtgttgtatgttcatcattggtagggcctcctttaaagttcagctcactttctgaacccaacagccttaaatcagggatctgagttccatttgttgaagcagctctgctaggcggacggaaaataccattctctgaagtagtttgttcacctatccatgctgcatcaagagtatcagataagtctgttgcttgaaactggctctcggtgtgtgctggtttaaccacctgcgaagactctacaaaattatctttaccaccttcactagggtcgaactccatcctacaatctgggggtctgtctgagcctacatcttcaggaatagcaaatttgccactagtatcagcaaatgatttaccttggttaagacacgtttcgtagtctgcatcctggagaagagagtcattactaattgcaacatgggtcggtatcgactttactttttcatcactgagcttctctaaggagacgttacgacccataacttttggggctgaattcttcggagcttccaaatagttatttcttaccatattggccgcccctgctaggcattcatcccaagcatatgaatcgaaaattatcagccttcgaagtttatttatcagaaggatatcaatagtaggttgtccatccttaaccacatttaacatttgctgcaatgaatcctgaaaaccagcgacagccttaatcggtattgcatacagagaaaactgaaaaatcatcctacagtgaagaaaggactctaggtacagaggctatgtaaaagactcgttcctataaaggccagcagattatgagacaagcttctacaattatttataagaaaaagttttgactctgtctatattttacacacatgattcgtgagaagtatgaacgtggtgggggtgtgtatgaatgtaggtatgtgtgaatgtgtgtgtagtgtgcaggtgggtgggttctgtctgcgtgagttagagtgagtgtgagtgatgtaatgcgccaaatgcaactctatttcttcttaattctaatggtgtgtaagttacatgacaggctaccttatattcctttttacgttgctcaagaagtcctgcaagttcttcaagagaaagcttgatcttgttgggagtgctgcccttggaacctgcgcccatagttttcgctgaaatttgactaagagcctcctgaacctcattaaaaaggacttccgcttttttaatcacctatagtatacagaccatgacaattaagtaaaataagactcatggctttgttaaatatgtataaatattcgattaaacatgtggagaacttgggaccttttctggttccttttggagcttttttccaacacaaatattgttaaggagtttcaggtaaaactgtatattatgcaaggaaccacattaggcttatgatgaagccacactgtgaagttagcagacaagcttgtacttaaagatgtgatttctgatctttctgctgtaagtcttgatgtgtggcttatgttgattataattatatacgtttgtcttgcatattctatgacttactaagtttttctttgagtttaggttgccaacagtgaacaaagggacgagataccatatgacaaatatcatgtaacgccatttcaacagttcatcagcagtgtcggctatatgcatgtgctgacaatgtacaagaacattgtcatcatcccctgaatctgaatattaatgattatcaacgagtttgtagagtccccaagaaggaaggtacaaccttctcatactcattgatcatattttaagttctggtttgttttagtaactatggttattctgatttttttcaaaataatagtaatatgccaactatatttatataaaaaaaaaaaaaaactattgaacttttgtacaattgatcgtttttttaatatgtcataaagattcatcaatatctgaacatatcttttttacaaatacactgattggctatatagagcgtatagttcattttgtggagaggtttaagttcagttcagagattattgcatttgggaaaatatttgcccttgttaataacaagttgttgtcaagaagacatgcgatttgggccgtgtagatttctcggaaaacacccaaaaacagagttcacacttcacaccagaaacaataaacgaggaacagagcccaaactcattcctattattgggcccaaaagcagagcaaagcaaaccaaaatcaagtaaatccattaacaaatatgctttataattattatttttttcaaccacaaatatatgctttataatttatgtaaatattatatgaattatttacgatttattttaattactttatcttggaattattttacgaagttaatgaaaatatttaaaaatctaatttatatatgtttggactaaaatatatagaaatatctatattccaattatataaaaaaatttctcatcgtctttgatatatagaaagtttttaaaatttcagtttcacatattttaccaattatagttttataagcttatgctaattatctgatcaatgcaaacaaaagttgacaataataaaatgaagtctttttttttccgcaaaataaaatgaagtcaaatatgatatattcctactataaatatagactaagactcgtgaataatactcgaatcagtctctgaggttttgctggaaaaaaaaaccgaagagctcaaaacagagtgcgtttgtttctgggaatcttgaagcctctcacttgcgaagacgaagcttgcttgttaggtagttatcttcttcttcttcttcgtttcaattcctttttcgttcatctgaaatgtgaaatcatgtgacgtgacgattgggttaacgatcgaatttcgtatatgattcttttctagtttctttaatcagcaagtcttgttgttttctttcaatcgagactgattctagatgttcttaaggatcttgttcgatgaaatttacatgaatctgtattctagaagatgaactttgcatgaatcatccatatcgacgaactgatcttgttgttgttatggattaagtttcttgagatacaagaaaggcttcaatgaccaatctgatctgttttgatgaacacaaatctttatctttgaacaatggattaggtcaatttcacaccatggctggaggaagtaaatcaccggcgtcatctttggaagatggaaaggcatacgtcaatgctgtgaaggtcgcattggaggaagcggaacctgcaaaatatcaagagtttctaagactctttcatgaggtgatagcgcgaaggtgtgtttggtttgctcttaaacagtctaaagaacaaagacacatgtgagaattgattctaatgttatttttatctttgtaggatgggtatggctactttcagtgcacgcatgcaggacctcttgaaagatcacccgagtctgtgtcttggtttaaatgtcatgcttgcacctgagtatcagagaaccatccctcccgaggctagcgaagagtttcataaggtggttggaagaagcgtaccacgtccggagcctaccatagatgatgcgacttcatacctcattgctgtgaaggaagcatttcatgatgaacctgcaaaatatgaggaaatgcttaagctcttgaatgattttaaagctcgcaggtatgtattagttcttttctccatgttatgtttgattttctcagtctacagaacaaatacattatgtaaattgattctgatgttactaagtctctttgtagagtcgatgccgctagtgtcattgctagggtggaggaactcatgaaagatcactcgaatctgctttttggtttctgtgtcttcctttcagctacaacgagttttaccacgaagcttaaggtatagagtgcttataggtaccatttgatgtttcctatatgttcacttgcggtttaagtaacaaaattgtccatgtgcaggcaaagtttcagggcgatggtagtcaagtagttgactctgttcttcagataatgagaatgtacggtgagggaaacaagtccaaacatgatgcgtatcaggaggtatggttcttggtaggatactttgtgttgtgtgttgcactttcttagttctttggtttgatttgctttgttatcgtttgcagatcgttgcacttgttcagggtcatgacgatttagtcatggagctttcacaaattttcactgatccatctactagagtctagagataggcaaggacggtactggaagactgtttataccttcagagacaaaaatatgagtagagcttctaatgagaagagagtgtttttagttttctttgtaaacatttgagtttagctttgatgttgaggtgtacaacggattggtgtataagagactaaaagagagtgtatagtttcttttgttgacgtttcttctatgttgaggtgtagaatggattggtgtataagagactaaaagagagtgtatagtttcgtttgttgacgtttcttgtatgttgaggtgtagaatggattggtgtataagagactaaaagagagtgtatagtttcttttgttgacgtttcttctatgttgaggtgttcaatatgctattttgagggtcatctttttataagaaactgagaggggaaacactcaaaaaacagagttcaacgtagaaacaaaaacagagaggaacagagccaaaaactacagagcaaaccaaataagaatcaagtaattctaataacaaatatattttctaatttaagtaaaccttatatgaattacgaaattgatatactccctagtataaatatagactcgtgaacaaaaactctatgcagtcttgaggtttttactttgcttctagaaatcttgaactccttactctgcgaagacgaagcttcttcttgttcatcattgctgctttgctctgcttatatcggtagccatacttggttcctctttcgatttatcatttgtttcgttcagttgatatgtcaattcaccagacgattagggttacgatcgagttttctggttctctgctttcaaatcgttcctcaatctagggttcttgaggaagtagatcgatatttattgcacttggctctgtttcttgaaaaactttaaagacatagcttggacatactagattgattcaaatgatgtgatctgacctgtcaggattataacaatgcgttgtaggtcacaccatggatggaagaagcgtgccattagaggtcactaaagatgatgaatactcacacctcggctctatagaggaagtatattatgacgaaccggaaaaaattaatcatattctccacctcatacgtgattattttaatcataggtatgtcttgatttcccccggttatgtctggttgttcttaaacaaatacagatgtgaaattgattctcatgtttcttattctcttgtgtagagacgatagagctagaatcactgcatgtatgggggaactcatgagagatcacttgaacctgcttgttcgtttctttgacttctttccagctgaggctagcgaagggttagcccaacttcaaaccattgctgcaacaagcgtatcaccgaattctactattgatgatgcggtttcatacatcaacactgtcaaggaagcatttcatgatgaacctgcaaagtattacgagtttttccagctcttttatgatatcaggtataggtatgtattgttgtgtccctcttcaattctgtttgcccttaatttcaagtctcaatctatacaacattgtgaagtgattctgtttgttatatactattctctttgtagattaattgatgttgctggtggcattacaagggtggaggaactcttgaaagctcacaagaatctgcttgtccgtttgaatgccttccttccacctgaggctcagagaatcctccatctcaagattgagcaacggtctgcatctgatattaacaagagctatcgtgtatcgagttttatcggcgagcttaaggtatagagtgctgaaatactaagtctgatccttaccatttaccattttgatgttccatctatgctaacagatccgtcgatgtacaggaaaggttccagggggatgatcgtcatgtatatgagtcgtttctcgagatattgacaatgtaccaagaaggaaacaagtccgtgaatgacttgtaccaggaggtagggttcttggttgggacactttggttggattacactttctcttagttctttggtttgatttgctttgttgtctttgcgggtcgttgcacttcttgagcatgaagatttagtcatggggtttgcagacgttttcaagagacccactgatccatcagggtcaaaatctgctagagatagctaagtacattagaagactgtctctgctttagtataggataagctctgttactagaataataggagggcttctgtttcacatttgtaatcctctctctttctctgaattgatgttgcaattgcttgtcatcagtatctgtatttctatagataactgaactcattaaagggcaaccgaagctgcttcgtggtttatgtttcttctttgtgggctattttgctttgcactttcacttgtttcttagttttggtttgatttttcatactgggccctgagcaaaacaattttagttatgacttgtgaacgtaaatgggttttaatcgaatggtaacttcatctaatttgtttgaataattcatcatggaccttaatgataatatcttgagtctactaatcatttcacaaatcctttcattttccaacagcaagtagcctgatttttgaacctcagcgatagacagcttaaagtgcggtcattctcgcaaaaagctatcagtctttatttgattcacgaacattatacacgaaagtcaaaattaaataaccaaaaaaaataaacaaaaagcaaacaagaaaacgacttctctggtatgattggaacaaatttaatagagagagaggttagataagaatgtggtagaagata

SEQ ID NO: 38367 - DNA, 5184 bp, Arabidopsis thaliana landsberg
agagcggaactggagatctgtacaaactgttttctagggttgatccaatttctgagggaatgacactgggagtttttatgtcagcgatttcgaaagagttcggaatgattggtgtaaatcctttgttgagttatgctgcaccggataaggatatgttcacaacaaaggagaagactcctccagttttggttacaagcgaggttggccttctgtactatctaagtgcacttagagaaaacagaggtcttaatttgtttgtgaagtttgaagaaatggaggaagatttacaaagttttgatacacgaggagatagtagcactaaacgaccgcgtcaaagcagtttggaggaagagtgtggttcaaaaacgcctaaaagtggtgtcacatctgttcgcgatatatcgtctgtgggttcaaaaactcctacaattgtgttgactcctcgtgatgacgaattcatggaggaattggaacaagcagaagcaaacataggaagtaacagtgggcataaatcgtcacggaatgatactgataacgaaggttttaacaatgatgttgaaaagttgtttttcgttgataacgatacagaggaagttgaagcagtcacggaaaaacctgaagatagtatgccctgtggcggttatgataaggagttttggtcaaatttcttaacagatgattatggtggctccaatgctaatgagttgatggcaacatgaggtttagatgtaaggtacgggtctaacaataaggttgtgggctccaatccggatgaagtggttttctgtactggcagcggagtctttgatcacgctatatatgtgaatggggctggcgaaagtataaagacagagcatacaaaaaagaccccacaagttatgaaaggaaagatggtcggtggagttggaagctctcagggaacgagtaatgaggtcaaaaagttggaggaagtggatgacgaggagtttgacatcccacctttgtttgaggacatcgagtatgaagttgataacttacctgatttggacattgatgatgatggtaaaggtatataccagggaaaagtgtatgcgagcaaagaagattgccaaataggattggctatatttgcgataaagaatcagtttcatttcaagcaaacaagaacaaaatggaattattttgttctcagttgctcagatgagaaatgtgattggagaatattggccactgtaatgaatggcacaggttactatgaaattaagaaagcgcagcttcaacacacatgttcggttgatactagaaggcagtacatgaagaaagcaacgtcaaaggtgattgcatctgtatttaaggcaaaatacagtgaagcttctgctggtcctgttccaatggatcttcagcaacttgtactagaagatttgagggtttctgcgtcatacaaaaagtgttggagagctagggaatcagctttaacagatgttggcgggagtgatgaagagtcttatagcaatttggctgaatatttgcatcttctgaagttaacaaatccagggacgataacacatatagaaaccgaacctgatattgaagatgaaaggaaagagaggtttttatatatgtttttagcttttggggcttcaatacaaggttttaagcatctgagaaggattttggttgtggatggaacacatttgaaaggaaaatacaagggggttttactcacagcaagtggtcaagatgcaaacttccaagtgtatccactcgcatttgctgtggtggatagtgagaacgatgatgcatgaacttggttctttacaaagttggagaggataatagctgacagcaacacactcactatattatcagataggcacgaatcgataaaggtaggggtgaagaaggtatttccgcaagcacatcatggtgcatgtattattcacctatgtaggaatatacaagcaaggttcaagaacagaggattgacgcagttagtgaaaaacgctggatatgagtttacgagtggaaagtttaaaacgctttataatcagattaatgccattaaccccctttgcataaagtatctacacgacgtagggatggctcattggacaaggctatatttccctggccagcgtttcaatctgatgactagcaatattgctgaaacgttaaacaaggcgttgttcaaggggagatcgtcacatattgtggaattgctaagatttattaggtctatgttgacacgttggttcaacgcgcgtcggaagaagtcacaagcacattcaggtccagtacctccggaggttgacaagcaaatttcaaaaaacttgacaacatcaagtggaagcaaggttggtagggtaaccagctggagctacgaggtagttgggaagctaggtggtagcaatgttgttgatctagaaaagaagcagtgcacctgcaagagatatgataaactgaagataccatgtggtcatgctttggtggctgccaatagcattaacctctcgtacaaggctttagttgatgattatttcaaaccacactcatgggttgcgagttacaaaggagcagtattccctgaagcaaatggcaaagaagaagacatacccgaagagctcccacaccgttccatgcttccaccatatactcggagaccatcagggaggcctaaggtagcaagaataccatcaacaggggaatataaggttagataaatattttgtaaatctcgtacattgtctaagcttttgaaaaactaaccaaactaatgcaacatgttggttaacatggtaaacgtagaaacctaagacaggaaggacgcagcagaacaggtgctcacgctgcaaaggattgggtcataacaggacaagttgttctaatccaatttgagaaattgtgtttttgaattttagttgttaatatatgtatgatgattaactagttgctatttttttttgtaaaatatttcagttcttattgtaaaactagttgttatgttttttgtaaaatatttcagttcttataattagttattgctgaaacatatcttgattgtatcgcaaatctctgcaataccgtttgcttatccataaagccgtatccatatggagatgctttttaacaggtaatgtagttctaatccattttgagtacttgtagttgatttttttagattgggtcataacaggacaagttgatctaatccaatgagaaattgtatatttgaatttaagttgttaataaatgtatgatctataactagttgccatgtttttgtaaaatatttcagttcttattgtaaaactagttgctctgttttttgtaaaatatttcagttcttataattagttattgctgattttatatcctgattctatcgcaatcctctgcaataccgtttgcttatccataaagccatatccatatggagatgttttttaaacaggtaaagtagttctaatccattttgagtacgtgtagttgttttttttagattgggtcataacaggacaagttgatctaatacaatgagaaattttatttttgaatttaagttgttaattaatgtatgatctataactagtttccatgtttttgtaaaatatttcatttcttattgtaagatattcccataaatgtttttccgtttctgtaaacctagttcttgatgtaccaaatataagtatatatgtttatttattgtgttaaaatagtctataattagcatatcttgctaaaccgcaaatctgtgcaatcccgtttaactatccataaactcttatccatatggagatgatgttttaacaagaaaagtagttataattcatttttagtaattgtagttgtttttttagattattttttgtaaacccattactatatgtaatgattaaaggtatttttgttgatttgattcaaagtaaagcttgattgcaccaattattaatatattttatgatacaaatctctattcaacgtaattgtatacagatagaactatccaattttctattatcttatgtgtaaaatatttcagttcttataattagttattgctgaaacatatcctgattgtatcacaaacatctgcaataccgtttgcttatccataaagccatatccatatggagatgtttttttaacagttaaagtagttctaatccattttgagtacttgtatttgttttttttagattgggtcataacaggacatgttgatctaatccaatgaaaaattgtattttttgaatttaagttgttaatatttcagttcttattgtaaaactagttgctatgtttttttgtaaaatatttcagttcttataattagttattgctgattttatatcctgattgtatcggaatcctctgcaataccgttttcttatccataaagccatatccatatggagatgtttttttaaacaggtaaagtagttctaatccatttttagtatgtgtagttgttttttttagattgggtcatgacaggacaagttgatctaatacaatgagaaattttatttgtaaaatatttcatatcttattgtaagacattcccataaatgtttttccgtttttgtaaacctagttcttgatgtaccaaatataagtatatatgtttatttattgtgttaaaatagtctataattagcatatattgctaaaccgcaaatatgtgcaatcccgtttaactatccataaaatattatccatatggagatgatgttttaacatgaaaagtagttataatccatttttagtaattgtagttgtttttttagattattttttgtaaagccattactatatgtaatgattaaaggtatttttgttgatttgaatcaaagtaaagcttgattgcgccaattattaatatattttatgatacaaatctctattcaacgtaattgtatacagatagaactatccaattttctattatcttatgtgtaaaatatttcagttcttataattagttattgctgaaacatatcctgattgtatcacaaacatctgcaataccgtttgcttatccgtaaagccgtatccatatggagatgtttttttaacagttaaagtagttctaatccattttgagtacttgtatttgttttttttagattgggtcataacaggacatgttgatctaatccaatgaaaaattgtattttttgaatttaagttgttaatatttca

SEQ ID NO: 38368 - DNA, 2961 bp, Arabidopsis thaliana landsberg
cgcggcgaccgacttcagatccagcagagtagtaagaggacactccggtatcctccacgtctatgccgagagagcggaggtgtgttaccatcgcgtccttgaggctcgctccaaagtcatcagctccggtgatgattttcaacggttgatcgacggcagaaacagctccggccatcttttcagagctttgaaaccttaagctgtgaccagaagaatcttaaattggaaattttcggaaaaaagagaaagacataagttacactactcttccacatttcaccctattaagttattttaacacaaaaggaccctccaattttaaatgaaataaggtactataaattaataaataaaagttttagggtggaaacaaaattataagggaacaacatgccgacaaaaaaaaaaaaaaaaaagggaacaacataaacatttttaatattaacatgcggcggagtcgtggcggcctttaaaataaaattgccgccgacgactattgtaagtcactcggctaagtaagaatggcgggagtggcttgccagatatctatcagctcatcttcgaccttgagggtgagtctctatggcgattagcttttccttcgctgaatcgttatgttttagttctggatttttgatcttgcagagggttaatcaatggccacggtgcttctctggttcgccggagaagaaaacaccagctgttttgaagtgggcggttagtggagttactgaatttctccggttgatgtccggtgctccgtcttcaacctccatcgctacaaataaggatcggtaatctcgaaaagctttgaattaaggtttcttattctcctctgttcgtcgttagtctggtggtggagatcgatttgaatactggctgcagatcaaagaatgaggttactgctggagatgtcgatgatgtgatggggattttgagatcagattatcgaaatttctacttcgtcactggtatatgactctcgctgttcgtctgcattgattcagttcaacatagctaaactcatgaatcttttccatttcacatacactaactgaaaccaggagtcttgacttctgcaatttactcggatgattgcatcttcgaggatccgactatcagcttccagggtaaggagttacagaatcctctttctcagtttcttattctataggtctatctgaatctaggacaatgtaatcttcatgctcgctggtttttgtttgtcaagcttgtagattgatcagatcatcagctataagatcctgaatgttgatgtgagtagaagtagtctcctttgtgtcttcaattctgcaggtacagagctgtatgaacgcaacttgaagttactggttccgttcctcgaagatgcatccattgaactgcaaaatatggagaaggtatataacctttgtgagatcctagtcccagatgatttatggtctcaatgttcttgtaatccattttgaaacgcaattgcagagtgagtcgtcccaaagaaactatatactagcgacgtggaagctaaggtattctgatgaaacttataaacttcttgagaaagtgtagcgacttttgcatcttcttaatgtttgtttcttgatcaatgtcagaacttacctgaagctgccatggagaccattgatatcgatcaatgggaatacggtttatgatctggataaagacttcaaagtaagaaaaagactgaacccttccactctttcggtcataagattattttcgtgtgttaaaaccataagactgattctggcactggtttttgtacaagattgtgaggcatgtcgagagctggaatgtctctgcgctagaagcaatcgggcagatattcaccgtcaagtcttttcccttccgtgactaagagtcttaagcactaaaatttatacatttggccatggcccaaacaatataatgtctaccaagtatagttgttaatatgaaaattcaccaaaatcaactgtaagacttcattgagatagtgtgaagtttccatgaggaaaaaagttggatcgtacgatacgaggattggaacaaaaaaggcatcctcctcacacgaaactaagaaaaacagagtcaaattgaggaagaagccctagtcacatgatggagcaaggttgagggttatcatcgctgaaatagttgaaaagagagtcggatggtggaaaccccaagttttcgtagtaatcgaaaggataaggcgcaggcggcttcctcggcgtcacctttggctcctcgtacttcaacctcgggtttgtcggtggtgctaaccatcccggcagtcctctcggtgggggcaacgaaaaggcgggcatctgcatcatcgtcgttggtccaggatacccaaaacctctaaatgtttcacctcctgctggacaagtttccacgggggtggttgccgtgacaggtggtgcaggcggggatggtttatcttgtgtcttgttggtggcataacgtttaagcaaggtgcggaatcgggtctttgctgtagctggatccttctcgtaggcgtaaagttggggactttgccccatttttgcgacggctttgataagcaccgaaggttctgctgtgccacagaccaaaatcagacccttcaccgggtctatggttatggcgtaaactccttttacttggcgcaaaagcttcttgacccgtgaagggaagtcttcacaacactggagattcattttcaatatgcaaatcggaaaatccaaatcctccattattgctttcaatacgtagaagcaactatatagtcgatctttatcacggatgctactgcaattgcctagctactaccgcttttgaaacgtaaccagaaaaccaaatgattttatattttcgaagaacactctttaattatctcaagaatgtctctatctagagtttaaatcccggtgttgattattttcaaaaccttaatattttggcaagagttttgtg

SEQ ID NO: 38369 - DNA, 21070 bp, Arabidopsis thaliana landsberg
  unsure (1)..(21070): unsure at all n locations
atcacactagagatttgtaaagagaattagagaaagggctagattttcacaagaactttgagatttatattgctaagaggggatggactatgtattgattataatcgagcttttacaatgtgaaaggagattacaaagtgtaaaagtataagtatgaatgttaagctgaatgtatgtctcttccaagtcgtccttgcttccttatataggtctacgcacgtggtagctccgtccgggatctgcggagattctcctggatattcggcaggtcagttccgagatatcaggtccgctccgcaaatatatctgtgttagtttgtaggttgttattcgcttatctccctttatcaggtgaccgggcttatcaggcccaagtacccatttgcgtacgtgggctcatcagttgtgcacgttctctacttagtgggcttggtgggctttgtgggttggcttggtatttttgcaggtggattcctgaagggaaattctgctccaacatttgccccccagcccattgagtgagtaggcgaactcgatgagcggacatataggtcaggtaagattgcgaaaatattcttgatgagaagataatgtgattagatctctcagttttgaggataaactcaacaatttcgatttaatttcagattcccttaaccgaaagatttcgaggaggatacgcgagataagtcgctgctgatgtggacggctgagatggagcgtctcttcagcgcaccacatctgacggtccagatcaggcgcggagaagagatctctgcaatctcgaaaatcgtggtgatgatggctttaaataacttcccacctatccacttgacgtcacgtcaactcacacaactctcaaggtaacttctctcattctttattatttactgcgctttgttttgtagaagtagaaaaatctcgtctttattttttttgctatctccttcgtttctctgctattccctctttctcgatctgccttctttgctcttttctttcatctctctcgtccttctctgtcgaaaaccaaagatgagcgacttcgaagattccccgaataaaagcaaccacagctacggcgacgattcaagttcgtccgagacaaagtcggcggcgtcaccgccgcgagtacaaaaacgtgtcataaccctaggcggaatgggtccaattcgttcgccgtcaaccagagccgacaagccgaagaagaaaaaggctgccaagcaaggaggaggcacgccaatgacgaacagcgacctggtcgacctccggaggagatgccaggttccggtggaggtacatatgatactctcaaggccgccgctgcatcctgagaacgtgtcggtcgggtggtgctgcgcttatgccaatttcttcgagaaagtggcctatttttcccaattacggcgtgtatcctcgagatgctctactgtctcggcctcgcctttccccatatgtgtccgaacttcgttcgccatgtgctggcgttattcacccgggctcgggaagtaaacagaaaattcagctgccatgacctgcttcagctctgtcaggacaagaccaatgctaggagtgaccaagggacgtactacatcagtgcacgtcccggatctctggtcctcggcgggttgaaagcctgtcgagacaccaattggcgatccaagtatttatttttcagagtagatcgtcattcagttggcaattttgatcccgcgaggataacaaggacctggtctaccaacctgggtcagatggagacctgagcctcttgatttttctttgttgtttgtgttgaatccttgactgcttttgctaatcgttagtactgaaactaattgcttgtttttgatgatttgcagcaaggaccaaggaagttactctcttggagacggaacttgagctgttaacccttctccgacgtggtcagactgactggtccactttcagtagaaatcgcatcgtagctgctcttgccgtagctcgagcagttcccgtagctccagcagttcccgcaatcgttcctccagcagcaccgctagatccgatcgaagaggtcccgcagattgaaccagttcccgaggctgatcttcctataggtacgagttccgttatattttctttggtttttagaaatgtacgagttatcgagacaactgcgcaactcgaattgctaactaacaaatgtcgtgctctatttgttcagttcctcctgattccagctccacttcagaactcccgctcatcagaagaatgaggcgcacaagccttcgtgttcaacgagccaacgccggggctcctgctcgggctggtgatctgtctgccgcggtgaccacggctcgaaacactctagctgtttccagcgcatctgcctcagcatctcatccctcgcttcctgaggtcaacatcgggacctcagctgcagcaggtcaaccggataacaatcagatcgctcatgtatctaggccatctgcagttgttcgtcctgatggtgcaccgtcctctccgaagagggctcggacacagccggaggtgaatccggcggctgagttggtcgtgagcgatcagagggtcgcctctcctagagaggagaggatggaacctgcggctgctactccggaggcagctgcgtctgcggctagacgatcctcgggcaggtcccatggcggaggacgaggctccagaggtgggggccggtcttcaaaccggtctcaggaagtgaggcagacgtccaactccggcggaggatccgcgggaagcaggcctttccactggtctttcactcacgaccgtgatcacccgatcgttgaggacgaggctgggttagcgaacctgctttgccacatcatagggaggaactgtcaggttcctggagtgaagaacatagccgaggcggcggcctatgctgacatgatggcgaaggagggtcaggtaattatcgataactgtctccttctaatttatatctttacgctagttgtgactttcggttttgctttcggtacgcgatagctgccacaaacaagctggttgctctctatgagcagcgtctgagccaggtcccctcggcgaacgagcatgaagaaggaaaggccctcatcctggagctgacatcgagtgtgaaggctggttaggatcgcgaagtctcgttccaggtacacctcagttttgacttgtttataaataattcgtcgatgatttgatgattctaacctgattgttatttcaggcgaagatcgagaggctgaaanatggagttgtccacttcaaaagacctcgagaaaggttttgctgagaagatcgggttcatggagatggagctcgaggggttgcaagccgaccagcagacgacgaggagccagatccatcgcttggagcagaagagggaagagctctccaaaatggtggtgaacctgacttcgattgcacaagggacgaagaaggcggttcacaatgctaaggttgagctggctgctgcgtattcgaagctgctggctgggatcaaggagaagtgggtcgccaaaaaggaatacacggtactggaggggcaagcagcnnnnnnnnnnnnnnnnnnnnnnnnnnnnnnnnnnntcaccaaggctgctattgatctgaacgtggagagacctcgactgcaagcagagatggatgacctagaggcgcggtgcaagtcgaaggaggtatcagattttactctaagcaagttggatctcccgcaggtttcagatatttcggtggtacgtccgatggacgtcgacgagccagggacgccaattggcttggatgagttcgggagcaacaaagacgcgtttctccgaggtctcgcagagggttctggtactgtctttgctacaccagccggagaatcgagggagtgatcacttttgctccttgtttgttttaggatttcgtgttttgtttcagacttaatgcctgggaaggcttttatcctttcgtttattgccttttgaacttggtgcctgggaaggcttttatcctttgttcgtttaagtactcgaatgcctgggaaggcttttactctttttaacaagtattttttgtctttcgttcgagtgttgacacttcgttgattttggtgcgagaccacctcgctttgtccatgttccggataatgattggacttgtttcgcgtccaaatcattttggacgtgatatggtatgttcctcgaaggttaaaactttgaatgagtttgagttgttttatcttgggaacctgttgaagtgaggtcacacaagggacctgccaaattttgggagctaggcttgtggtatcgccaggtcgcgaatgaaaccttcgtttcttccttgtttactatgttatgcgttgatagcgaaagagttagatttggttgtagtaggtgagctccgatgaagccgaagtgatgtgttcttataagttttagttcactgtcgactttttggaagcgagatcacaaaatggatccgccgacgttcgggtgttgggctttaggtatcgtaagattacgccagatcgtcgcttgctttacctccttttcgtttggtcatcgagcagggacctgctcgataccgaagggagattgaactatcaggtgagcagctgatcttcgttgatgggagatgcgatgtctgtttcccttgttgaagtttcgtcttacaaatagaagggttgagatggtaattgcgtttgcggaggtgactgcctgaatacctggttaggggattaagcccttttgatttggttgaattggtggctgcgctcttgggaggagctgcctatgtaccctgccaagggatcaagccttatcgtagttcgattgtatttgagtacctattcgtggtatttcttgagatgcatggcatttcaagaccgtaactcaggtactccgttaataacttttacgagcttatagacgccgtcacgtaccacctctgtgattcgatagagaccttcccaattagttcccagttttccagcgtttagctctctcgtgttgctgaacacttttcgtaaaacgagctctcccactttgaatctccgaattttgatattagagttatagtagcgggcggcagtttgttgatagttttgaactcagatctttccctgatctctgcgttcatcgatgaagtccatgttgtcctgtaacatttgcgtgttcaggtccgggttagcaggactggcggtccttctcacgctcggtactatgttttcgacagggattactgcttctaaaccataagcgagggagaacggtgtttcttgcgttgatttgcgaggtgtagttcggtaggctcagagaactccgtggagcacgtcggaccacattgatttttttgaatcaagtcttttcttgatgttgctaagtatagctttgttggcggcttctgcctgtccgttaccttgtgggtaacggggggtggatgtggtaaaatgctttgatttttcccgaggtaaggttagtcccgttatcggtgacgatctcataaggtatgccgtgtcggcatacgatgttttcccataggaagtcctcgacttgtttctcgattacctgttggaaggctttagcctcaatccatttggtagaacagtcggtgaggaccagcaggttttttagtctcttcttcccaccggaggcttccataggacgtacgacgtccatggagcacttcgtaaatgggtaaggggaagatatcgaggacatttcctcgggaggttgatgaagagtaggtgcgtgtcgttggcatttatcgcacctgagtgaatgagctacgcaatcgactagcattgttggccagaagtaaccttgctttttaattctgagggcgagggtacgtccactacagtggctaccacattgcccctcgtgcatgcttttcatgagatctttcgtttgttgcccgtaggtacacatcatatagggacctgcgacgctgcgtttcatcagtctcccttccatgatgcagtaccttgcgctctaggctttgagttttctggtctcccacttgtcgggaggtgtgatccctcgttcgatgtaatcgatgattgggattctccagtcattgtacggttcagtttcgtgcgaggcaggttgttcgggggttccgagcttcggctcttcctccattgcaactgcctccgcggccgctgcaagggctctagccgcggcggtggtgcttcgggttactcgcgtaaagttgcaagttgccgaggtttccgtcccagcgtgtttgaccgttagtcgatgcttgggtgttctattccttcgaccgggataattcttttgacgaaaggatttgacgtggaggcgagagctgccaaggcgtccgcagaggtgttttctcctctagggatcctgatcagttcgacgattcgaactgttgggtcaagtttttgactagttcgaggtacgcttccatgcgctcgtctttagcttcatattccccatggaattggatggtgacaagttggaagtcgctatgggcgtgtatatcgcggatccccattctttgagctagcttaatgccagcaatgagggcttcatactcagactcgttgtttgatgcgccgaatccgagtcggaacgattattggatgacttccccggtaggggaggtgagttgtattcctactccggatccctgtcggttggaggagccatcgacgtggaggagccatttcttattggagttggttccatccaggtccgctaacgggagctcgattacaaagtcggctaggacctgtgctttcaggctggttctggtgcgatattctatatcgtactcacttagttatatagccaattttgcaagtcaacctgattgagttggactgtgcagaatggttctgattggttgagacgtcatcactacgatgggatgtgattgaaaatatggtctcagttttcgagctgacatggctacggccagtgctagtttttccattgctggataacgagtttcagcgtctatcaacgttttactaacgtaatagatcggtttctgtccttcgtgatcttctctcaccaggacgccgcttatcgcggttcgggagactgccgtgtacaggtacaacggttctccttctttgggttttgcgagtatgggtggttcggacatgtatgctttcaattgtttgaaggcttgctcgcagtcctcgttctaatcgaactttttatcctttcggatgagctgatagaaagggatgcattcatcggtggacctggatatgaaccttttgagggcggcgatacggccgattagtcgttggacctcccgtgccatttttggcgatggcatgtcgatgaaggctgcaatctgcttaggattggcctcgatgcctctttcggttactaggtatccgaggaattctcctgagggaacttcgaaagagcatttctcggggtttagcttcatttcaaatttgtttaggatttggaagcattctcttaattgcaggacgtggtctttttcgcaagctgacttgaccagcatgtcgtcgatatagacctccatcgttttacctagctggtcggcgaacactctgttcacctatctttggtaagtagctctagcattttttaaacgaaagggcattactttataacagtaggtgcctcggtcagttataaaagctgttttttcttggtcatctgagcgcataagtatttggttgtacccggagaaagcatccatgaaggacaatagttcgtgtcccgcagtgacctcaaccagtcgctcgatatgtgggagacgaaactgtctttaggacatgccttattcaggtccgtaaagtcgatgcatactctctacttcccggttttctttttaacgacgaccgggttggcgagctaattagggtattttacttctcttatcgatccgatcttgagtaatagatcgacctcatcgtgcacagctttaggcctctcgggacctagcttgcgacgtttctgctttataggtcggtaggtcggatcgacgttgagttcgtgtgaggttacctcgaggcttattcctcggaggttcgcacttgaccaggcaaagctgtatttattttctttgagaaaggttatgagatcctcacgtatcgctgggtcaaggtcttgacctaccccaacgcatcgtttgggatctgactcgtttatgtagatctgtgttatcaatgacattcgaggtccgcgttgagaaggatcagaggatctgactgttttcatttccgcgagtttgtcttctatcattagtactacggggtcagcctttttgataaggtcgtagctgcccatatagcatttttggaagctgcgttggctgccgtacacgactgctattcccttgtccaaagggaatttaatgcattggtggtaggttgatgggacggctttcatggcgtgtagcatggtattcccagtattgcgttaactgacctaccgagaatcggcctgactgatgcgcgatcttcccctctctgaattctctccacggatccgagtagtgtatggcatatagagcattgcatggacttgcatatgattaagtaaatgagattacttatggctctatgactttcagaaacgaatggtgatcgtgggaaggacttggcttaggcgcgagagactcaaggccgggatgatgggtggtgatagttcggatagtctagggatcgattatatgacttgtaatagcttatatgcaaactcataggttgtatcgaatcctttgcttaatcaataaagtatccgattgtttgtttactctattcgtctcatatattgaatcacggaatcatatggaacggattagactaggaaagaacctcataaaccgttagggccgagtcacttactggcttgggtcgagagaactcgtccggactttaggcagtccggatcggggcctttcaagttggtatcggagcatgcttggttctaggactaggtgttgggttaaggggtatcaccactcgtcggcttgagaatctcgcggtagttactctttactcttttgcgattttactagaagttatgtggattaactttggaggtttcgcagatgggtaagagcagcaaaacgggaaagagtaagaagaacaagggcattgtcgaggagactttggttgaggaggaaacgatgatcaacgagaaaaccagagtcgggacgatgctcgatgggacagactcggccggacctgaggccgggaagaagtccataaatgaggaagcaccggagagtagtggtgcaagggacagcacggataaccggaacaatactccaacgacccaagaacagtgggatttgatgaagggaatgatggcgcaactagccacattgaccaaggccgttgtagcggattcggtggtcctaaaagtggataaccaaaaggacgatgactcggaagttgtggaagtgaatccacaattgaatcatggacggaaaaggggagactatctgagtcttctcgaacatgtctcaaggctgggcacgagacacttcatgggcagtacggacccgattgtggccgatgagtggaggagtagactcaagaggaacttcaagtctacccgctgccttgaggattaccaaagggacattgcggtccacttccttgaaggagacgcccataactggtggttaaccgtcgagaaacgtagaggggacgaggtccggtcctttgcggatttcgaagacgagtttaacaagaagtactttccaccggaggcttgggataggcttgaatgtgcgtacctcgacctagttcaagggaaccgcacggtgcgtgaatatgatcgaggagtttaaccgccttagcgttatgtgggacgcaaacttgaggaggaacaagccttggtgcgccgatttatccgcggactaaggatagagatctgcaaccattgtttggtccggacattcaactcggtttccgaatcggttgaaagggcagcaatgattgaggaagggatcgaggaagaaaggtacttgaatcggaagaaagctctgatccggaacaatcagcacaccaaacccgtggataagaaaaggaaatttgacaaggtggataacagcaagtttgatgctaagaccagcgaatgtgtgacatgtggtaagagccacagcggaacttgctggaaggccaaaggtgtatgtggccggtgtggaagcaaggaccatgcgattcaaagttgcccgagaatggatcacgggcaatcaaaggctcctagcaatgtaccaaggacttgtaatcattgtgggcacgtaggctactttaagagagactgtccaaagttggacaccgagtgcaatctaggcaaggtgggaatcgcgagaggtaatggactcgcgccccctccaaaaaggcaggccctagcaccgcgtgtgtatgaactgtcggaagaagctagcaacgctgggaacttcagggcgatcattggtaagccttgtaaacatgttacttctttcgtgcattgcattgcatcatgcataatggggatgggtactcagcattctaagggaatgtgtagggaccttgagagtaggtgacgtagaaacgcacactctatttgattatggggctacacattgttttgtgagtccggaaatggttgaaacaggtgagttcggaaaagaaccaaacaccaaatattgaatggttagagcagccagcggacgggccatgtatccattttgacttgttcggggcatctcggttgtagtgaacggtgtcaatatgcccgcggacctaatcattgttccactaaagaaacatgatgttatcttagggatggactggttgggaaagtacaaggctcacatagattgtcaccgaggacgggtacaattcgagagggacgagggtatgttaaaattccaaggaataagaacaacctcgggaagcttggtaatctcggcaatccaggctgaaaggatgctcgggaaaggttgtgaggcatatttagccacgatcacaaccaaggaagtgggggcgagtgcagagttgaaagacattctgatcgtcaacgaattctctgacgtgtttgcggccgttagtggtgtaccaccggaccggtcagacccgttcacgatagaactcgagcccgggacaacccccatatctaaagctccgtaccggatggcaccggcggaaatggcgaagctaaagaaacaattggaggagttgttggataaaggattcatcaggccgagtagctcaccatggggtgcgccggttctgtttgtgaaaaagaaagatggtagctttaggctatgcatcgactatcggggattgaataaagttacggtgaaaaacaaatatcctttaccccggatagatgagttgatggatcaacttggaggtgcacagtggttttcaaaaatcgacttggcctcaggatatcaccaaattcccatagagccaacggacgtgaggaaaacggctttccggacaaggttcggccactttgagtttgtggtcatgccattcggattgaccaatgcaccagcagccttcatgaaaatgatgaatggggtattccgggatttcttagacgagtttgttatcatcttcattgacgatatccttgtttactcgaaatattgggaagctcaccaagaacatctaagggcggtgctggaacggctaagggaacatgagctatttgcaaagttaagtaaatgctcattttggcaaaggagcgttggttttcttggtcatgttatctcggaccaaggagtatcggttgatccggagaaaatacggtcgataaaggagtggccacgaccaaggaatgccaccgagattaggagttttctcggactagcggggtattaccgaaggttcgtaaggagttttgcgagcatggcccaacccttgtctcgactgaccggaaaagacaccgcattcaactggtcggatgaatgcgagaaaagcttcctggagttaaaggccatgttgactaatgcaccagtattggtcttaccggaggaaggtgagccatatacggtttatacggacgcatcaatagtgggactaggatgcgtactgatgcaaaggggagtgttatcgcatacgcatcaaggcaattgcggaaacatgagaagaactaccctacgcatgatttggaaatgggcgcggtagtatttgcttgaaagatttgcgatcatacttgtatggtgctaaggttcaaatctatattgaccacaatagcctaaaatacatatttacccagccggagttgaatctaagccaaagaaggtggatggaacttgtggcggattacgacttgcacatagcgtaccatccgggcaaggccaaccaagtcgccgacgccctgagtaggaggcgcttggaagtggaagcggagcggaaccaagtggacttggttaacatgatggggacattgtatgtgaatgccttgtctaaggaagttgaacccttagggttgggagctgttgattaggccgatgtgcttagtaggatccggctggctcaggaacgggacgaggagataaaaggatgggcactaaacaacaagaccgagtaccaaacctcgaacaatggtacaatcatggtgaacggtcgagtatgtgtcccgaacgatagggcattaaaggaggagatcctaagagaggcgcatcaatcgaagttctcaatccatcctgggtcgaacaagatgtaccgcgaccttaaaaggtactacccttgggtaggaatgaagaaagacgtggccagatgggtggccaagtgcccgacttgtcaactggtcaaagcggaacatcaagtaccaagtgggttgttacaaaacctacctataccggaatggaagtgggaccacataacgatggacttcgtcactagactgccaacgtggatcaagtccaaacacaatgcggtatgggttgtggtagaccgattgactaagtctgcgcacttcatggcgatctcggataaggatggagcagaaatcattgccgagaaatatttagaccagatcgtgcggttacatgggattctggttagtatagtgggagaccgagacacaaggttcacgtcaaagttttggaaggcttttcaaaaggccttagggaatcgagtgaacctaagtactgcctaccacccacagacggacggacagtccgaacgaacgattcataccctctaggacatgttgagggcatgcgtcttagattggggaggaaactgggagaaatatctaaggtttgtagagtttgcatacaatatatagttttcaagctagtattggtatgtctccctatgaggcgttgtatggacgagcttgtagaacaccgttgtgttggacgcccgtgggcgaacgtcggttgtttgnnnnnnnnnnnnnnnnnnnnnnnnnnnagagaatgaagttcttaaaaatcaagttaaaggaagcccaagatcgacagaaaagctacgccaacaaacgtcgaaaggaattggaattccaagtaggagatttggtgtacttaaaggcgatgacctacaaaggggcagggcgattcacctcaaggaaaaagttaagcccaaggtatgttggcccgtacaaggtgatcgaacgagtaggggcggtggcatacaaacttgaccttcctccaaaattaagtgcgtttcacaacgtcttccatgtgtcacaattacggaagtgtttaagtgatcaagaagaaagcgtggaagatatacctcccgggttaaaggaaaatatgacggtggaagcatggccggtacggatcatggaccgaatgacgaaagggactcggggaaaatcaagggatttgttaaaagtcttgtggaattgtggaggccgtgaggaatacacttgggaaaccgagaataagatgaaggccaattttccggagtggttcaaggagatgggtaaagatcaacttgatgcggattcgaggacgaatccaattcaagggggggagacttgtaacgcccgcgatcctcaataggatcgttggctaggacttggtccgagagaggaaggtggagtctcggacaagtgagaaggagctggccataagctcggacaaaggggaaatcatgcaggctaagctaggatcgtaaagaaatcacttgggtcagctcgcccaaagctcaagctcagctggaaggagtgacggttactcaggtcgagtgacagtccagctcgggcagctggacgagtgacggacgagctcgaggcagctggacgagtgacggttgaacttgaggtagctggacgagtgacggacgagctcgaggtagctggacgagtgacggacgaactgggcggttatgggcgaagagatacaactcttcggaaaggtgcaaggaacggatgtgttgatttgggaagcatccattcgccccctatataaggaagggcgcccaggaccattccacacaccacaacacaccgaaaacacaagaaaactcaccattaaaactctctccctcttgggagaataaatagtcttaggattcggtagccgggctgtggccggcaataaagaaggagggtcggatcgacctagcctcgagaaggaaggtaagggatcctagactttgagtctaagggttctaggatgtgagttagtagtcggatccttgaaaggaccgactagagggctgagtagtatccgggtcatgtgcatcctacacaagactcggtccgggtagggatcggctgaggcggggacgcggctcggcggaggaccggcggctcttaactgacctgccgagaatcggccggactgatgcgcgatcttcccctctctgaattctctccacggatccgagtagtgtatggcatatagagcattgcatggacttgcatacatatgattaagtaaataagattacttatggctctatgactttcaggaacgaatggtgatcgtgggaaggacttggcttaggcgcgagagactcaaggccgggatgatgggtggtgatagttcggatagtctagggatcgattatatgacttgtaatagcttatatgcaaactcataggttgtatcgaatcctttgcttaattaataaagtgtccgattgtttgtttactctattcgtctcatatattgaatctcggaatcatatgaaacggattagactaggaaagaacctcataaacggttagggccgagtcacttagtggcttgggtcgagagaactcgcccggactttaggcagtccggatcggggcctttcaaataagccgaaagctttatcgaccaccatagaccggacggataaacgattagtacaccgtgggcggtcgtagtaaacgaccagatcggaaacatggatggttcgataagctgagggctgaatcgtccaccatggcaccgaaggggcgtacgtttggaggacggatggacaaatgagccaagagcttgattcggccatcgtgaaccaagggaatcgtatgatccccaatctctatcgtagtacttagaccagtggggttggttcgttgtatggctaagtaacgatagggattggttcatcaatacacgatcggatacgagtcgttgaacgaatggagtaaggcgacaaacgggctaaggaatcaaatccgcatattggccaaggtatgtaacgatctagcttactagttaggatagacgtttgggaattgaccgtgaaaataggataaaggaatatgcgattgttaggcctagaatggttagcgaacaatatgtatgtcttgaacgagtaaaggatcgatctaagtctaagggacaaagacgatgaaaccggtacaagagttggttagaattaaaccaaggttagaaagacttccgctgtgtaataagaaagcgaatatagaatttagcctcgtaaaggcaattctatggttaatcgcaaaaaattaagaggttcggccgggaagaggcgcaaacttgagtacacggtcgccggacgccgagacgtccgggactgggtctcacagcccttggttctagttcttacactcaatcatacccattacatctagctataattgtctcctaaatattaaccaagcttcttcttgcttctcaaacctttgatggtgaagccaaaggttgtatgagtttttggctttgtattttctaacaaggaaacactactttagcatttgggatcatattgcggtttaagttcttatactcaatcatacacatgaaatctagtcatttttgactccaaagcactacccaagcttcttcttgcttcactaagctttaatggtgtagccaaagtccgtattagtctttggctttgtgttttctaacaaggattcgattcttacgcctttaagatcgggttgcggtttaagttcttatactgaatcatacacatgacatccagtcatattagactccaaaacactaaccaaccttattcttgcttctcaaagcttttatggtgtagccaaagtccgtataagtctttggctttgtgtcttctaacaaggaaacactacttaggcttataagatccggttgcggtttaagttcttatactcaatcatacacatgacatcaagtcatattcgactccaaaacactaaccaagcttctcaaagctttcatggtgtagccaaagtccgtatgagtctttgcctttgtatctttgataataggttttttagtcaattatcctaaaacaccaatcatatcgttgtagtattttaggttgtcaatccaaatgggtgtgatgctaacaatcaagatgtgattagaagtcgctaagtcaagccaagcaataacaggttttgttgtgttctagcagttccaagtgaacatgcagaaaacagaaattcaagtagaaacaataaaacactcgaccaacacagctcgttgcaaagcactgggtgaggtcgagtgacaggtcgagtaacagacagaaaatgaaacagggatattcgactgcacagtctgttgccagacaactgggtggtcgagtataaggtcgagtaacaagaaagaattgcagaaattaagcaacagatgacaagatgcagtaaacaacagtagagtaaacaaagaattcaatcagataaagaattcccgaggatggggtaattgagtagtttcgtttcctcagtttacaggtgattgacatgttcaacaaattaaccctagacaacaagttcgttaaccaaatctaagtgccaccgcaacagaactctcaagctaacctagtcccagactcaatcaccattgacgagagctaacctaataggcattacgaatcaacaagttaaagccaaaacgctccctgcaaccaataccttggtacagggtcacgaatctctggaattagtggttcaggcatttcatcgaacaccttttgggcgcggaaatgtctgggctcaaattcgagttgatcagaaagcaataggcattaagaacaactaatccagaagggatctatcaatcaatattcaatcacctagcatactgagaattctacactactctaacccatcctcagaaaccttttcactactcagacatcatgacagaaagcataaacgttgaacaggttgaagacatgataacagcagtatgataacagaatgaataacagtaaacgaaaatcaagaacagaaactgaatattgaatactgaatagataaagagaaatccggattacaaaaagtctagaacataaggtctgcggaaataaaaactaggtaaaaaccaacctttttttgcgaaaatgagaagtacatgctacttatagccaaatatcccgaaaccctaatactcaaaacgacgaagtatttggacgggttaagaactgtactcgacccacgtggtcgagtgagagctcgagtgtatagctggagtcttcttttcttccttgtgctcgagtgtctgattgagtgcggaatgaagaaggctctgaagcttgtcatcgagtatgcagtcgagtggtgtgatggagatactcgacctctgggtggagtgaggaggtcgagtggttgtctgatgatggaggtgaagcactcgacctagaggtcgagatgtcgaattccggtgacacattaggtgagggaaggcttcgctttcttcctctagcagcagatcacgcctcatatcactcttggagatcactcgaccgcggtgctggccgcagcagaaggagagaggtcgagtttcctcagagcggtgctggccgccacagagctgattgtgtcttaacatttgatgatacctgttggcaaaaagatcagattaacccactaggagataatcgactgatcttaatgcattcaccatttgcttgagttatggatacttggtgtacactatcccagttcaatgagtaggctaactgcgatataatcatcccagttcaaaactggtgaagaaggcagaggtggttgaaagttggcatatatggttgaaagttggcatatacgataaaatattagaaaactttgtgacttattctcttgatcccactgattgaaactgtaggagccttcaccatcatgccactttggaatgaccaacacatctgattcattatctaattcaattggatgagctaaatatgggcagtggctggcttggtgattcatgataagtgtgtattttgcatgtcttgagcatccatttgtcatcactttagcatcatatcatcactgttttataccatttcacatcatttgtcatcactttgcatgtttaggatagttttgcatgcatgttgcatatttgcgttgatttcaggtgatttggagctgttgacgagctatctggaagaagcagacctgatcatgacaaaccactcgaccaagaggtcgagtaggagcttcaagatctcaagagaccactcgacaaccaggtcgagtagagcacatcaccacttcacctcaccactcgaccccgaggtcgagtgccatcatctccatcaccagacggtcactcgatcacttcactcgaccacgaggtcgagtgtcttcacctccatcatcagacaaccactcgacctcctcactctacctagaggtcgagtatctccatcacaccactcgactgcatactcgatgacaagcttcagagccttcttcattctgcactcaaccagacactcgagcacaaggaagaaaagaagactccagctattcactcgacctctcactcgaccacatgggtcgagtacagttcttaatccgttccaatacttcgtcgttttgagtattagggtttcgggatatttggctataagtagcatgtacttctcattttcgaaaaagaagtttttaacctagttttatttccgcagccttgtgttctagactttttgtaatccggatttctctttatcaattcagtattcagcttctgttcttgattttcgtttactgttgttcattctgttatcatactactgttacactgctgttatcatgtcttcaatctgttcaacgtttatgctttctgttatgatgtctgagtagtgaataggtttctgaggatgggttagagtagtgtagaattctcagtatgctaggtgattgagtattgattgatagatcccttctggattagttgttcttaatgcctattgctttctgatcaactggaatttgagcccagacatttccgcgcccaaaaggtgttcgatgaaatgtctgaaccactaattccagagattcgtgacctgtaccaaggtattggttgcagggagcgttttggctttaacttgttgattcgtaatgcctgttaggttagctctcgtcaatggtgattgagtctgggactaggttagcttgatagtctctgttgcggtggcacttagatttggttaatgaacttgttgtctagggttaatttattgagcatgtcaatcacctgtaaactgaggaaacgaaactactcaattaccccatcctcgggaattctttatctgattaaattatttgtttgctctactgttgtttactgcatcttgttatctgtcgcttaatttttgcaattttttctggttactcgacctcatactcgaccacccagttgtctggcaacagactgtgcagtcgagtatctgtgttttattttctgtctgttactcgacctgtcactcgacctcacccagtgctctgcaaagagctgtgttggtcgagtgttttactgtttctgtttcattttctgttttctgcatgttcatttaggattgctagaacacaccaaaacctgttattgtttggcttaacttagtgacttctgatcacatcttgattgttagcatcacacccatttggattgacaacctaaaatactacaacgacatgattggtgttttaggataattgacttaaaagcctactatcaatttggcgccgttgccaattgggtgtttgtttgttacatttaagatttcagacttgcttagaacattccggtgatggtcccatcgcagccaccatcaccgtcaccgctatgattcggatcgaatatcaaaacacatgatgtatatataaccatatcatactacttacacagttacactactacatactatacattgaatatacatggtactttagtcttagtataaatccatttttgtaacctttttattttttggaagtggatatgccattgtggagacaatgacaaatggaaactaccaccgagagcagcggcgtgtcgatgatgccattatttttatttttgtggtcctgagaagaacaaatcattttacaagcattgtacatacatatgactttttacaaaacagtgtcaagtttatttgttcatgcttttttttggttacatgcaattaagaaccgattggtccgaaccgaaccaactcaacatgatacttttatggtttcactgtgccagctttatccatgttatgtttcaaagggttatgaaaaaatcgttgtcgatgggtatttgcgagaccacgcccaaaaaaaatccaggtccaataacagatgagccacatatcccgtaaaaagctgacttaatcgacccaaaccaaagtaaacaaaccttacatctggggatggccatatatattcaaactgaattaatttttgctacacacacaatgttttggcat

SEQ ID NO: 38370 - DNA, 1270 bp, Arabidopsis thaliana landsberg
ctcggcctcgatggactcctacgacaacgcaacttgagattcttgagaacatttacaaggaaggcagtggaacaccaaatccgcggaggattaaagagatcacgatggaactgtctgaacatggacaaatcatggagaaaaatgtataccattggtttcaaaaccgacgagctcggtccaaacgaaagcaacctgcgacaacgacaattacctcgagtcaggcggatgatgcggccgtgacaacaactgatgagagagggaggtgtggagatgattcagggggattagagtcttatgagcatatactcttcccaagtcctgacttaggtaaaaagatcatttgagtttttaaacatttggttaggtttattttttatttttggtttgagtttgcattttttttgtggtttcagggattgagcatttgttgagtataggaaaatttatggagacttaaaattcgtatagacttcgatgaagaagatctctaatctattctgttttcttttactctgttttcataaaatagaattgtgtgtttgtgtgtgacattaacaacaagtctttaattttattataattttgtgttcctcaacttgatatatatgcccacatctttttcagcatcagaaagaaaagtgatgccatcttaaactcggttgatattttgaccggtaaatctcaattcaaatgacactaaagagtagaagcaattgaccataataaccgatcctagtcatgaccatagcttttttcattgtttttaaatttattgttgtcacacaaaaaatcatataaaatcggatattggttacatgaccacacaattagaatatatatcaattatttatccaattgaatcccaaaattacctcaattaactggtaattgaaaaagaaaaaaaatcagacaattgatcctagtttgacatctttccaaaacttgtttaaagttaacggtaacaaataactaaagatttctcaaaaagaaaaatacataacaccttcacttcctcattgtcttcttcatatggtaaaaaggagagaggagaaggcaaagtggtgaaagaggagatggagcaagagagcctaaacggtaggtatggtagtagagtaatgacggatgaacaaatggagactcttcgtaagcaaatcgccatttacgccgttctttgtgaccagctcgtcttccttcacaactctctctcttttgtcccttttctctcatcaggtacgtacactactccataattgtatttggaagaaactta

SEQ ID NO: 38371 - DNA, 2865 bp, Arabidopsis thaliana landsberg
atgtgtatgattctacactactctaacccatcctcagaaaccttttcactactcagacatcataacagaagagcataaacgttgaacaggacgaagacatgataacaacagtgtaacagtagtgtgataacagaatgaacaacagtaaacgaaaatcaagaaccaaagctaaatactgaatagataaagagaaatctggattacaaaaagtctagaacacaaggtctgcggaaataaaactaggtaaaaacttcttttctgcgaaaatgagaagtacatgctacttatagccaaatatcccgaaactctaatactcaaaacgacgaagtatttggacgggttaagaactgtactcgacccaggtggtcgagtgagaggtcgagtgaatagctggagtcttcttttcttccttgtgctcgagtgtctggttgagtgcggaatgaagaaggctctgaagcttgtcatcgagtatgcagtcgagtggtgtgatggaggtactcgacctctaggcagagtgatgtggtcgagtagtggtctggcagtgaaggtgaagacactcgacctcatggtcgagtgaagtgatcgagtgatggagacgagggcactcgacctcgtggtcgagtggtgaagtgaagtggtgatgtcctctgctcgacctgggggtcgagtggtctcttgaggtcttgaagctcctactcgacctctgggtcgagtggtttgtcacgatcaggtccgcttcttccagatagctcgtcaacagctccaaatcacatgaaatcaacgcaaatatgcaacatgcatgcaaaactatcctaaacatgcaaagtgatgacaaatgatgtgaaatggtataaaacagtgatgatatgatgctaaagtgatgacaaatggatgctcaaaacatgcaaaatacacacttagcaactcccccaaacttagtctttgcttgccctcaagcaaacaatcaagaacaagctggaggtgaagcttgaaagcggggactcagagcctaagcaccagatataccagaggaaatcaatgtccaagttggtagccctaagctgggatatgaccgaatcctactcaaaaacgttagtgatgccttattatcaatcaatcctactcatatgctcgacctacacatgttttcaaatctaccaattccttgaacattcattagttcaggaacgtgaatcaagcactgcatcatgaatgaactcattcggcttaggtgaaagggcaagagacaaagatggtcccttacagaataggctggaggaacacgggatctctcaaaaatgattaagatttagtagaatgctaaagataagtcccaagctatgcatacagagataagatcacatctacccagagtatatcaaatgaagctctaatggtaatcccatctccaatcctagtataagaacttaactctaccctttgcattcatgaatcttttaagccctttttctaatcattcttttcttttctcttaactcttaggagaagctttctcaacactttgatacatctagcggatttggatttcttcaacgactaaggttcctgtttttaacattttaaaaccgagggcttttgcccatcttcatagctaacaagaactctttctttctttacaaatcccaaaacctttactagactttttctccttctttagcttactttctctagagtcttttacgttttctcatcaatgaatcaacccttttttttttcttttagacacatctcaacccaaagtataagcgcccacctagtcatatctagtccaaaaaatgcgaactagaactacatgagacactatctctgtcgttacgaacctaacactttctacaaggcttaatcgaaataagacctcacaaacaatcacaagtgatatagggcttgaaagaaagtctaggtttgggtttgggttaactgctctaataaggagagtcagctacttttattaacaagagtgatcaaaatgaataagaaaatccaagtattttagggtatccatgagttcaaatttgatgcagacatgataattaaagatcagattcaggttcaaatggatagggaatgttatcagatcatgacaatttggtcgtgtagagctgtctaggcatggttcagttttatttcaaattcattgattatgcaatagacaaccagcaacgagggcactgagtttatccggtgaaccaaaatgcttacaaggctatctcatcattatcccctatgcatatgcaacaatcttatatgaacatttctagactcgatcctaaatgcaatgcaactatatgagcactctgtttttgtggaatcattttctgaacttttttaaaatttttgtttttttctatatcttagatgaatgcagactcaagagtatatacaatgcaacacacacttcctgagccttcccccaaacttaaatcaaacaatcctttgtgttactaaacttggaagagagtactcaggacaaaacacatcacaaaaacaaaataaaaacaggagatggtatagtacaatggtgaagtcaggtgcttagctctgtcgaagtatgaacagagttggtcatcaatggctgcctgtgattgctcccaagcaatgaaagtgtcgccctgttctgtcttagccccaactccctgaggatacttgacctcatcgcctcttctgtggccagcaccgccacaaggatactcgacctctcttcttctgttgcggccagcacggcggtcgagtgatatcctcgagttgataaggcgtgatctgctgctagaacgaacgagcatagccttcttcttcttcatgtgctcccgagactcgaatgatgaatgtctagctgggaaatgtgag

SEQ ID NO: 38372 - DNA, 5438 bp, Arabidopsis thaliana landsberg
ttctaaggaatagattggataacacttgtttggtgttctacaagagtttatattgaagttagttttttagttgattgctatatttacaagaatcgatatgaagaaaccatttctctatgaatataatttatttttcttcttgatcattttttttggtttatcaatatgttcgtagtgatataattgtcattaacttttttttcttttaactgagaaaatatatctcaaaagatttctcatttatattttatctagacatttaatatccaaaattctttggttggaaaaaaaattatacagttaaattgtgcaatttaattccaaacaaaatacaaaaaaattgttatttttgtactcacaatctcataacaaaaataaattcaaatttactcaaatcatctcaatttataattatttctaaataatttttattaatatttcgtttttattaccaattgttttaagaaatttaaataaaaattagaagaataacaattttcattttcaatccactaaaagaattaaaaaacgattacacgtggcaaacaatctcaccactggttcggcgaggcgaaaacgtcgatcgtcacaaccttactcctcctcctcttcctctttctctaatcggcaaaattttctgctcctgagaaacaagtagagatactaaagatggaatctttgaactaaattcgaaaccttttaatgggtaccgagtcgggttcggatccagaatcgagctcaaacgggtggagccgtgctcgtggtctagttgtcaagactctggttttaattggcggtgctcttctcatcaagcgtctcactaaatccaccactcgtagagatcacgcccgtgtcgtctctcgttctctcaccggagagaaggtttttaaacccacaatctcaatgcttacacttttggtttcctctactcagaactatgaaattctgatttttttttatgaattgagaagtttgtttacattgggttttgaagtttacgagggagcaagcgtcaagagatcctgataattacttcaacataaggttttgtgatgttcttttatctcaaacttatgatgctctttagtggaatttagaccatgatgctccattttgaagttgtttcaagattgaaactgttatatctctatctctagtttgtttctagcattctgagtttgaaatggttgtgcagaatgctgagttgtccagctgctgaaatggtggatggttcagaggttttgtatctcgaacaggtgacccatattttacttctttgttgtgttatggtgattgatgtataaatgtgttctttcttcatgtttaagacaagatattctcttttttcttcaggcattttggaggactcctcagaaaccgtttcgacaagtatgtaatcattccctcatggttgatttagttaggaaactgtattattgtgttgctgaagtcttatgcatcttgggctgattttggtcgcagagattatatatggtgaaaccgtgtccaaaagagctaaaatgtgatgttgaggtgagtttgagttgttgagatcttcttatgtattctaatgcacgagagtttgacgcagtgttatttcaggtaagttcatatgcgatcagagatgctgaggaatacaaaaatttctgtgaccggcctaaggaccaacgcccacttcctgaagaagttattggtgtaagtcttaaggttttgtatcgatagagagatgtctggttactggaaatcaagctaacaatgatcaaactaataggacattggagagcatttgacgactatacacctgaattgttgtgaccgtgggaaacgttgcttgtacgaaggctcaacttcacctggtggatttccaaattcatgggtaatgttcttataagaaaaatcacagtttatttgttttacactcttctgcttccacacgaaaacacttgacgtttctttcttggattgcagaacggggctagctattgtacttcagatcttgcagttctgaaaaacaatgagatacacctctgggatcgcggctttgatgagaatcgaaaccaggtacatcccaacttccttacacttattggattgtttaaagatgttactaccaacaaattctcaaaaaagctcatctgaaatgggttttggtattgggacatggcaggtttggggaccaaaggaaggtccgtacgagttcaagccagcgacatcatcgagcatcaacgaaaacttgtctgctttgaacatcctttatcaatcttctatcgataaaccaatccaagggtccctcatcttgcaagactagccaatttgcacccccttttctattgtctgatcttctctgtatcacacttagcctctttattcatctcatctcagccactttcaatatagttttggtacatagaaagctcaatactttacttcattacagtagtggtcaacaagtcgaagatgaatgtttatacagaacaaaaaaatgattccaaaagcagagtgtagtctctcttgatactgcattcatgaggtgctattgacatagaagtaaagagctgcgagagctaaaaccccaactgcaattcctataggtagagccttcctgcatgattaccataagataactataagaaacaaagtgacaaatatgtgagattgatgagaaaggaggatcattttacccgacggcttcgtctctttggagctcagcttttctagcctttctcacatctttgtcgttgacattcttgctcacatcaggcatgtaagctctaaaccgccgtttaggagcagcacacactgaaaacaaaaccttaaacccatttgaaaccaaacacagtcccaactagtgatagctacaacttgttgattctttaaacatgaatcacgatacctggacagaaatagttatcaggtaacttgtcaaatggagttctatcattgtaaatatacctgcaaaatcaaagagaagaagataaataaacaaactttgtatgttagaggtaaccaagaagagagaaagagagatcaagattgaaagagacccgcaatcacggcaaatataggcttgcttagaggagacacgcatggagaatctaggagcagaggatttggaaagagacttcttgtttccgagtagcctcatcgagtaataaggcaagaaagatgatctctggagggttggagtcgtcggaggtaagaccacggaggatcttccggcgtaaagtgtcgtcggaggaagctgcatcgccattgagtgaaagttcaaaagtgtggtgggatcagaggagaagagagaagaggaaagtgataagaaggaagagtgggaaaaagatgtgaaagagtgtgctcctcacaagccctctcactcgccacgtcagatttccaggtttattttctttctagtattttctgaattgtctgaaaaatcatagactacctaacattgatgcgatgatgttagacgctttatgatcatatcaacaaagataattagtcttattatataatcaaacgaatttagagatttttaagatcgttgctttaagtggtaatgaacgttatggggtcatattaccatgaccaccagaagttcattgtgatttcagtttcatgcttctcaagttcacatggatgcttctctcattgagaatgttatagaggtcacaagcacatgatagaatgggaaatacgagtattagaagtcttatattctgatttaatgttacctaagtttatggtttactatctggtttaatgtcttttatatgaagaacacctttatgctttgagctgacctaatgaaagaaactcaatgttgaaagaatctagtagatacggaattggaagcaagctgaatcaattctagaaagctttgccgctgctcttcctcgtcgcgatgaacagaccaagttaggctaacgcaatcctttatctgttttcagccagcctaagcgccctactttacctacttgaaatgtcttacagaaaaactaatttagtagcaacaattttactgaaatatttcaaaaaaaaaaaaaatgtaaatcacgtccttttattttggttaaaaggctatacacctatacgtaagtatttatttttcttcacaatttttttttactgtatatataaacaaaaaaaaaagtagtgtgggcaagcgtgaaagtagaaaaccctaatctctatttgaaaaaatgtcgacgatgtctgatcttttcccggatttggtagaagagatactctctagggttccgatgacatctttgatttcagtacggtgtacttgcaaaatgtggaacgctttatccaaagaaggtattttctttaaagcagcaaggaatcagtttatgggattcacgataatggattctagggtttgttcaatgaagtttgatctccaaggaatccgaaacaacgaacaagactttgttgatccatgtataaagcaaattgctaaacttaatcaagtcgagatatctagagtgtatcactgcgacggcttgttgttatgcgtggctaaggacaactcgagggtcgtggtttggaacccttatttggggcaaacaagatggatcagacccagaacagaatccaacataggagacagctatgctcttggatacgacatcaaccgtaaccacaaaatcttgaggatggtgcagacaagaaacgtttccgtttacaggtacgaaatctacgacttgcgctctaattcatggagggttctcgaggtcactcccaacggggaaatggaccctaatcatcccctctacggcgtttctgtgaagggaaatacctacttttttgcgcatgaggatagcagcagtggtgaaattgatgaagatggcgacataatcgatcttgaagatttcttactctgttttgattttacaacagagacatttggtctgcgtctgcctcttccgtttcactctactatcgatgcgactgtgaccctctcttgtgttagagaccagcagctcgcggtgctatatcataatgagggtcttcacagtgatgatcggtttaccacagttgagttttgggttactactagtattgagcccaactctgtgtcctggagcaagtttttgacagtggatatgagaccattggcactcactggtgttcggtttgacaatgatatgggtgccaccttcttcattgacgaggatgagaaagtcgctgtggttttcgatctagacggatacctaagcaccgagagcgctcgttaccacaccgcttttatcagtggaaaggatggattctttaaacctgtgactctaggagtagctcccaatgtcggggaaccttgtcccagaaccgggcatattccgactacatatcgtcccccgcttgtctgctcgtctacttaccttccgagtttagtgcaagtcaaccaacagcgcaaaaggaaagaaagacatgttagtttg

SEQ ID NO: 38373 - DNA, 2096 bp, Arabidopsis thaliana landsberg
  unsure (1)..(2096): unsure at all n locations
atgctccggttttgaatccccaccttcaaacctctccttcaacttaacattttttgtttgcttgagggcaagcaaaagataagtttgggggagttgataacactgtattttactcattttaggtgtatgtttatcatcatttagctttgcatttgctcattgtatcatatcattttgcaccattttagcttattttgcatacttaggcatctaggatcatcttgcgtatgcattgcatgttttggtatgttttcaggtgcagaaggagttaaaaaggactctactcgatccattcactcgacccaggcagctatagaggaggatgcagtttactcgacctctntactcgatccaggatgccacagaggaggctgcagtttactcgaccctcctactcgatcaaggcaaccttagatgaagcagcagattgatctactcacctctcctactcgatccactactcgatccatntactcgaccagggtaactatctctaccagacttgttgagctatcaaagcgtcttcggatcctcctcattccccactcaaccagacatctgagcatacggataggagaggatgaagcatctactcgaccaattgatcactcggagcatagacacaaaggcgcagactttgcagcaccctctttactcaatccccaagatcgagtattcgcccaaaccgcctcaagtatcttgtcttttagtgaatctagggtttccaacattttagtataaatagatcactttgggatttgtccaaaggatctatgctttatctttcagtttttctttgtgtttatgaatcttaaaactttaattactcttaatctatttcgtttttgcatttgattttttaagtaaagttgtttagcttgtttagatctacattttggtatgatttcaataatttctgggtttgtgttcttgagaatgttgcatgagtagtgattagggttcttgtggatgaattagattagggtaatctctaggttagttagggggttaagattaggccagatcccttctggattcgcttggcccctatgcggtttttgctggctaatgtggaatttcgaccatagacgtccagcgtacaaaaaacattcaaatggatgcctgatctacgaattctagagattatagactatagaccaagagattggctagtctgttattggctttggtagattgttgcttaaaccctgctctactatgtttcatcaacgagagttgagattaggaagtggtagagttatgggggtctctgtcatgagagtggattgacccggtttctgaatctatcgtctagggtacctgcctttcgcctgttagccacctgatgaatcctagagttgctcttatcaatgaatccatccttaggacttctattattcttagaaatatttgtattcaccccctgattgcacttttatttacctgttatttgtgtcacttgttgattgcattttagttcttgaaatttgttggctgttggttctactcgacccaatgatcgagtagggctcttaagttctcatttttacctgtttgaatcctgacctaggattgttactagaaacccacaatcattataatgtggcttgacctagttgttatcttgattgctagtagtaacagtggactggattgacaccccctatagctgcatcgacatgttagtgtttaaggggaattgaactgaacctcacttcagcatataagtaggcctcctacttatcatctacactgagaagttcaccatggaagtgaaaccagtgcatgtgctaccgactgacagccctaccttggatgcggctttggagaacctcattgcatccctcacaacgatgcagctgcgtcttgcaggtaagcctctttctctcaccttacactctgttatctgttgagaatggtcttttatgtgagtgtgcactaaagtagggggagtacttgatgttacgtactctgttccggatgatatgggaggtgagaatgtggaggaagaggacgatgatgatgagttagatgacaatgcttagatgcttagtccttgtcggtctttaaaagtgtatcttgatagggggagtttc

SEQ ID NO: 38374 - DNA, 5861 bp, Arabidopsis thaliana landsberg
gagaatccagaccaaacacaaaacaaacaaagaaattctaaaaagctatggtatatacaatggtggcggtggtgtgttacctcagtgatcaggtgaagtaggaggataagaaattgtccatactatcctttgtgtagctccagggagtaggttgtgtggaactcatattagctggatgcttcgcattaagtcactctatcacacggttgagattctttgactcgatttatatcactcgatcgttgactttcccggactataaaacctgaaatacttaaacaaaaacatcaaaaataacaagggaaaaaggtatatacaaggataaacatgggacttcctcccaagtgagctagtttaaagactttagcttgactttcatattgtttttaggcaaagggtgatgagaggagaggaaatgagctctcctcttgaatgatctgctcaaccatacaaggcttgactctctgcccattcactttgagttcagtttcagctttgctaaccagggtggtggttccatcagggggtttgtctttgatgctgaatggtacttggttggatttcccacgaaggtccttaatttgatccttgagttcttttcactgtttgtgttagctcccttatggctttctcctaccatttatatcttctctaaagctttaaccaattatcagatgctagagtgttttgcttaacatgcaggtcgagtttagacgttgagcttgagcatttggagtgagtagaggtttgaacatgacctactggtcgagtttgatggtcgagcttgagttgaacatgcctcttttgacctaatcacacctataatgacatatgcccatgttactatcttgtgggaggctaatgacttcttagagatcaaggtctcactagggagatatttagcttcaactctcttagttaaagaagtttggagtagatctttaacagcaagctcttctagcttttcttggacactctccttgtgtataataggattgcactcttggctatgaacttccattccttgtacttctttgattctctccataatcagatcttgtaggtacttgtgggagggtggaatgagcttaaatgcatccattagtggcattcttaattcgatctccttcagctgcctatcaaaaaatgctttgtacttttcaattcattccttcttgaatcttccagtgaaaggcatcgttggtttgtaacgcggaggagcaaattctttattctttgctgcaacagcaacttttctttcttcaaaagttggttttgctcgatcgagtaaagggtcgagtgaagctgaaggctgatcaagtatagttggttcattggtttggacttcgttttgatgcggatcctccccttcttgaagttcacttcctcagtgatctgctcggtgttctgactattgagaagttttctgccactgcgaagtgtaactgcatgtgcatattctttggagttctgaatggcgtgtccaggaagttggcatggaggcgttggtgctgaagtagaagcaaattgtccttccatgtatcacatcttagagttcaaagtctcaaacttgatattcagatcattataagaggaatccaccatagtgtgtatctcagcaagtttcgtttccgaaaccatagatccaaaagactgaccttgtagtatctgatgcagtatacttttcatgtctgcatcgtgtgcattgtgagttggttgttgttgagcaaaacatagtggtgcatactgctgctgttggtagcttccttgaaactgttgcatgggaacaaacccttgacattgattgtatggaacaaaaggcttgtaatgggtttgatgttgtctatagtggttgaaaccattgatataggctccctggttctagatgtatcctgtctcttataacagattattccccaaattctgaaccttaaactgctcatccttacaagcaaagtgagtttgcttcttctgtagtagaatgaacttgtctaatttctcattcagagcctgctgataataggtttttaagatcaattaatcctaaagcactatcatgtcgttgtagtactgaaggttgtcaatccaaatgtgtgtgatgctaacaatcaagatgtgatcataagtcactaagtcaagccaagcaataacacgttttggtgtgttctagcagtcctaagtgaacatgcagaaaacagaaaatcaagcagaacgagtaaaacacgcgaccaacacagctcgtagcagagcactgggtgaggtcgagtaacaaacagtaaatgaaacaaagatactcgaatgcatagtctgttgtcagacaactgggtggtcgactatcaggtcgagtgacaagaaagaattacaaaaattaagcaacagatgacaagacacaataaacaacagtagagtaaacaataaaatcaatcagataaagaattcccgaggatggggtaattgagtagtttcgtttcctcagtttacaggtgatcgacatgctcaataaattatccctagacaacaagttcattaaccaaatctaagtgccaccgcaacagagaccctcaagttaacctaatcccagactcaatcaccattgacgagagctaacctaacaggcattacaaatcaacaagttaaagccaaaagctccttgcaaccaataccttggtacagggccacgaatctatgtaattagtggttcagacatttcatcgaacatcttttgggcgcggaaatgtctgggctcaaatttcagttgatcagaaagcaataggcattaagaacaactaatccagaagggatctatcaatccaactcaaccacctagcatactgagaatcctaaactactttaacccatcctcagaacctattcactactcagacctcattgtagaaagcataacgttgaatggaatgaaaacatgataacaacagagtaatagcaagatgataacaggatgaacaacagtaaacaaaatcatgaacaaatactgaatactgaatagataaaagagaaatccggattacaaaaggtcaagaacacaatgtcttcagaataaaacttagataaaaaacttgttctcgaaaatgtaaagtacatgctacttatagcaaaatattccgaaaccctaatactcaaagcgacggagtattgggacggattaaaaactgtactcgacccacgtggtcgagtgagaggtcgagtgaatagctggagtcttcttttcttccttgtactcgagtgtctggttgagtgcgggatgaagaagactctgaagcttgccatcgagtatgtagtcgagtggtggtgacggtgatactcgacttccaagtagagtgatgtgatggagtgatggtcaggtggtgggggtgaagacactcgaccaggggttcgagtgacgtgatcgagtatctctcgcggtgatactcggccagggggtcgagtgatgaggtgaaattgtgaagtcccctactcgaccagggggtcgaatggtctgttgagttcgtgaagcgtctactcgacctgggggtcgagtggtttgacatgatcaggtacgcttctcccaattagctcgccaaaagctccaaatcacctgaaaacaacacaaatatgcaacatgcatgcaaaactatcctaaacacaaatgatcagaaatggtataaaaagtgatgatatgatgctaaagtgatgacaaatggatgctcaaaacatgcaaaatacacacttatcaagtcccctaaacttagtctttgcttgcctcaagcaaacaattaagaacaagctggaggtgaagtttgaaagcgggaaatccaagccaaagcaccagataaaccagatgaaatcaatgttcaggttgatagttctaagctgcgatatgctcgaattctactcaaaaacgttagccatgccttgttatcattcaatccgactcatatgctcgacctacacatgttttcaaatctaccaatccctttaacattcattagttctggaacgtgaatcaagcaatgcatcattaatgaactcatttggctaaggtaaaaggtcaagagacaaatatggtcccttacagaataggctccagtaataggggatctctaaaaaaaaatgattaagctttagtagaatgctaaaggtaagtcctaagctatgcatacagagataagatcctatctacccaaagtatatcaaatgaagctctaatggtaatcccatatccaatcccaatataagaacttaactctaccctttgcatttatgaatcttttaagcccgttttctaatcattcttttcttttctcttaactctaggagaatctttctcaacactttgatacatctagcggatttggatttctttaacaactaaggttcctgttctttacattttaaaaccgagggattttgcccatcttcaatagctaacaagaactctttcttttcttcacaaatcccaaaacctttactagactttttatgcttccttagcttacttcacctagagtcttttaccttttctcatcaatgaatcaacccttttttttttcttttagacacatcccaacccaaagtataaccgcccacctagtcctatctagtttgaaaaatgcgaactagaactacatgagacactatctctatcgttacgaaccttacactttctaccaagcttaatcggaataagacctcacaaacactcacaagtgatatagggcttgaaagaaagtctaggtttgggttcgggttaactgctctaataaggagagtcagctacttggattaacaagagtgatcaaaatgtaaagaaaatccaagtattttaagattaagagaatgggatactactggcctactatgatcacggactgcgttaagtatgctcaacaatgcaggcgtttgccaactccatgcaccactcatccaccaacctctggagttattctcttcgatctccgccccataccctttcatgagatggtcaatggatattattggaccattgcataggtcgacccgaggtgtacaatatctattggttctaactgattatttttcgaagtggattaaagccgaagcgtatgtgaatattaaagattcggcagtaaagactttcatttggaagaacatcatatgcaagcacggcgttccatacgaaatagttactgacaatgggccacaatttatttcacacgagtttgaagcattttgctcggactgggggattaaagtcagttattccactccgcggtatccacaagggaacggtcaggccgaagctgcaaacaagacaattctaagcaaccttaagaaacgtttgaatcatttgaaagggggctggtatgatgaacttcagccagtcttatgggcatatcgcacaactcctaggcgttcgaccggagaaaccccgttttcattggtttacgggatgaaggcagttgtaccagccgagctcaatgtgccaggacttcgtcgaacggaagctcctttgaatgaaaaagagaattctgcaatgcttgacgattcgttggataccatcaacgagaggcgagatcaagccttaatccaaattcaaaattatcaacacgcagcagctcggtattacaattcgaaagtcaaaagcagaccattctttgtgggcgattatgttttgaaacgtgttttcgataacaagaaggaggaaggagctggcaaacttggcattaattgggaaggtccttatattgttaccgaggtggtccgaaatggtgtttacagattgaaagatttagagcacaccccagtccacgtccttggaatgtggtaaacaaaaagaaattttatgtttgaaaaaaaagaaaaaaaaacaagggacgcatttt

SEQ ID NO: 38375 - DNA, 3961 bp, Arabidopsis thaliana landsberg
ttggataacacacacttgttgtcgtttctttataaataagacggacacgaatctgttaccgatgcatttttaagattcttttaattatatcagacagagagatatgacttttgtagttcgtcttcttgtgtgtctcttattgacgcttacaattacatcttctctagcccgcaaccctgtttccgtttcaggttcgaatctcatcttcttgtttccttccttcgattcgttcatgtttttctctatgtctgaatgatttcgtttggattaggtgggtttgagaattctggattccaaaggagtttgttgatggtgaacgttgaggactacggtgacccatctgcaaatcctaagcacgaccccggcgttcctccgtcagcaaccggccaacgtgtcgtcggcagaggctgacgtaatgttttagttaacgcagaaggaaagaactcttcttgtttacattttcagtttgtctgagattaaatctcagttcatatagctttctctaatctgtctatatagatattttctcgtaatctccatacaacttcatttatttttttcttatggcaatgactttgtaccttattttccaatttgtgtctatgcaaaatgattgaatcaaaagagttcactctaggtaaaccaaggtatgctacatcaacagattaactgaaacatagaagacacttttggcacatgagattgtaccaccatctcgtattaaaaatacttgtgagaacttcacggaaaggttccagcgtttctatcttctgatactactacttcagtagctgctgcctgtgagtatgctcggtcgtgttagagttttactgatgagatctctcagctcgatctctcctgggaatctaccttctttcaatttagagaacacctgaaatagaaacacaggatttagtacaaactgatcttacatatctggaaataatcttaaaccattaattactaaccggttcgccgttgcagtgaacttcaatttctcctgagctttgaaggtaagactgcagaaagtttccgataagccaagtggaagccatggatccaaatctgttggccctcaaggagtggaaccaagcacgaggattcttaattgcaattatgggaaggataccatcacctgcaactatcataccaataacttcaatttgaacaaccggcacaaccttagcaagaatacgttttggtgcagggtaattagcaagaactacatctaatccaggaaaagcactctctaacatcttcttcattgatacagcagttcccctacaatacaaagactaatgaatcaaatctaaatgatgataaagcttaaagccattgacttagaaagaaatcggaaaagtacttgtacgagcaggagatgcagaagttgatctctacggtgtttccatatccaacaccagttgacttctgctaaaaagacaaacgattagaacacaagtggtgtgcgagatgttatgtaggaatgaattcgaattcacctgtgcggggaaatctagggtttctgagatagacggtggtgattggtgctgagatttcggcggtggaggcgtgaagagattgaagagatcggaacaaagcaggaaaatcggtagtcctaacaagatcaattgtgttttgtccatggcggattttgaaatctcagagagggaatttgaagttgaaattttgaaggagatcgatcggagaagagaacttttatcacttatgccacttttttaaaaaaactgatctgaactgccatcagttaatctgaatgtcaccgaaaatgtgatataccagttgtatccttaatgagttgattaaaaaaatgaaaaagaaattcaaaagctaaataaagaaaatcgagattctccgttctctcttcttcgtcgtcgtgttcttcttcttgcgtcgacgttcatcttcttcgtcggccaccatcgattccggccgccgccgacttgaaatccgtcgtaaaaggcaacgaattaggtcagtttcttctcatatttcctttgacattggtgcattgtgattttagattgggattttgaattatatataattcccagattcaatttgatagtttgatgattggtttgcaaagtaaagagtaatcgattagaggttgccgaaacgttatttgaggtgatgagcaaaggaatgtaggttgaatgtgagttgaatttgaattccgagatttcatattaaagatttggggggtttgtgtgtgcaaagtttagattaaccaattagtttaacgaataggtatgtattaacattggaaatcaattgaaaggtaacgaattaggttcagtagaatcgagtgcgacgagtgattgatttcaacgtatgataagagtacatgtggtataactattaaaatgtttgattggagttgaactggttgtattttcaggagcgatgaagaagaagatccacactaaggtacattttgactttggaggatactattctgaagtgaatgagtggattggtaaaaattcactatatgctatatcgtttaagacgaatagtttggagaagataacatattcgatgttagttgacaagatcatgaagaaggttgcgattgatgaaacttctgtgaagttgaaactgagttacaatctgtctaaagttaggagagagacatatattgtagatgatgaggatgtcttcatatttttaacagaatctgatggagagagtcggattcctgttttgcatgtggaggaattaaatggtataggagttgagaggagagagaaaatttctgtaccggagcgtcgaagttcagttggtgtaaatgtaagagaggatgatgttttaaatgaagtatgtgagatggtgcatgatggatatgataatgatgtgaatgattgtgagaatgtagtaggtacggagatcgtggctgtcgaaaggccgatgaattctgttgaggaagaagatgaggatgataggattgattatgatgatattcacgatattccacgaagtgtagaagttactccgcaggttatagaatgggatgatggtatgggtattgaaattggtcaagaactttgttcaagggaggctgtgtgggaattggttaacagagctgcaaagaaagaagtttttggagtctatactattaagtcagacccgttgagacttatgctacgatgccgccaagcttctaaagggtgtacttggtatctaagagttgcgagaactaagaaatctcatttttggagtgttagagtgcatagaaagatgcatacatgctctcggagtgttgagactacaagcaacagtatacagcgaggcacaccaagattaatagcatcggttttgcattgtgactatcccggaaatttagagaccccaactccaaaaaacattatgtcgattgtaagaggaagacttggggtgcattgttcatactccactgccttaagaggcaaaatgctacatgttagtgatgtgcgagggactccggaaagaagctacacgatgttattttcttatctttacatgttagagaaggtaaatccagggacagtaacttatgtggagttggaaggagagaaaaagttcaagtacctcttcattgcattaggcgcttgcattgaaggttttaggggaatgcggtaagtgatagttgtggatgcaactcatcttaaaactgtgtatggtgggatgttggttattgcaacagcacaagatcctaatcattatcattatccacttgcgtttggaatcattgatagcgagaatgatgtaagttggatttggttcttagaaaagctgaaaactgtatattcggatgttcccggattggtctttattagtgataggcatcaaagcataaagaaggttgtcaagacggtgtacccgaatgcgcttcatgcagcttgtatatggcatttgtgtcaaaacatgagagatcgtgtgaaaattgacaaggatgaagctg

SEQ ID NO: 38376 - DNA, 16142 bp, Arabidopsis thaliana landsberg
  unsure (1)..(16142): unsure at all n locations
atagaatgcttttaagcgggttctgttgctgaaaacacaccaaaacatgcaatgtgtatgcaagatgatcctaaatgcctaagagtgcaaaataagctaaaatggtgcaaaatgatatgatacaatgaccaaatgcaaagctaaatgatgataaatatacacctaaaatgagtaaaatataaggttatctgcgaaggcggatcatattgcataggttcatgtcgagtggatccgcttctcctaaaaggcatgtccggtgggtttgccgtagtagaagaagaatagctgaactagagttggagagcgtaaaaattcttgttgagtgctgcgagagccttgtcttgaagttgactccagctgtagagaaaaccaaggcgcttgtaaatttctttatagtctttactttgcctcggtgcggagtactcctcaaagtaaaactgttgtgttgtgtaagactcgtccataggttctgcctcattatctgaatgatggattgaggactcatcattattcactccttccatcggtacagcttcatcacctgaagtatagaggttctccattggtgggcagaactcaatgttgccaccatctctaatcgaagtggaagcggggtttgggaggagaaaaatagattgtcctgctgtggggtgatcgaacctatacttatataggctattcttctactgtgaccaaaaactcttggaattgataaggtgttgcatatcaatccatctcggaggaatagactttgaatgcagaggtacattgcatgctctcagaattggggttccaactcctcccacaaccattcttcctggtttcttaagtcccttagcccatcctctgtaactcagcaggtgctcgattaggaaaatgagaccgaagtgtctgtctgatctccagctagaactgtaccatctgatgctaaaccaagcagctcttgaagcgctgtctccatcagctctagttctccattgacgaaggttccattcctttctcttgcaaatagcacactagccaaggacctatgaaagtatctaaccaccggactccttatctcgttgctcttggtactagaggatgaaaatccatgcttagacccaagtgtggcccagaatgactgaagctctctcttgtcaaaacgatgacttgtgacttttccgcttggaaattcatacatcagctcgggatgctctattggaagccgatactctacgtcatacacacagaactccaagtatcccaaaattccgtctggcctgattttatcgtcctctgactctccatataagaacaattccatggatgaaagaaactggatggtctcttcctcatacgcctccattggccgaaacatgtgaatattcaggttgcattgcttaaacatgtagtctacatcatcatagatgccgaatctctccatggttacaggatcagggtatcgagttcctaaaaactcgttgcgcttcagtagcttgtagtactcgttttgagttgcggacttctctgattccaaatcatcaccacctccattctcagtttgatcagcttccaggtgaagccatttcttcctctgagtcttcatctaccagttccaaccttctcttcactggcttctttcctcgagtgatatcttccttgttcctcgagaactcctttgcagaggccttactcgaccttcgggatagagtgtttccgacaggagagttaaaagtttgttcttcttgcatcgcttcctcctcttggcttgattcgctgtgatcgatctcgaaacttgctcgttctctcctgctcaaccctaggggtgatggttcagaaagtccttgagctcctgcatacgaagaaggtgttgggtacctcttcgatggagagagagctctgttcccgatccttgacaggagcgtgcatctgttcgtcattgagaatgagagactcaaaggttagcagattgagtgatcaagaaaatagatggatttagttgactttttgataaaaataggaagtgcaagagaaagagatagagagaggtataagaattcgagattgctctggtgtgggaggtggagagatgagactgttgagtttaggaattgcaatggggtgaaccaaaatgattatgaggggataagaagacaaggaggcatcatgggattcaatagaggcgggtcacgaggcgtcggagtccacaaggtggtctctttgttttcttcactcgatcggacggtgcggagtgcttcgctattaatcactcgatcaaacggaccagaataaacgtaaagaagtcactcgatcaaacggtggtgatgcttctcttatctggtcattcaatcgcacgacttaaagcactcctcctcattttactagatcaacggttgagatgattcttgacttgttttgaatttactcgaccgttaacttcctcagggtaattaaaacaaacctgaaacacttaaacaaaaacatcaaaaataacaagcaaaatataaacttatatacatggatagacatgggacttcctcccaagtgagctagtgtaaagtctttagcttgactttcatactgtttttaggcaaaggatgatgagaggagaggaaatgagcactactcttgaatgatctgctcagccatacaaggattgactctctgcccattcactttgagttcagcttcagctttgctaactaaggtggtggttccatcagggggtttgtctttgatgttgaatggtacttggttggatttcccacggaggtccttaatttgatccttgagttctttcacagtttgtgttagctcccttatggctttctcctgccatttagatcttctctgaagctttaaccaattatcagatgctacagtggtttgcttaacatgcaggtcgagtttagacgttgagcttgagcatttggagtgagtggaggttgaacacgacctactagtcgagtttgatggtcgagcttgagtagaacatgcctcttttgttgtcataacctctgtttttgacctaatcacacctttaacgacatctacccctgctataatcttgtgggagactaatgacttcatagagatcaaggtctcattagggagatatttagcttcaactctcttagtcaaagaagtttggagttgatcttcaacagcaagctcttctagcttttcttggcactctccttgtgtataataggattgcactcttggctatgaacttccattccttgtacttctttgattctctccataatcagatcttgtaggtacttgtgggagggtggaatgagcatgaaagcatccattaatggcatttttagttcaatctcctttagctgcctatcaaaaagggctttgtatttttctgttaattccttcttaaatgttccagggaaaggcattgtcagtttgtagggtgacagagcaaattctttattctttgctacaacattagcttttctttcttcaaaacttggctttgctcgatcgagtagaaggccaagtgaatctgaaggctgatcaagtttagttggttcattggtctggaatttgttttgatgtggatcctctccttctttaacttcactatcatcagtgatctgctcggtcttctgactgttgagaagtttcctcccaatacgacgtgtaactacattggcatattctttggagttttgaatggcgtttccaggaagttggcatggaggcattggtgctgaagtagaagcaacttgtccttccatgtatctcatcttagagttcaaagccttaaacttgatattcagatcattataaaaggaatccaccatagtgtttatctcaacaatttttgtctccaaaaccatagatccaaaagattgaccttgtagtatttgatgaagcatagttttcatgtctgcatcgtgtgcattgtgagttggttgttgttgagcaaaacatggtggtgcatactgctgctgttggtagcttccttgacactgctgcatagaaacaaacccttgacattgattgtatggaacaaaaggcttgtaatgggtttgctgttgtccatagttgttgaaaccattgatataggctccctggttctggatgtatcttgtctcttctaactgattattccccaaatactgaacctgaaactgctcatccttacaagcaaagtgagcttgcctcttttttagttgaatgaatttgtctaatttctcattcgaggcctgcatttctcccatgtgcttctcatgccaaagggtctagattgttggtgtattgaaagaggtttttgactaactcgacctcacctctggcttcttggccgatatcaaaatgtacctcaaacaatcagacaaagagaagaacacatagttagtaaccaaagtaaaatttaaaagaacttgatcttaaaagtctgatatcttgaacgtaacaatgcaacaatgatttgcaacggcgccaaattgataattaggtttttatgcctacttatatatgctgaagtatggtgtgttcagttcaattccccttaaacactaacatgttgatacaactatagggggtgtcaatccagtccacagttattgctagcaattaagatgtgtacataagcaactaagtcaagccagattatagagatggttggtttctagtaacaatcctaggttaggattcaaacaacaaagataagaacttaagagccctactcgatcattgggtcgagtagaaccaacagccaacacatttcaagaactaaaatgcaatcaacaggtaacacaaataacaggtaaataaaagtgcaatcacgggtgaatacaaataaatctaagaagaatagaagtcctgaggatggattcattgataagaacaactctagggttcatcaggtggctaaaaggtgaaaggaagataccctagacgataaattcagaaaccgggtcaatccactctcgtgacagagacccccataactctacaacttccaaatctccactgtcgttgttgaaacatattttagaattgtttaagcaacaatctaccaaagccgataagcggacaagcttatgtctttatcaagtctacaaatctctggaattcgtagatcagacatccatttgaacgtcttttggatgttggacgtctatgatcgaatctccacattagccagggaaaaccgcataggggtcaagcaaatccagaagggatctaacctaatcttaaccacttgactaacctagagattaccctaatctaatctatcctcaagaaccctaatcactactcaagcaacattctcaagaacacaaacccagaaattactgaaatcatatcaaaatgtagatctaaacaagctaaacaactttagtaaaagaactaaatgcaaaaacgaaatagattaagagtaattaagttttgaagattcataaacacaaagaaacactaaaagataaaagatagattctttggacaaaccccaaagtgatcaatttatagtaaaatgttgaaaccctagattcactagaagacaagagacttgaggcggtttgggaggatgctcgatcttggggatcgagtaaagagggtgctgcaaagtctgcgcctttgtgtctatgctccgagtaatcaattggtcgagtagatgttccttcctctcctatatatatgcttagatgtctggttgagtggggaatgaggaggatccaaagacgctttgatagatcaacaagtcttgtagagttggtcacccttggtcgagtaaataagtcgagtagaggatcaagtaggaggggcgagtagataaatctggtgcttcatctgaagctgccttgatcgagtaagagggtcgagtacactgcagcctcctctatatctgccaggatcgagtaaagaggtcgagtgaattgatgtctcttatgtagttgcctggatcgagtgaatggatcgagtagagacctttttagctccttctgcacctgaaaacacaccaaaatatgcaatgcatatgcaagatgatcctaaatgcctaagtatgcaaaataagctaaaatggtgcaaaatgatatgttacaatgagcaaatgcaaagctaaatgatgataaacatacacctaaaatgagtaaaatacagtgttatcaactcccccaaacttatctcttgcttgccctcaagcaaacaaaaaatcttaagttgaaggagaggtttgaaggtggagattcaaaaaccgaaacatgcatataaaacgggtaagctcactgtccaggtagctaattctaggttgcaagatgatagacccttacccaaaaacattagtcatactcgtcacaatgcaacctaacaacttgccttaaccaattccctttaacattcattaagcacgaacaatggatcaagcaatgcaatggttatgaactcaattggtttcaggcttaggctaagagacaaaaatggttcctctaatgattggtcgagtaacaggagacacttagagaaaagattgagctttagtagaatgctaaaggtaaaatccaatggaaacatacaagaacggactcccatctacccaatgatatcgtatgatagctcagaagatgatcccagtcctataggtgtcctaactctaccctttttctcattctttctctttttggttcaagttgtaaggggttcttctttaaaacgattcaagagtctagcgggtttggttttaaactttgacacacttaaggcttttcttctaatctcagcatatagggcgtttacccttttctttgaattacaatgcctaacttctttgaattccaaaccctttactacactaacactttttgtatcccccttaagaactctaaacttttactctctttttttttctttttttttcattcccattctcttttccaatcattccatacatcatcccaatcccaaatacaagtcaccacctagtcctagctaactcaaaagcgtgggctaggtctacatgaaagactggtcttgtcggctcatacctaacacgttataccaagctcaatcgaaaaagacctcagaatcacacacaaatgatctttggcttgaaataaggctagggtaagggtatgggaaacagctctcaaagtgagagacagctacttggattaacagagggtggtgaagtgaataagataatccaagtatgtatatggtagccatgagttcacaaaaaatacatagacataataattgcaaattcagttcaggttctaatagataaggaatggcatcagataagcgagtttcgaatcaaagtagtatagtcaagttacaaatttaaagcagggtgcggtcttacttccgagatacaatcagttatgcaacagagaactaacaacctgggcattgaacttacttcattgaatcaaaacatgcttatcggtttgaaatcatcattatcccctatgcaaatgagcaatcctaaatgcaagcactctatatacaatcctaaaatgatatgcaatctacatgacactctgtttttgatgaaatcattttctgaaaatatttcaaatttttatggttttttctatgccttagatgatgcaaaatttgaaataagaaaagagaacacaatttcaaacatgtcttgaaccctcccccaaacgtaaattacacagtcccttgtataataagaatctgaaggagaattcaaaaccacaaagaaacaacacacaaataaaaataaaaagctatggtatatacaatggtggtgatggtgttaccttagcggtcacgggaagtaggcagagacaaggtcatccatgctctcctttgtgtagctccagggagtgggttgtgctggaattggattagttggatgctctaccctttgctcgggctgttgatcaagtggctcctcgagtggtgcggtagagtggcttgccccagcatccaatttctctgtccttatgcgcttctttatcttactcctcctctccttctccctaggttcaaagtctgattgcctcggtggtgaaggtgcaacatggtgttctctcggctcatatgaagtctgtcttggtggcgaaggcggatcatattgcataggttcatgtcgagtggatccgcttctcctaaaaggcatgtcctgtggcatcgccgtagtagaagaagaacagctgaacttgagttggagagtgttaaacttcttgttgagtgctgcgaaagccttgtcttgaagtttacaccagctttggagaaaaccaaggcgcttatgaatttctttcagagtctttactttgccttggcgcggagtacttctcaaagtaaaactgttgtgttgcataagactcgtccataggttgtgcctcattatctgaatgtcgaattggtgtttcatcatcattcactccttccattggcacaacttcatcacctgaaccatagaggttctctattggtgggcaaaactcgatgttgctgccatctctaatcgaagtggaagcgggatttgggaggagaaaaatagattatcctgcttcaaggtgatcgaacttttatttatataagccattcttcttctgcgaccaaaagttcttggaattgataaggtgctgcatatcaattcatcttggaggaatcagctttgaatacataggtacattgcatgctctcaaaattggggtcacaactcctcccacaaccattcttcctggtttcttaagtcccttagcccatcctctgtagctcagcagatgttcgattaggtagaatgaaaccgaagcgtctgtctaatctccagctagaacggtaccatctgatgctaaaccaagcagctcctacagcgctggctccatcaactctagctctccattgacaaaggtcccattcttgtctcttgcaaatagtgcactggctaaagacctatgaaagtatttaaccaccagactccttatttcctttcttttggttctagaggaggaaaatccatgtttaaacccaagcgtggcccagaatgactggagctctttcttttcaaaacgatgactcgtgtccttttcgcttggaaatccatacatcagctctagatgctcgattggaagccgatattctaggtcatacacacagaactccaagtatcccaaacttccgtctggcctgactccgtcgtcctcttactctccatatatgaacaattcgacagctgaaagaaactggatggtctcttcttcatatccctccattggtcgaaacatgtgaatattcaggttgcactgcttaaacatgtagtttacatcatcatagatgccgagtctctccatggtctcaggatgagggtatcgagttcctaaaaactcgttgcgttttagcagcttgtagtacttgttttgagttgcacacttctctaattccaaatcatcacctcctttatctgtttgatcatctttctctggtgaaaccatttcttcctcggagttttcatctaccagttccaacctcctccccacgggcttctttcctcgagtgatatctgccttgttcctcgagaattcctttgcagagggctgaaagtctcttcttcttgcatcacttcctcctcttggcttgacacgctatgatcgatcttgaaacttgcttgttctctcctgctcgaccctatgtatgagggttcagagagtcctcgagctgctacatgcggagaaggtgttagatatctcttcggtggggagagagctctgttctggatccttgacaagagcgagcgcttgttcgtcatcaagaacaaaagtgggagaaactcaaaaccaaaattcagtaggttaggagatcgaatgatggaggaaacaaatgaattttgttgaggttttgataagaaagggaagtgaaggagataaagagagaattgtaaggattcgagaattctttggtatgggaggtggagagatgaggtatgttgagttcgggaattgcaatgggggggggaccaaagtgattatgggggggggggacaagaagacaaagggacaacagcgtttcaatggaggcgggtcacgaggcgtcggtgtctacgaaggtggtctctttggtttcttcacttgatcagacggtggagaatgcttcattcttaagcactcgatcaaacggaccagaataaacctcaagaagtcactcgatcaaacggtagtgatgcttctctcatttggtcattcaaatcaccggcttaaagctctcttccgcactttactcgatcaacggttgagatgattgttgacttgttttgaatttactcgactgttgacttccttagggtcaataaaacaaaccagaaacacttaaacaaaaacatcaaaaataacaaaaaagatagaaagttatatacatggatagacatgggacttccacccacgtgagcttgttttaagttactaagcttgactcttactgagcttagtcagaaaaaaggttgaagagcgaaacagaaaagtcctcatcttcagtggttgaatttttaatgcctgaatcatactctgcatcctctcatgacgtatggtatgatgagtactcatttgatttttcttcaaaataagcttccttctgatcagcagagtagtcttcttcttctaaactaggcttctttgaccaatcctcaatttcaaagttcgggtagcctttaaccatttcttgaagttccaagattgcatggttcagtccttccatcttgtaagttaactttccaatggtatcctcttgagctttatattctatcctgagttccagaagttcttcagtaacagaatcaagaatcaagtgttcttcttcagcagaggggttggtgggctgtttaggcactcctggagaataagtcggaataggggtttcctcctcactcaacaacttactctctaagatactttcctctaaatgaactcctttctgatcttctcatgcaaaccattttgttgtgaaatcttcgtcctctttgatagctagtgcagtttccatcttctgtgggtcaataccatttgaatacttattaactcttttttcaaacatccatagttgatctttcagcttcatcacccttgaagataatccctttatgactctactttgccatttaattttttttttcatctcataccagtcatcttctgtacgatcttcagtctgagctaacccatttaaggttttcttcttgtggtcaaaagttctcttcagcttgctgagttgagaagtatagttaactcttggtggggttccagcttctacttcttcatcaacatccatgttctgaatcccaaaattctgaactcctgttgttgatttccctgaagcttctttgatatcaaacttcatcttgatgcctttttcaaggttcagattaatttttccattcctgacatctatgactgctccagctgatgctaagaatggtctgcctaggatcaggggatcctttccttcttcatatatgtccaatagtattggaccaataccacaaaatctgtaggtatctcaacatttccaatcttgacaagcagattttctattagaccatgtggatgtgcaacataaccatcaggtaaaagtaaagctattagaacttgtattccatgatccctagccttttagctgtagagagaggcataaggctaacagatgctcccaaatcacaaaaggcacctatcgaatgtccatggtcctagagagcatggtagagtgaatgaaccgggatcatcaagcttttcttggatgactttcttcttgtatgtttcttgagtgatgactctactaatcatctcttgattatgatccttcttgaatttttcacttttgaacttttttctagaatagtgagtattcagcaaaggtgtgtgctctatagtccagatgaattgttgagtggcaggtgcatcaatttgagttgaattccccccccccccttcttgaatcatattgtcctcagtattgggagtctgatgacttggtggagactcatcttcttggtggatggtgatagcattagcagtagcatagtccttaggattctggactgctttccctggaagttgctgagggtgcttcggggcagaggttgaggcaaattgactctccacatacttgatttttgaaatttagagcttcaaacttgatattcagatcattgtaagaacaatcgatctagttgtgtaattcagctatcttcttgtcaaaagccatagcgccaatagcttatccttgaatgatttgttgaatgagttgcttaatttcaggatcttgagctgttggggcttgttgtggttgttgagtgaaccctggtggtggattctgctgttggtatccttcattaaactgttgtttagggacataaccttggttgtactgaacaaaaggcttggactgattctgttgaggtggatacacttgatcttgggggttagctacattagtgcttctgtaggagaggtttgggttgggcttgtagttgttgtagcccttgttgaaccttccttggttcttaatatagcagggctcttctgtttggtcattccccccttcttgcatttggaattgctcttcatcagtgatgtagtgtatctgcttctgatccgccagcaatagtttgtctagcatttcattcagggccttgatatctttgctctatttatccttagtgcctccagttcctctcactgagcgatcatagtcttcattgtaggacccatcagattgtgctagattttcgaccaactcccatccttctgctacttccttgttcaagaagtttccatttaaggcagtgtcgagtagcattctgatctttggtaaagctcctctgtagagtgtgctcaataatgaagccttcttgaaacggtgatgaggacactgagtagtgtagcttttaaacctctcccaagcttcatagaaagtttcattgtttttctgtgtgaagccttagatctcgttcctcaatctagctgtgcgagcattagagaagaacttagcaagaaaagctttcttataatcgtcccatgaggtgatagagtctggggtagagtcttctcccactggtgtgccttgtctcccaaagagaagggaaatagccagagcttaaacatatcttcagtgacaccattgattttggtaaggccgcacagcctatcaaagctgtcaagatggtgcagggggtcgtccataggtaagccatgaaacatgtttcctcgctcccttaggtgcagaccgctcttgatcacaaagttgttgttctgaaccggtgctggcaccatcccttgtctttggtgatgattccttggggcatcaccagcaccaatgtttcttggttgatcaaaattaggtgggtcttgaatatcaactggtatgttctgttgattcatagcagctggtctgttctgatcacaggctgcttttgctttggtttcttgtaactcacgagctgttttgtcaattctatctctgaatggtaataggtgcacagaacctttagatcgagtttgcatgcacaaagattagtacatgtaccacaaaaacgagcagacgaaaatatgagttagtaacttgataaatgtaaaagaacttgatcttaaaagtttctgatatcttgaatgtaacaatgcaacaatgaattggcaacgacgccaaattgataagcaggtttttcaggtctacttatgtgctgaagagtgtgatttcagttcaggtcccctaaaacacaaacctgtcgatgcagttatagggggtgtcaatccagtccactgtattgctagcaatcaagatgtgtacagaaacaactaagtcaagccagattaaaatgatggtgggtttctactaataatcctaggtcaggattcaaacaagtaaaaatgagaactttagagccctactcgatcattgggtcgagtagaaccaacaggtgacaaaattaagaactaaaatgcaatcaaaaggggatgcaaatagaggatacaaataacaggtaaataaaagtgcaatcaagaggggatacaaataaatctaatagaagttctaaggatggattcattgataagggtaactctagggttcatcaaatggctaataggcgaaaggtagataaccatgacgatagattcaaaaaccgggtcaatccactctcgtgacagagacccccataactctaccacttcctaatctaaactctcgttgatgaaacatagcagagcagggtttaagaaacaatctatcaaagccaataggcagacaagccaatatcttggttgagtctacatatctctagaattcgtaggttaggcatccatttaaacgtcttttggacgctggttgtctatgatcgaatctccacattagctagcaaaaaccgcataggagccaagcaaatccagaaggttctaacctaatcttaaccacttaactaacctagagattaccctaatctaatctagcctcaagaaccctaatcattactcaagcaacattctcaagaacacaaacccagaaattactgaaatcataccaaaatgcagatctaaacaagctaaacaaatttacttaaacaactaaatgcaaaaacgaaatagattaagagtaattaagttttgaagattcataaacacaaagaaaaactaaaggataaaagcttgatcctttggacaaaccccaaagtgatatatttatagtaaaatgttgaaatcctagattcactagagaacaagagacttgaggcggtttgggcgaatgctcgatcttggggatcgagtaatgagggtgctgcaaagtctgctcctttgtgtctatgctccgagtgatcaattgatcgagtagatgcttcttcctctcctatccgtatgctcagatgtctggttgagtggggaatgaggaggatccaaagacgctttgatagatcaacaagtcttgtagagttagtcacccttggtcgagtaaatgggtcgagtagaggatcgagtagaagggtcgagtagatcaatctgcttcttcttctaaggctgtcttgatcgagtaagagggtcgagtgaattgctgcctcctctgaggcagcttggatcgagtgaatggatcgagtagaatgctctgctgcttccctcctagttggatagagcagagggtcgagtagaatcgctataagctccttctgcaccagaaaacacaccatagacaatgttgtgatcacccatttttagtaatgaggtgtggcttttactggctttttatttagtatagatacacattgctgggtttaacttccatggctacttaatctgttgcatgacgttgtataaaatatccaataacatatcgtagataatatgggcaatttggtataagaaacatgcatccgtagcccttgtttctgtttgacattttgttgacgcaattgccatatttcttataacagtctcttgtttttcttgcatccagtcgaggggatacagcggaatactctgatctgaataagctttctaaacgtttccttagtggaaagtcttctggcttagaaagagaaggaaaagatgtaccgtcagaggcttttgttcaggaggtggtagaggaactgcgcaaaggagagcaaggagagtgtccaatatgccttgaagcacttgaggatgctgtattaacgccatgtgctcatagattatgtcgtgagtgtctcttggcaagttggagaaattctacttctgggttatgtcctgtgtgtaggtatcttgaagttgttcctgcgattactagttttcttctgttgttgattccaatgagtgtctgagtaaggtctaatttggcaaataatgaatgatgaatcgtttttttcaggaacactgtaagcaaacaagaactcatcacagcaccaaccgaaagtagattccaggttgacgtggaaaagaattgggtggaatcatcgaannnnnnnnnnnnnnnnnnnnnnnnnnaaggtcttcgttcttcaggctctaagagcattctctttagccagtggaccgctttcctcgatctcctccaaattcccctctctcggtataccattgttggcttgctatggtagttatgagaataaattgtttttaattatagcacaattttatctccaggaataacttttcatttgtccgtcttgatggcacgctaagtcagcagcaacgagagaaggtcct

SEQ ID NO: 38377 - DNA, 3866 bp, Arabidopsis thaliana landsberg
  unsure (1)..(3866): unsure at all n locations
tggcaatgattattccaggtttcgatctcagcaacaaaatcatcgtcgttctcctagtgaaggaaacggttcagccactcagggtaatcttcaaaccccaatcaattccaacaatcaagcagatggtgcttctccttcgcctgtcaatcaatctcctcgcggttctgccaattagtctcctcgcggttctgccaatcacactactcctctagctgctcggctcaatgacnnnnnnnnnnnnnnnnnnnnnnnnngccctggtcgtgcaaggttgcctagattagaccctaatcgacctcctggtactctctggtaagccactaggctctgttctcttaccaagtattacattatctgtttcagttttgtctgtctgatggagtctttatttgtaggtttgacgatgacacctctgttgcagccactgtccggagcatttttgaaaaagatttcaaagagcctcatgcaaattggtcacagacatcagttgcagtggtcgatagatggtttgaaacctttgctgtaagtgaaatgatagtttcagttttgtttggtacagcttttggtcttgtctatttctaatgtgtcttttccctgttttgtagcaagtatataactgggaccctgcaataaacaagagagttaggattgagtttgaagctaagttgaaggataggatgtctgatcaagtttctcggtggaagggaaagtggagagaaaagggagatgcggcgatgcctcgttggtttgatccattagtgtgggttgttcttgttagtttttggcgagatcctaagtcataactgaagagtatcgatagtaggaatgcaagatatcatgatccggatggcctcgggattcataaacaccggtttggcgagacatcttaccaagcccgtgccaaaaaacatgtaagttattttacacccttacttagtcaacttttttacacaaacaactaacctgatttgtttattgtttagtgtgagatgactagagagacttgtccagattttcttgtgctcttagatgagacacatagaaaatctgatgggactttcattgatagaaagtctgaggaggtttacaaagaagtttcttcgaggattcaagaggaggagtctcagctgtgttcaggggacactacggagagcacagcttctggggggttatctattaaggccaagaacaagatttatgctcaggtaaaatttttgttttgtcattgtgttttgggttacttgcattatgttttggatggcttnnnnnnnnnnnnnnnnnnnnnnnnnnngtctttcacttcaatattgttttggctggcttggattatgtcattgtctgttcatgatcttgtctttgtcattgacagatggcttgagtagatagttcttgtcattgttttttttagtgtaagtctgttgtggcttgcattatgatatattgaatatgaaacggttatgattatgtcattgtgtttgtgattttgtcttccttagtattttctattgtggcttgcaataaatcatagtgaatatgaaactgttatgtcattgtctgttcatgtccttgtctttgtcattgtcgcatggcttgggtagctagttcatgccattgtctttttcagtgtttgttgtggcttgcattatgatatactgaatatgaaacgattatgattatgtcattttgttcgtgattttgttttccttagtatttggcaattgtggcttgcattatatcatagtgaatgtgaacctgttatgatttgttgtgtttttggttttgagtttgttacaggttgctccaaaaaagaaaggcagggtttatggggatggttcattgcagatagaagcctcctcagctcatgctggtccagtgctgcctggggaagacccgattgttctctctcgaaagnnnnnnnnnnnnnnnnnnnnnnnnnnnnnnnnnnnnnngaagatcactagctttgacgtctacttcgattatcttgccgataaggatccagagttcgctgccctctttcgagccagaacctctacaaggactgagccgaccagctccaatccgataccggaggagcccaataccgcagctgctccatctgctgggatcagagatgaggcagtcggagccacaggatcatcctctccatctcaagctttctaagattataacttgcattactttgggtcaagaaacatagacttttttggtttgtttaattatgtgttgaatacttggatctttatttcagtttctataaacaattatgctttcaatttcaattcaagtttcattttcaatttcaattagttttcaaataatctaagtttaatatcaaatataaagatttaatctaaatctaatagctaaacaaaacagtaattacgctaattagtaaactcagtgtgatgcaaataattcgcaaattcgtcgcaaaagttactagggatttgctactaaagctaaaacacatcgcaagtccatcgcaaaaattgcgagggagatgcgacacctgtttaaattgctaccgttgttgtcctcgtaaattgcaactagtttgcgagagattttgttcatcgcaaaatttgcgagggaattactaccgtttctcatttgcgacgagcgttttgcggtgaattgacatttgtcgcaattccctcggtaatatcgatttgcgagggattagctacgggatcttccctcgcaaaagacctatttttttgtagtaacatgatcttaagaaatttgatgttcttttagtcttctagaaaaatttctccaatcattgtactatgtgcttgccaagttaccaccacttctttcatgtctaaacaacttgcaacaaaaacaaaaagctttatctaaagcttttgagtatatcaaccatcgtctattatgtttctctgtttaccatttatcttgtgtagaaatgcctactaatactatctttaggaaaccgataacgacttgacaaccttgtcaggaccatttgtaaccaacaaatcctcaacctttgatcatttttccccaatttccaagatcagaattattagaaatatcttcatgctcttcactttaatttccagtctcatctacatgacattcatcagaattattgacatttttatgatgctcatttttcacttctatgttaaaattttcacctggtttctcatctttctttacatacttgaacgtataacctactatcactatcttacatgaatgactatatagattctccaagtccccataaaatgatatacacaaacctgtaaagatcatgatataatcactaatgagttataaagttattggatatatgatatgaaaaataaatttgattgctgttaaaatatatacgctctcacgttttctatatatatatatatatatatatatatatattatgactatgaatggaaacaacatatcaagcggatcaggtggatcaaatagaacaaaagcatatcaaatatatttacagtaaaaatattactaataaataaaatatattacaaattactatatataattcctatgttccttcttcttcctcctcctcatctgtaatttctcgagcatattacaaatctgagatctaaagttcatattttgtctttccctctcaagttagatctatacgtgaacgatttcatgttcttcggatcacttgtaatctcagtacatagatttacagtatcgaatggtggtgcttcagtcaaattcgcggattctaaatgtgaaatcgagagggtatagaggagaattgaaattcaaacattgaaccttggaggagtatttgcagacaaaaggagaagaagccatcgtttcttcttcaaggtttgtgtaagctcgttcagacg

SEQ ID NO: 38378 - DNA, 7199 bp, Arabidopsis thaliana landsberg
aaccttaaccttaaaccttaaaccctgaatcctactttaactttcgggtttttatgcgtttctagtttttatattgaatgaaaaacaaaacatcaagtcgatttggactacaaaaacacaaaccaagcttcttcatgattctcaaagctatgatggtgaagccgaagttcttaaccgtttttggttttgaatcgtataacaaggaagcaatactttactcttcggcatctcgtcgaggttctagttttatattcaatcatacacatgacatctactcatatttccctctgaaatgctaactcagattcttcttgctcttcaaatctttgatggtgtagcctaagtccgtatgattattggttttggatcttctaaatgggaaagataaatttaggttcatagccctggttgtggtgttagccctaaaactcaatcatccacctatcatcttgagatatttgattccaaaacgcttacaaagattttgcttactttttaaagaatatttgctcctcaacactaaacctaaaaccttaagccctaaacataaatcctacacctaaaaatccaaaaccctaaaacctaaacccaaaacccaaaacccaaaaccctaaactcttaaccctaaacccttaaacctaaacccaaaaccattgtccccaaactttataaccaaaatcatactttagcttctggaagcctattgcggttctagttcttatgctcaacgatacacaaagcatctagtcatatttggctataaattccgctaaccaagccacttcttgattctcaaagctttgatggtgaagtcaaagatcttatgagtttttggtttttaatcgtataataaggaagcactactttacttttcaagatctcattgaggttctagttttatattcaatcatacacatgacatctattctgaaacgctaaccaagattcttcttgcttctctaagtatcatactatatttgatcctaaacactaaacctaaactctataccgtaaatcccaaaacctaaaatccaacccctaaaccctaacccctgaaccctaaatcctaaacccgaaaccatacaccctaaacaataaactcttacccgtaaacccttaaacctatatgcagaaccaaggaggttacaacaaaggtttcaacaacttcaaggagaaccatcccaatctgtcttacagaagtacaaatgttgcaaacccgcatgaccaagtctacccttcacagcagcagaatcaacccaaactctttgttccatacaaccaaggtcagggttatgttcctaagcagcagtatcagggcaactatcagcagcaacttccaccacctgggttcacacagcagcaacaacaaccagcttcaacaactcctgattcagacttgaagaacatgttacaacagattctccagggacaagctgcaggtgcaatggatctcgccaaaaagatggcagaaatccacaacaaggttgattgcactttcaacgatctgaatatcaaacttgaggcacttacctctaaggtcagatacatggaaggacaaacagcgttaacttctgctccaaaagtaacaggactttcaggaaagtccatccaaaacccaaaagaatacgccaccgctcacgctatcactatctgtcatgatcgagagctgcctactcaacatgtgtccaactcaatcactgaggacagtgatgttcaggaaggggagtgataagtgtgtattttgcatgttttgagcatgcatttgttatcattttagcatcatatcatcactgttttataccatttcacatcatttgtcatcactttgcatgtttaggatagttttgcatgcatgttgcatatttgtgttgttttcaggtgatttggagctgtcgacgagctaactggaagaagcggacctgatcatgacaaaccagtcaacccagaggtcgagtaggagcttcaagatctcaagcagaccactcgacccccaggtcgaagagaagacaccaccactctatcacatgactcgacccctaggtcgagtgtcttcatctccatctcttgaccaccactcgatcacatcactcgaccccaggtcgagttacttcatcccattgccagacctctactcgacctcatcactctacctggaagtcgagtatcaccatcacaccactcgactgcatactcgatgacaagcttcagagccttcttcattccgcactcaactagacactcgagcacaaggaagaaaagaagactccagctattcactcgacctcccacttgaccacatggatcgagtacagttcttaatccgtcccaatacctcgtcgttttgagtattagggtttcagaatatttggctataagtagcatgtacttcacattttcgcagacaagaagtttttatctagttttatttccgcagaccttgtgttctagactttttgtaatccggatttctctttatctattcagtattcagtattcagtttctgttcttgattttcgtttactgttgttcattctgttatcacactactgttacactgttgttatcatgtcttcaacctgttcaacgtttatgctttctgttatgatgtctgagtagtgaataggtttctgaggatgggtagagtagtgtagaattctcagtatgctaggtgattgtgtattgattgatagatcccttatggattagttgttcttaatgcctattgctttctgatcaactgaaatttgagcccagacatttccgcgcccaaaaggtgttcgatgaaatgtctgaaccactaattccagagattcgtgaccctgtaccaaggtattggttgtagggagcgttttggctttaacttgttgattcgtaatgcctgttaggttatctctcgtcaatggtgatttgagtctgggactaggttagcttgagagtctctgttgcgatggcacttagatttggttaatgaacttgttgtctagggttaatttattgagcatgtcaatcacctgtaaactgaggaaacgaaactactcaattatcccatccttaggaattctttatctgattgattttattgtttactctactactgtttactgcatcctgtcatctgttgcttagtttctgcaattctttactgttactcgatctgatactcgaccacccagttgtctggcaacagactgtgcagtcgagtatccctgtttcatttcctgtctgttactcgacctgtcactcgacctcacccagagctctgcaaagagctgtgttggtcgagtgttttactgtttctgtttgattttctgttttctgcatgttcacttaggactgcaggaacacaccaaaacctgttatgcttggcttgacttagtgacttctgatcacatcttgattgttagcatcacacccatttggattgacaacctaaaatactacaatgacatgattggtgttttaggataattgactaaaaacctattatcactttcatggtgtagccaaagtccatatgagtctttggctttgtgtcttctaacaaagatacaattcttacgcctttaagatccggttgcggtttaagtttttatactcaatcatacacatgacatcaaggcatattcgactccaaaacactaaccaaccttcttcctgcttctcaaagctttcatggtgtagctgatacaaaggttttcggtgtgtcaattccctaaatgcatcttatgtcattgcagcatttaaggtgtcaatccaaatgggtgtaattgctatcaatcaggatatgatcagagaatactaagtcaagccaagtgtgaataagtttggtgtgtttctactaaacctaagcaacaggttaacatgcaaatcaaataacaagaacagaaggtaaaccaagcactaggtaaagcactcggtcgagcaatcgagtaagcaggtcgagtacaatactaaaaacaccaattttgcacgaaacgaacagagtactaaaaacacgagttttgcacaaataaacgacacagagctcttaagaatgggataattggtcttagtggactcctcaatccattagctaactaacaaactcaatcaagctatccctagacaatagattcaaaaccaaatcaagccacttccgtgtgagtgattctcataactttagaacttcctaatctcaacttccgttgatgaaacataataaagcaggctttaaacaccaatctattaaagtcaataagcagtctaatcatccaattccttgggctagaatctacaaatctctgaaattagttggttcagacatttcatcaaacatcttttggatggagaaagtctgaaatcaattttcaattgatcagaaagaaaatagcattaagaactcctaaaacagaagggaatcatgcatataaacacttagctagctaaagaagagaggaatccacttaaacctaacccatcctcaagaactctgaagaacactactcaagaacaatgaagaacatcatagaacaaaacccagaaaattcataaaactcagaaatcattataaacttagcaaaagatagatctcaatgagataaacaagtttgcagaagaaatcaaatccaaattctcaacagaacaaccagaaaatgcaaaagaaaatcaaggaaccctaatatccagcggacaaagcgaagatcccttgggcaaaaatataagaggtctatttatagacaatcctaggttgccctaattgggaataagacaaaaaagataagtcggcgcaggagcgctcggccctaggccgagtagaaaagccgagtggcttggtcttggtcacacagctcggctctaggccgagtggcttggtcgagtagcttctcttcatccttaagtgcacaactcggcctccagccgagtgccttggtcgagtaggctccttgttcttcacgtgtgctccactcggcctccagccgagtacataggccgagtataattcaaatccttccttaggtcccccgaactcgagtatgtccatcccttgtgctagaaacctccaagttgagtccaaaagtacctaattcatctgcaaaacactccaaatgcaagtatgctatgcaatgcaatgcaaaatgtgcaaaagaaggaaaagagactaagaatgcataaaaaggggcatgaaactaagctaaatgcatgaaaaacaagggcttaaaaaggttaaaatctagtgttatcagcaaccttatcctaaaggcttaagtagtgtttccttgttagaagatacaaagataaagactcatatggactttggctaaaccatcaaagctttgagaagcaagaagaagcttggttagtgttttggagtcgaatatgacttgatgtcatgtgtatgattgagtataagaacctaaagcgcaaccttatcttaaaagcctatgtagtgtttcttaattagaatatgtaaagccaaagactcatacggactttagctacaccatcaaagctttgaaaagcaacaagaagcttggttaaggttttggagtggaatatgacttgatgttatgtgtatgattgagtatacgaacttaaaccgcaataggatcttaaaagcctaagtattgtatccttgtaagaagacacaaagacaaagactctgataagtgtgtattttgcatgttttgagcatccatttgtcatcactttagcatcatatcatcactgttttataccatttctcatcatttgtcatcactttgcatgtttaggatagttttgcatgcatgttgcatatttgtgttgttttcacgtgattcggagctgttgacgagctaattggaagaaccggacctgatcatgcaaaaccactcgacccccaggtcaagtagaaacttcacaaccttagtagaccacttgaccccctggtcgagtagaggacatcaccacttcacctcactactcgaccccgaggtcgagtgtcttcatccccatcacttgatcacatcactctaccaagaagtcgagtatcaccatcaccaccactcgactacatactcgatggcaagcttcagagttttcttcattctgcactcaaccagacactcgagcacaaggaagaaaagaagactccaactatccactcgacctcccactcgaccacctgggtcgagtacagttcttaactcgtcccaatactgcgtcgttttaagtattagggtttcggaatattttgctataagtagcatgtaccctacattttcgagaacaagttttttttatctagttttattccgcagacactgtgttctagaccttttgtaatccggatttctctttatctattcagtatttagcattcagtatttgttcttgatttcgtttattgttgttcatcctgttattgttttgctattacactgttgttatcgtgttttcatcctgttcaacgtttatgttctctgcaatgatgtctgagtagtgaataggtttctgaggatgggttagagtagtgtagaattctcagtatgctaggtggttaagtattgattgatagatcccttctggattagttgttcttaatgcctattgctttctgatcaactggaatttgagcccagatatttccgcgcccaaaaggtgttcgatgaaatgtctgaaccattaattctagagattcgtggccctgtaccaaggtattggttgcagggagcattttggctttaacttgttgatttgtaataacttttaggttagctctcgtcaatggttattgagtctgggaaaagtttaacttgagggtctctcttgcggtggcacttagatttggttttcgaacttgttgtctagggataatttattgagcatgtcaatcacctgtaaactgaggaaacgaaactactcaattaccccatcctcgggaatttctcatccaattgatttctttggttactctgttgttgtttactgttactcgacctgatactcgaccacctagttgtctggcaacagactgtgtagtcgagtatccctgttatattttctgtctgttactcgacctgtcactcgacaacacccagtgctctgcaacgagctgtgttggtcaagtgcttttactattctacttgaatttttgttttctgcatgttcacttaggactgctacaacacacaaaaaactgttattgcttggcttgacttagtgacttctgatcacatct

SEQ ID NO: 38379 - DNA, 9168 bp, Arabidopsis thaliana landsberg
caatcaacaaatgttccacaatagtctatgattcacaacagaacacaatagtcaacataacaagatcacacacagtaaagaacttaacaagattctataaaagtatagaacaaagacagatcctcaatgtcaaagccgaaaacatgctaagttcaacaatcaacaaatgttccacaattatgttcatgattcacaacagaacacaataaagaacataacaagagcagacacagtgaagaacttaacaagatcacacacgagtatagaacaaaggcagattctactatgttacacaacccataacaaacatccaattccaacaaccatcattcacaactatgttccacaacaagccattctacataacagaacacgagttacactgcacaggctgagaacacgagaataaaatagaggaagagaacataccactcggtttttggtttgggaatcggagacaagacacaacaccacagctccctgtttggcacggagagtgtcgcttgcagagccaccgccttgtcttcttgtagctccggcaacgtcccaggaacttactcttggaagttgttcccttgagatgaagggtggctgtttgttggagcgtctgaatctggcgactgaggaggatcttactgagctggcgctgttggcggcggattgtagtggacctcttcagatagaggcggaggagcttgacgttgtggttgagtcgttgagttctggaacagttgaagaggcggtggatagttgcggacgtgggggccagacgttgaaggtccatgttgttgagccggctccgtcgcaggaacttgaaccgccggcgccggagtgaagttgtattggggaggaagatttgcaggtcttgatccgccggcgccggctctctgagtgacgttcggcgtcgtcttacgcttccgggagccacctcgaccggcgatatgcatgatagtgagccaaatgaagagattgaagagaagaagaagaagaagacgaagcagatcgaagaggctgaaggtgagagatcgaagaagatcgatcgatcttagcagaagaagaagaagatcgatctagaaggagaaaggatcaatcttagaaagagttctggggattagggttttcgagacgaagaagaagaagaagaggaggttggatcgaataggtttaaggtgagagatcgaagaagatcgatcgatcttagcagaagaagaagaagatcgatctagaaggagaaaggatcgatcttagaaagagaattggggattagggttttcgagacgaagaaaaagaagaagaagaagaaatggctaagtgtttggctcgaagagaaatgactcgatttagggttttcaacacaatagaagtcgcataatagtcgcataattgtcgcatattcatttggatttgggcctcaaaattttgaagcccaactaatcaaaaaagtatcgttgaatagtcgtaattttgtcgccaattatactgggtttgggtttcaaaatttcaaagcccaacaaatcaaaacttgtcggaacatagtcgcatctttgtcataaaatattactgggtttgggcttcaacatttagaagcccaaaataccatgcatctgtcggccaatactcgcaatatcatcgccgataataatgggtttgggccccgaaattaagaagcccacaaaacaaacttgtctcggtaaaaaatcgcaatatagacgcctatactaatgggtttgggcctcaaaattttaaagcccatcatatcaaacagttgtcgcataatagtcgtcgttttgtcgccgattttaatgggtttggatttcaacgtttagaagcccaataaaacttatcttagtcgctcattagtcgcataatagtcacttttaaattgatataattctagatgtgaagaaatatttgtatatcataaaaaagttcaatgattttatgaaacaaaattcattctaatatttattcaaataattatacatatattaacacagttatacatcttcatcttctacttcatcttcgtccgaggacgataaattacatcggaattcgtcttctggttcagcatccccgacatcgtaatcaaggattattgggtttaagttggctaccggagtttcaagaacaagatcttcaattgtagtgagcaaaacatcatcatcattttctgtttgcaaaagagttggatcattgttttcatattctccagaaatgtttcccctcggattgacttttagaacattgaaccaaatgttctttggtttcttcgtatatggatacggaatataacaaacttgatctgcttgagatcctgtatacatatatcaaagatagattattaataattaaaaaagaaacgtattttggacttaagaataattacgtaccatgaataaatggctcgtatttattgtatttcctcgtagatagaacgtctacaacaccactatggcttcgtcgagtgcctctaccaatcacagggtcataccacttacacttaaaaagtgtgattttcaaattgacgatcccctcatactcgagttctatgatatcaattaaggtaccgtagaaatccgcttcatcagatgaatccgcgtagttttcacctttaacacataccccatagttacatgtttttcgttcagcgccatgatttttcgtatgaaacaaatatcctcgtgtgaaatacattggtcaagttttaactttgttcaaaggcccatgcacaatctcttgaacccaagtaggaaatggagaagtagggttccaatatattacctacataataaataaacaatatcaatatcaacataatttaaatgatcacttttaaaaattactaaaatgatgtagacttacatattctttaacccattgataatattcttcagctcttttcgcgttgagctctttttcggacaaggttggatatttcacagaaagaaaatcctcgaacgtactatatttacaaccgaagataaataaattaaagttatcataatgaaaattttaaattaaggagtgatttaaaatacctctcaagtggttgaaaatagtcacaatttcttaaaacatatgcatgtgcgctttggtagtctttctctgaaagccattctacgtgcatttcaccacttggacggccgacgtgcataaatatgttaggtactccaggaacatgatatacaggaacttctccttcatcgaatcttgttaacctgattcatgtaattgattttaattctgaagtatagattgcgaatcgtaaaataaatagttatatttaccttgattttgtttgtatatgatcggcaaagtagtgctttgaaaaataagcaatctcgtcattgatatatgactcaacaattgattctgccacatatcttttgttctttgcttttcctttcaactttttgaaaaacctctcaaatgagtacatccaccgatattggacagagacacccaattcagcttcgtatgggagatggataggtaggtgttccataacatcaaaaaatgatggtggaaagatcttttccaagttacagattattatgttctgtttgagaatttgaatccgacttttctgtaaagttctcgaacataagtcccggaaaaatgctccaatccctaatatatatatatgtctaagtctaaatcagaggtttaaaaaagtgtggcaaattaaaaaacatatattgtacctgataatgcaaggtggacattccggtcaaggagttcagcaaagataaatggcagtagtcgctccataaaaacatgacaatcatgactcttaatgcctgaaaactttccattctccatgtctacacaagtagccaaatctgaagaataaccatctgggaacttaacctcatgtttcacacatgataataaactctttttggcttcttcggttaatgcatacgctgaaaatggagctttaccctgaccatcaatatgtaagtctgaccgagaacaaaaatttttaatatccaatcttgacatgatattatcttttgatttacccttaacactcatgagagtgttcatgatgttgtcaagaaaattcttttctgtatgcatcacatcaatattatgtcgaagattgaggtccttccagtaagacaactcccacaagatgctttctttgtgccaattatgttcctttccatagcctggcatcttcttttcatgaccgttcccaccaacgtccttcgtttttgctggatttacattagccaaccgcttgtaataaacttgctcccctgtcaatgactcgggtggatactcgctagaagcgtctgttcccttcagaaagtctttcttgttcctacgggatggatgaccatgaggaagaaatctacgatgacaatcaaaccagcatgtcttccgtccattgggtagataaaaagactttgtactttccatacaaattggacaagacaatttaccatgagtagtccatcctgataacatgctatacgccggaaaatcgcttatcgtccatagtagcactgcttttagattaaaattctgactcaatgatacatcgtatgcatcgactccagtagaccacaactcttgtagctcctcattaagaggttggaggaagacatcaagactagctcgaggatggtttggcccagaattcaaaattgtaagaaataagtactctgtattcatgcacataccagggggtaaattatatggagtcagaatcacaggccataacgaatgattacgagacatgccaaaaggattgaacccatcagtacataacccgagataaacgttacgaggttcttccgctaaccgggatgtaactcttgaaaatatctccactccgccgcatctgaaagatgattcatttcttcttcttttgattggtgctctgcatgccaacgcattgcagctgccgtcttgtggctttgatacattctcttgaatcggtcaccaataggtagataccacatacgactatatggcactttggttcttcgacggtagtcatccataggcttccatctttgagcactacaaaaccgatatttatcttccttttcgtcttccttccagaaaatcatacaattgttaatacaaacatcaattgtataataaggaaggcctaaattgcgcatcaatttttctgtcttgtaatgcgaatcagtagcttggtttccttctggtaaaaaatctgtcaacatttgacataccgaatccacacatctttcactcatattatgatccgccttgttctgcatgactcgagctgctaacgataattgagactggccttgtcgacaaccatcgtacaatggattttgagcaccttctaacaagtcgtagaattttttagaatggttacgtactggttcctccacattctgattagtaccgtcttgatgatagttatcatcaaaccccaccttataacgaaatgcatcgttcaccatatccacatatggatcttctacaacattacccacatccacatatggatcttctacaacattacccacactttcataattctctcttagatacgtactatcaattacataattactcgttcctacattcatgttgaaatcttccccatgcatataccaaacataataatctggcataaatccttgactaaacaaatgactactaacttttccacccgagacgatatgttttttattcttgcacacagcacaaggacaatggaatttacctcgacaactttgtactataggctggctattagcaaatgtcaagaactcctccactcctgcgacgtattctgctgacaaattccccgtcatttcatcgaacctcttgtacatccaatctcgattaaaaccaccgctactcggataattatagtttcccgccattataagactaataataaaactaaatatatttttaaacgtttttttcttcaaaaatgtttattttttttaaaggtaatattagtattgtgtttgtgttgtgaatgaatattttgtacgagaaattttcattatataggcaatttttgagtgactaaaacacgactaaatagtgtagtcgtttaaagtaggtacaacaacttacaaaacgaattgcatgtttttttaatcgaaaattacgtctattttgcgactatatttaatgacacgcccctgtagtcatccaatagtcgctatttagaggactattacgagctgtcgtatattagtcggcaaattacgtctattttgcgactatatttaatgacacgccgcagttgtcatataatagtcgctatttaacgactattacaacgtgtcgtatattaatcgcaaaatagcgactaatttacgactacatttggcgactcattaagatgtgtcatataatagtcgccctttagcgactaccaaggcgtctcgcctctacagtggtaatttggcgactaactaacgtctatatttttgttagttgtaaattagtcgtagaattgtagccaaatagtcaccaaatatagcgactatgtatgtagtcgccgggtgtagtgggtatttaactgttttcttgtagtgtcggatgggaaaagagtcaggtttagggtattctcaggaaatagatgatagtagatctagaaatagttaggttgttatcgcaccgttctcgcacttaaactatgattttagagtaaccagtggtgttccgtgaaactctctatacttagagttaagatcaccgaagaagccgagaaatcctatacttaaacatgcattattatcaagtttgattagtgatacgtctataattcatcatcgttttgagtctagtttcatatcatttctcatcattactacatactttgcatgattaggatagttttgcatacatattgcatttctgagttgttttcaggtaatttggagctgtttgcgagcaatttggcagaaccgagcctgaaccaaaagacatactcgaccaccaggtcgcgtgcatccagcaccatactcgaccccctggtcgagtgactttggagccattcttcccacctactcgaccccctggtcgagtatcctcagcgcaggccactcgatgacgccactcgaccccctggtcgagtatcacttcgtcacaccacctaaccacacttggccattcactctaccaagttactcgaccccctggtcgagtataatcactcaccaccaacaccatcactcgaccggacactcgaatacatcttcacagtctactcaaattcgcactcaaccagacaagctgagcacaaggaagagaagaggagaagacgaagtgtttggaagcggcctggacctccatcggatcacgaagcccatctcggcccattatcactctatgggtcgggcgattaggttattggcccgtctactatcattttgtttcgttttgtataaatagatgtcttagggttctgtcctgagacatccagtcgacattgagtttttgcttcagttttattttctattttactctgctgcgccgcttttgcttctgcaacctgtaattcgagattttttcaagttatttagattccgcatttgatttcatctgtcatcttgtttctctactctttatctctttacttatgcaatattatcatttatctgcgtttatgtctttgagcatgttgtctgagtagtgacatagagttcttaaggatgggatagagtaagttgtgggaatccgtagtctgtagaatggttcaagttttagaattcattgaacccctttaggactaggttgggtttaactgcttattatctttctgatcaactggaatttggatcccaagcattcccgcacccagaaggtgttcgaaggaatgcttgatccactagttcctgagatatgcgtctctatcccaagggattggccgtttagagcgtttattgactttatcagctagctcttagtgcctgcatagttagattccgttaatgggaattagtctgggctagctttgcttgaggatttctatcacgggagtgaattgatctgttgttgaacctattgtctaaggatagcttgattgcgcttgttaaccattcgaataggctaggataccactctactcgattaccccatcgttaggaatttctcgtctatcttatttctctgttttatcgttatcgcttaatcgttctcattgcctgtttcttattttttacaatcactcgaccaacttactcgaccacacccagtgtctggccacagactatgcagtcgagtaagattgtcttgtttcctgtctgttactcgaccaatatactcgaccacacccagtgtctggcaacagactgtgcagtcgagtatatctgtttcatatcctgcctgatactcgaccacatcctacttctggcatcagtctgttgtggtcgagtgattttagtaagtctgttattgtttctgttttctgcatgttcacttaggactgctagaaaccctaaatctgttattgtttggcttgacttagtgacttctgatcacatctcatctgtttgcatcacactcatttggattgacacctaaaatactacaacgacatgattggtgttttaggataattgactaaaaacttattatcaaatctcttttgtttatcgtggtaaaaatgaaatccaataattattctataaaataatatttcgatataagatcgatacattaaattaaaactccaataaattaattcagaaaacaataaacagttacaataatttaaaaagggataatagaaccccatgtatattacaaacattttatccataaattataacactttaaacactaaaataattcgacatttttcgatatctataaccactcaatcatcctatacaagatttccaaaaagaaatgttaattaccaatattcgacatagcttagagaatttcacatattctcgatttcttacatacgatgaaacataacgtacttattacaaatgatttatacatcaattataacgcataaaaatatcaaagttataacatattttggtagcgttatccataaccactcaataatccaagtgtaatcatcataaacagataaaaagttttcaacataatgatcgtttataaacttgcaaattaaatttgcgcatttttcaaggatcaattctttacatctaagaattattttacaacatc

SEQ ID NO: 38380 - DNA, 1054 bp, Arabidopsis thaliana landsberg
gacgactaattagtcactattaaggactgttgggcgactaaaaatattaattcgtaaattagtcacttttgtgcgaccaaaaacactagtcggtaaaatagtcgtaaattagcgactactttatgactaaattgcatactggaaaaattagtcgcaaaatagtcgctaattaggcgactattatgcgattacaaaccgtagtcaccatttgttaacattgtagtcgccatttagtcagcataaatgtctatataatcaaaaagttcaccccattctactcctcgttcatacaaacacaattcaaaaccaaaacattagtagctaattatagttacaaatctattgcattgctatgttgtatgtgcctaattggtagctactataatgtacgaatttttaatggctaactactataatgttatgtatagtaatatactctaaaactaaaatttaatactgccgaattctagggttcattatcgacagattcaatttcagatctaatcatctcttctctcccctttcctcttttctcttctctttccaaactctcgataatcttcaggggttatcagattggttcgtgattaaggaagatggcgctccaatttgttgatccccttgggtcggtaagagtttatctcacttgattctcgttcctagatctgacctcttgaggacggataccggtgttctctgtggttgatgctcgatttatcctgtggagttgcaatcttgctggaaagtgttgtttgattgggtaagttctctgaattttaactgttttttttctaagtgactaaaatattgatcaagctggtgttgattttggcgctggattgaatatgatggttaaggaattcttcagaaggttacatgtaacgttccgacacgacgagaacgcctctgttcatttatcaaagcaacacttgctctggtatggatatgatagaaaggtatgctcaacgcttcaacacttagcatttcggttttttgcttattgtatcaaaagtcgggtactactcatatggtaatctattttcagaaaagtatg

SEQ ID NO: 38381 - DNA, 4264 bp, Arabidopsis thaliana landsberg
  unsure (1)..(4264): unsure at all n locations
ctttggtagcaaatttaaaagatgcagaatggcatagtcgaattcaaggcctgcaaatttcctgtgctagcccctcaacctctcatcttttgtttgatgatgacagtctctttttttgtaaagcagatcctttacaaggacaagaaattgtaaagattctacgtacttatggtgaggtctcgggacaacaactaaacattgctaaatcttctatcatgtttggacatgatgtggaaaactccatccgtaatagcataaaatcagctattggcatccataaggatggtggtatgggctcatatttgggattaccagagaaaattcatggctccaaaacccaagtgttctcttttgttagggatcgtctccaaaaacgtttgaatacatggtcagccaaattcttgtccaagggtggcaaagaagtacttattaagtttgtggctcaggcccttccgacatatgttatgtcatgtttcctcctccctaaagcaatccgctccaagttaagtagtaccattgcaaacttctggtggaaatccaatgaaaatagcaatagtattcattggatagcgtgggataccctttgtaaccctcattcggaggggggcttggtttttaaacgcttgaagaatttaatttagctcttctagccaaacaactttaatgtctgatcacattcccgaattctcttctgagtagggtcgtacgaggaagatactttcgtttcagtgacccactacatataggtgcctctaatcggcccttttatggatggagaagcattatgacggcgaaacctcttcttcttttgggtcttcgcatgaccataggatctggaatgctgactcgggtctgggaagatccttggatccctacaattcccgcgaggccagctaagagtatccttgaaacaagagatccccacctttacgtaaatgatttgattgatcaaaatacaccgatgtggaagcttgatagccttcgagccttgattgatcctgctgatattccactcattttaggaaattcggccaagtcgtacctacttgagtgacgggtttagttggtcttatacaaaatcaggtaattatactattaagtccggatattgggccgcgagagatttatctcatcctacttgtgatccctctttcagggaccaggtgtttnggcacttcaggcacaagtatggaagcttaagcatttcgcgtggcaatgtttctctgggtgtctagctacttgtcaaatgctagcttacagacatatgggtacagatatgagttgccctcggtgcggtgagatggaagagtcgattaaccatcttctctttcattgtccaccttcacgccagatttgggcgctatcgcctattccctcttcagggaatattttccctagaaattccctcttttataatttcgattttcttctttggcgtggccacgaattcggaatagaagaggaggttattaatatatttccatggatacttaggtatatctagaaaagcagaaaccgctttgtctttgaaaacatcagagaaccccctcctgaaactctcgctttggcccttcaagaggctgcagtttggaaaaaagcaacctcaattgacgaggaccacatcgaagattctatcccccctgttttcgtgcaagctccccctgctgagttccctgaatgtcagtttgacgcttcttggcatgcagatgattctctaagcggtcatggctgggttcttgtccgacacgacgccgtcctccatatgggactcaaaagtgatcgccggagtttatcaccgctccacgcggaatttgactccttgttatgggcgatggagtgcttgatctctattggtgagacgtctggcgtatttgcctccaattgctcaaatttgattactattctcgacaaccaagacgattggccaacattcgcagcggaattggcatcttatcgttcattagtgtgttttttcttttcttttagtattcgtttctttcctcgtaatttaaatactcgagcacattatttagctaagaaagctcgagctcgtaattgtctttttcccatgtaagcccatcggttcctgaatggcttttcctagaagagagtctttttccgataacttaatataaatagtattttggtgaaaaaaaaatgtagaaagcaataaaaatatattataaatttgggtgtaaaaaccttaaacataaaagtaaacaagattccaagattacacttaaaaaaccttcccacattgaagagtctatactggttgttcatcttaaggaggtgtattagagtatatagttgtacatattacatccatttaattacccctcctcatgtatctctttaccttacatgtatagcaattcctctgtatataataaagccttctccatcaataagatttatcagtttctactatcataatagattacttttttcaaatataagtgcaaagttttctaacgattattttgtacatatgtaaattaaaaatataataaacgatttagtattaaagactgagatccaaagaggttttaaaattggggagagcgagtctcaatgattgataatactccaagatagattgcaaataaaagaaatagagggctttgttaattcgattaagtggacagttcgatcaattctaattactctcccaataatttgtaaaaggtatcggtgctacattgatggatcttgaaagaaatgataaactaattcagggttgcaatagttttgtttcaaatacgatgtggagagttcaaatatgggttcaaaaacctacatcgaagtttctattgaagattaagttttaaaaactttactaaccaatgcaactcttcagttgatggataaatttattaaacaaacggttgcaaacctttgtgacacccgttggacattatagaactcatttttttgcatcaacaattgtataattagtcggctaaaatccttatactcaatacctcaaatgacgcatgcaagaacgcatgtaccaaagcagtaagatagagttcaattctagtccacaaaactatgtaacaaattggtgtgtgcttgttataacacgatacacattcataaactaggttttttaagctactttttaggaaacgtaagcaattttaattagagttagtttgtgcagctaactacatacgttaagagaaagcttaactagaaatataatagtgtaaacgatcaaacaaaatcctagatatcgccacctaaacaatcgatcatgtccaccctttcactagcccttaaaacctaactagaaaactactctagcatggcgaaagaacttattaaagtaaggtttaataaaatcattagaataatatgaataagaacttaatagggtttaaagattacttctttaatcgtcaaatacaagaggtaagacttcaccttatagaactttaaaaagaaatagtaaaaataatagattttgtgtcttcaaagcttggatcaaaaaggaagatggatgttgtattttttgggctcatatcttttatatataactgataataggtttttagtcatttttcctaaaacaccaataatttcattgtagtattttaggttgccaatccaaatgggtgtgatgttaacaatcaagatgtgatcagaagtcactaagtcaagtcaagcaataacaggttttggtgcgttctagcagtcctaagtgaacatgcagaatacagaaaatcaagcagaaataaataaacactcgaccaacgcagctcggtgcagagcactgggtgtggtcgagtgactggtcgagtaacagacattaaatgaaacaaaaatactcgactgcacaatctgttgccagacaactgggtggtcgagtatcaagtcgagtaacagtaaagaattgcagaaactaagtgacaggtgacaagatgcagtaaacaacagtagagtaaacaaagaattcaatcaaataagaattcccgaggatggtgtaattgagtagtttcgttttctcagtttacaggtgattgacatgctcaataaattatcccgagaaaataagttcgataaccaaatctaagtgccaccgcaaaatagaccctcaagttaaaccacaatcaccattgacaagagctaacttaacatgcattaagaatcaacaagttaaagccaaaacgctccatgtaaccaataccttggtacagagccacgaatctctggaattagtggttcagacatttcatctaacaccttttgggtgcagaaa

SEQ ID NO: 38382 - DNA, 6532 bp, Arabidopsis thaliana landsberg
agatccgtctacttgtggggcgatctcccgtcaaggttcaatgaaccaggtgacgtataacctgttcacggtttgccccggagatcagatttccagagaatctaaccgtagctcaatcggatatctcttctcaaagttatctccggttttctgaagttgatgctgtctgcttctgacaaatgatctcataactccctttctgcaaacaacaaatctctcaactcctcttattatctttatatccctttctcttttaatgagatgtgtatataccaatttacccctcctccttctttctctaatattcattataaaattaaataaatttagaaaaacaaaaaaaaattgaaaccgaaaaaaaaacagaatccccaaaactctctctcctctcctctgaagctcgagctcactctctctactcgctcaatcatcgctctcttgccggaattcgctcaccattgttgcgatatccttatctccggcgagctttgtcgacatagaaagaaaaggtaagtttctcgagctgaatggagcttaaaattggagattagaactaagagattttgtcaattagatttgagattaagcaaattgtgtttgggtatgcacattggaagtttatgcatactgattgggttgaatagatttttaaataggtaagaaatggattccaacaactgaatcatattgaattgtagttttgaacccgaaaccattcgattgagctcttgtcgggaaatacatctggtagaactgcgtagaactgcacatgtttcaattgaaaaatatgtgtagtaggacttagttgcactagtattaaccatgtacatgtagtatttatttggtatagtagtattacccatttttatgtagtatttatttggtacagtagtattaccaattttcatttagtattattagttatacatgtattatacagataggtgtagtatgactagttatacttgtgttacccagaattgtagtataactagtacatttgacagagtttttgtattgttgtcgtaggatacaatggtggagaaggtgatcatatattttagatgaaaagattgaacgtacagcttgatgatgaatgggaaataactctctccatgttagaaagtaggatttgctcgaaccttggattatatgaaagtaaggttaaattgcaaatgaagtacaatgcagtgatgttgggaccaactcaagagatacacattagtgatgatgaggatgtcggtgtctatatattttcaggtgaaatggttagtagatatcctttgactgttgacgtcatcactccaccagaattggccgagaaactgtcgagagtggaggtcatcaataaaagttctcttggtaagaactatgctgatttgggttcaaatgaagatgaaatgagagataatgcaaccattgtgataggtgatatgtctaaaatttgcatgttttcagtgtccattcatcatcgttttgagtccagtttcgtatcattcatcactgttttatatcatttcttatctttcttgcgtactttgcatgattaggatagctttgcatacatattgcatttctcagttgttttcaggtgatttggagctgtttgcgagcaaattggaagaaacgagccagaactagaagacatactcgaccaccaggtcgtgtgcatccaacaccatacccgacccccaagtcgagtaactttggagcctttcttcccacctagtcgaccccctggtcgagtatcctcagctcaggccactcgatgacgccactcgaccccctggtcgagtatcacttcgccacaccacctgaccacactcgaccattcactctaccaagttacttgactccctggtcgagtatcatcactcaccaccatcaccatcactcgaccggacactcgatcacgtcttcacactctacttaaatccgcactcaaccagacaagatgagcacaaggaagagaagaagagaagacaaagtgtttggaagcagcctggacctccatcggatcacgaagcccatctctgcccattatcattctatgggccgggcgattaggttattggcccgtctactatcattttatttcgtttggtataaatagatgccttagggttctgtcctgagacatctagtcgaaattgagtttttgcttcagttttattttctgttttactctgttgcgccgctttttctcctgcaacctgtaattcgagatttttccaagttattcagattccgcatttgatttcatctgtcatcttgtttctctactctttatctctttacttatgcaatattatcagttaatcgcgtttatgtctttgagcatgttgtctgagtaatgacttagaattcttagggatgggatagagtagttgtggaatccgtagtctatagaacggttaagttttagaattgattgaatcccttcaggactagttgcttttactgcttatttctttctgatcaactggaattcgatcccaagcattctcgcacccagaaggtgttcgatggaatgcttgatctactagttcatgagatatttgtctctatcccaagggattggccgtttagagcatttattgactttatcagtccgttcttgttgcctgcatagttagattccgttaatgggaattggtctgggctagctttgcttgaggatttctatcacgggagtgaattgatctgttgttgaacctgttgtgtagggatagcttgattgcgcttgttaaccattcgaataggctaggataccactctactcgattaccccatccttaggaatttctcgtctatattatttctctgttttatcgttatcgcttaatcgttctcattgtctgtttcttagtttttgcaattactcgaccaacttactcgaccacacccagtgtctggcaacagactgtgcagtcaagtacagttgtctcatttcctatctgttactcgaccagtatactcgaccacacccagtgtctggcaacagactgtgcagtcgagtataactgtttcacatcctgcctgttactcgaccacatcctacttctggcatcagcctgttgtggtcgagtgattttagtgattctattattgtttctgttttctgcatgttcgcttaggactgttagaaaccccaaaactgttattgcttggcttgacttagtgacttctgatcacatctcatctgtttgcatcacactcatttggattgacaaccttcagtactacaacgacatgatagtgctttaggttcaattgactgaaaaacctattatcatgtggtatcagagcacactccgaaagttgagttctctatctctatcattttgtgtcttttcatcttcagatatgtgtccgtctgtcaccttgatttaatttacataattatttggtgcgtgctaaaatttcgaaaataactgtcacgggttcgaaaaagaatctaatattttgtaaaattgtttctgaaatatttgggaacgttttgataatttttagcatctgaacaagtgaaactgtcgtaattagggttctagggcatcaaaacggttatttcgtgtttgtttcaaaagaactagttactggtgttgttttgttgtctctattgcagaaaggatggctgaatctgaggaggaagagactagcaacaatcgaaacaacaaacttttggtagaagcctttgagaaaatgatggacaccaaactgaatgcttttcgccaagagtttcatgagaaactagagttggggcagactcgtcctggagaacaaatgagagttaatgagccgcttgagcaaagagatgaagctacagatcagtactatgggcataggagcacttcatctcacaatagtcaaaggagacaccatagacgtgctagagaacgtagagatcttttgcaagacaatcttggaggtcttaagcttaaaattccaccattccatggaaagaatgatccagatgcttatttggaatgggaaaagaagattgaattagttttcaaccttcaacactacaccgagatcaatagggtaagagttgctgctactgaattttatgactatgctttgagttggtgggatcagctagttacttcacgaagacgtaatcaagaaatttcattggaatcttggtctgaaatgaaagctaatatgaggaagaggttcgtccctagtcactaccaccgtgagctgcatttcaagttgaggaatcttacacaagggaaccgttctgtcgaagagtactacaaggaaatggagactttgatgttgcgggctgataattctgaggatagagaagcaactatgtcaaggtttcttggggatttaaacagagatattcaagacagattggagactcaatactatgttgaaatagaagagatgttgcacaaggcgattttgtttgaacaacaagttaagaggaagagttcatcacgatctagttatggttcaggaaccgttgctaagcctacttaccaaagagaagagagaaccagcagctataagccgattctcagttcaagggctgaaagtaaaccatatgctgcagttcaagatcacaaaggaaagactgaaatttctacatctagagtttgtgatgttaggtgttacaaatgtcaaaggaaaggactgataataggtttttaatcaattaaacctaaagcactatcatctcgttgtagtactgaaggttgtcaatccaaatgggtgtgatgctaacaatcaagatgtgatcagaagtcactaagtcaagccaagcaataacaggttttggttagttctagcagtcctaagtgaacatgcaaaaaacagaaaatcaaacagaaacagtaaaacactcgaccaacacagccctttgcagagcactgggtgaggtcgagtgacaggtcgagtaacagacataaaatgaaacacagatactcgactgcacagtctgttgctagacaactaggtggtcgagtacaagaaagaactgcagaaatgaagcgacagataacaagatgcagtaaataacagtagagtaaacaaagaattcaatcagacaaagaattccaaaggatggggtaattgagtagtttcgttttctcagtttacaggtgattgacatgctcaataaattacaccctagacaacaagtacattaaccatatttaagtgccgccgcaacaaagaccctcaagctaacctagtcctagactcaatcagcatggactagagctaacctatcaggccttaggaatcaacaagttaaagccaaaacgctccctgcaaccaataccttggtacagggtcacgaatctgtgacattagtggttcagacatttcgtcgaacaccctttgggcgcggaaatgtctgggctcaaattcaagttgatcagaaagcaataggcattaagaacaactaatccagaagggatctatcaatcaatactcaatcacctagcattctgagaattttacactactctaacccatcctcagaaacctattcactactcagacatcataacagaaagcataaacgttgaacaggttgaagacatgataacaacagtgtaacagtagtgtgataacagaatgaacaacagtaaacgaaaatcaagaaccaaagctgaatactgaatagataaagagaaatccggttttacaaaaagtttagaacacaaggtctgcggaaataaaactaggtaaaaacttcttgtctgcgaaaatgagaagtacatgctatttatagccaaatatcccgaaaccctaatactcaaaacgatgatgtatttggacgggttaagaactgtactcgacccaggtggtcgagtgagaggtcgagtgaatagctggagtcttcttttcttccttgtgctcgagtgtctggttgagtgcggaatgaagaaggctctgaagcttgtcatcgagtatgcagtcaagtgttgtgatggcgatactcgacctctaggttgagtgacgaggtcgagtagtggtctggcagtgaaggtgaaggcactcgacctcatggtcgaatgaagtgatcgagtgatggtctggtgatggagatgagggcactcgacctcatggtcgagtggtgaagtgaagtggtgatgtcctctgctcgacctgtgggtcgagtggtctcttgagatcctgaagctcctactcgacctcttggtcgagtggtttgtcgtgatcaagtccgcttcttccaaatagctcgtcaacagctccaaatcacctgaaatcaacgcaaatatgcaacatgcatgcaaaactatcctaaacatgcaaagtgatgacaaatgatgtgaaatggtataaaacagtgatgatatgatgctaaagtgatgacaaatggatgctcaaacatgcaaaatacacacttatcaattcccccaaacttagtctttgcttgccctcaagcaaacattcaagaacaagctggaagtgaggtttgaagacggggactaagagccaaaacaccagatagaccagatgaaatcattgtccaagttgaaagttctaagct

SEQ ID NO: 38383 - DNA, 2083 bp, Arabidopsis thaliana landsberg
  unsure (1)..(2083): unsure at all n locations
aataaacacgagagagaacaacaaagttgaaagttttttcctttgtaatgaaaattaccaaacaagtcatcctggcccatatttagagcccggctaggttttgtgaagcccattattggcccatcatcacattggttttcactatttccatcgccgttgaagttgttatctttcccgatcaccgggaatctgtaaatgttgctgaggtaaaagaaatagtttcggaaggtcgcatagtatctatttagaggatcggtggatggtgaaagacagtaaccaaaacccctatttctattacattgatccgcgttgaaaagcaatgacgaagctatctgattttcccggagatttgctggaggagattctttctagggttccggtgacatcatcgagagcagtgcgatctacttgcataaagtggaacactttatctaaaaatgagagctttactaagaatcacattgctcaagcaaaagcagcggcagcaagggagtttatggtggtcatggtaatggattttcaggtttatttgatggacatcaatctccataaggtcgttgacgcatctataaacggtcaaggtaaggttattgggttagacgattacaatccccccaataaaccnagcgtctatcactgcgacagtttagtcttatgcatcccaaaagactgcgctaggctcgttgtttggaatccgtattggggccaaaccttatggttcaagcccactagtcttcgccattttccgcactggtatatgtatgctattggataccagatgcgaagaggaaactgagacgcgaaaacttcaaggtggttgttgacttgtagaccgacgaccaaaactatcacaaagaacacgatcgatcaccttcgaaagtcaaaagatagatactcgcttcacatctatattttacaactttattatattccacacaaatcatataatacatacattagtctccttttattaaataccagccgtctattttggtttttcttattacatgcttaaaaataccaaatgcacaaagaaggatacttttacccactacaaaatatggacttatctgaaaaattttatcgaacacatttttcttattgaaatagttacctatgtattagtacatatattttgttacgggaaattcaaaaatttttatatacaaccaatcaaatggctaattaataagtggattaagacctttgacctcaaaacacgaccaagtaaaataacttcaagttgattgataaaggcgtactataaagagtagacaaattgctaacatgcgcctaagcgcaccctatatatcatttactgtaaatttccgccgggaagaaaagtctgcgtttcttcaccaaccctacacgaaccaagatagatagaaaccttctccttcttctgcttcttttatcatcgaagaattcgaatcttcttttcctctttttgagattctctaattatccttttggaagaggtaattcgctatcttcttcttattcttcttaccaagtcgcataaatttctcttttttgggtctttccccgtatttatctgtaaattttgtttttagggttcgatttcatgccgattagattgtgttaacggatttttcggagtttattgatagttatttcagtttgaaatccattttaggggttacgatcgttgacttgtgttaagtctatttcaccaaatgtatcatttcttagtgtctcgatttttatcgaattatgctctcgtaatgaaacttcatcatcatgtagatgaaggattttactcttctgatacaaaaatttgttttttgtgaaaaaaaatctgtttccttttttgttctgcttaaaccctataattagaaactttcgtcgagcatttctctataagtttgtacagtttgctctatttcatttggggaagaaattagttacttctaaattttcgtatgttataaagtcttgttctgcaacaccattactgacgtttttgcgttatgaatatactgatacagtttcgtgtgagagagaagcgtaatgggctgctttggttgttgtggtggtggtgaagatattcgtagagtttctg

SEQ ID NO: 38384 - DNA, 4001 bp, Arabidopsis thaliana landsberg
  unsure (1)..(4001): unsure at all n locations
gcaaacccggaggtgcgaacgagaggaatccatctagtcctgagtttatgttatgaaacaaactcgaaactaccaaaggataccgatggagtcttaagtaaaggagtgtctgacagatatagaggcttacaggcatcacttgcaaacactcacgcttgagaggaccaaactcaacatcaagatccttaagtttaggcgtagccacaaaatctatccaacgcgtgacacaagacttgtcattcacatgctttagaatacttagcttgtccaagcatattttttcttccctatagaatctaggaacttgtgcatatatataacccacaaaggcattgtaatctaggaactctttagagtccaaatccaaaaaaaaaaacataaataacagatttcaacaaaatcaaaatccaagtccaaactgtttttgattttaatccaatctaaattctgatcacaggaaaacttaaaagtcatcttcacggtccaacaacctcgatttcacatatgccagagcgccttggcaatctaagaagatcccttaacacagcgtgattgtcttcttcaatggaacctttcaaacgaataacaagtctcttgaggatcacagagttctttgcaaagtacattgctagtttcatttcaataggcttgatagcaaaactggagtggacgtagcttgatagccccgatggacttactcacaaaataaaaagagaagtcctcataggcattgaaagagcgagtctttttagggtttcatgcctttttgtcgaacactcaagctctctctagtacacgcgtttgagagcgtttacaaagaaaggctttattttttctgtggtcatagtcagagctttccttagactttgaaaatgaagacagctgttgaaagcaattacgctgtccttgagatttcttagtacggagtttgaatttaagtcgctttcttcctcaggtggtagtataatggagatgaagaagacaatgttcatcgaaaccctctcgctcatctggagtctttatcgagaacgttcatactcaattctgtgttttggtttatattgggcttaaggcccacagcatgtcaacgagttttgactagtcctgagcacatatatggaaccgaaccgaacagaaccgaaattaatgggtttggttcggttcgggttctattgaaaagagtgattggatcttgattcaaagatccataggtataggtacggttcgggtaggaaccgatacccattcgggtacccgaaaatgaaagcccattagtcaatatatcttttataatgatagcccatatactcatatttcttttataacctatattcatttactaaactaaacctaacaacccttgatcgaatagcccataagcccaccatctatttctcttactaacctctgctctttctctcactctcagccgtaacctaatatttgagcaaccctagttctctctttctcaaagacgatgatagagactcctcgattcattgcaatttgtaatcgtatgattactaatatgtgatgttgcattgcatatttggataattgcttatgagttttgcattatcttctattgttttgtttcggtttcaaaaatacctgaaacacattgattcctactcggttctattgggtaatatccgaaccgaaccgagtaggatccgaaccggaaccaaaccgatctttgtttggttctaatatggttcctaaatctcagaaccaaaataataaggaaacctctttctcgcctggagtcttacaaggcataattctccgcgcgtaaaaattatgctatattgggccaaaggcccacatcacgttgaatgtaggtccaatttttaacgatgtcattttacgccaccgtctttagtgtaaagacatcaaagcgacgcgtatgtgacttagtcaatttctaactggagaccaaaagtcagagaggactgaggaaattcaaatctatacgatgatgattatcaatgatgaagaaagtagagtgtctcacaatttggttatcgaaatcttaagttttccatcttcaaaagcatctacgtatggctctttcttatcgcaattggttgtacgacgtgttcccgagcttcagcggagaagacgtacgtgtaactttcctcagccactttctgaaggagcttgatcggaaattgattagtgtattcaaagacaacgatatccagagaagtcaatcgctcgatcccgagcttaaactggcgattagggattcgaggattgcaatcgtcgtcttctccaaaaactacgctgcttctagctggtgccttgacgagttgctggagattgtgaaatgtaaagaagagtttggtcaaattgtaattcccgttttctacggtttggatccttgtcatgttaggaaacagagtggcgaattcggaattgtgtttgaaaacacttgccagaccaaaacagatgatgagatacaaaaatggcggagagcattgactgatgtagctaacatcctcgggtttcattcttccaactggtacgaactacgaatacttgatgaatctttacataatctggtgtgttatgaattatctttctttttttgtttagggataatgaagcaaccatggttgaagatatagccagtgatgttttggctaaactgaatttaactacaacatctaatgactttgaggggtttgttggcatcgaaggtcatatcgcaaagattagtttaatgttgtgcttggaatgtaaacaagtgaggatgtttgggatttggggaccttctggtattggaaagactaccattgctagagctctgtttagtcgaatctctcgtcatttccaaggtagcgttttcttagacagagctttcgtgtctaagagtatggaaatttatagtggaggcaacgtggacaactacaacgccaagctgcatttgcaaggaaagtttttgtctgaaattttaagagcaaaagacataaagatatctaatttaggtgttgtgggagagaggctaaagcatatgaaagttttaatctttattgatgatttggatgatcaagtggtgttagatgctttggcgagtaaacctcattggtttggttgtgggagcagaatcattgttattacaaaagataagcaattttttagggctcatgggattggtcttttttacgaagtgggtctcccatctgataaactagctctagagatgttctctcagtctgctttcaggcaaaactctccacctcctggtttcacagagcttgcttctgaagtttcaaaacgttctggtaatcttcctttggctcttaatgttttgggttcgcatcttcgagggagggacaaagaagattggattgatatgttgccaaggcttcgaaaaggtttggatgggaagattgagaaaatattaagagttggctacgatgagttaagtaataaagatgataaagctatatttcgtctcatcgcgtgtctcttttatggtgcggaaatcagttacatgaagctggtacttgcagatagtaacttgggtgttaacattgggcttaaaaacctagttgataagtccctcatacgtattgggtgtgacactgtggagatgcacagcatgttacaagaaatgggtagagaaattgttcgggaacagtccatttacgagcctggagaacgggaatttctggtggattcgacggatattttggatgtacttaatgataacactgtaagtgctcttttcataaccacctgatacaacttctacaactcttacagcatagtctgatctttacaactttttctcagggtacgaaaaaggttttaggtatatcatttgatatgtctgagattgaggagttgcacatacataagagagccttcaaaggatgcctaatctcaggttcttaagattttacaagaaattagggaagcagagtaaagaagccagattgcacctacaagaagctntgacagtttttccccctaactcaattactgagtgggat

SEQ ID NO: 38385 - DNA, 207 bp, Arabidopsis thaliana landsberg
cccaaaatttgacccttaaattccttttccccccttttcgggaattgggcctttttagggccccaaaattaccttttcaagccttggtttcgaaaatttttcaagcctcaaagttcgttaaaactaaaagggggattccttccagggggggggggacccacggggaacggtccataagaacttaaaaaatgattatttccaatggcc

SEQ ID NO: 38386 - DNA, 2647 bp, Arabidopsis thaliana landsberg
  unsure (1)..(2647): unsure at all n locations
ggtaataatgttacaatcatcaagcttaaacacactaacatcttcccggtcgttgaagtaaatagcattctccaaacatccatagtactcggaggctaagaccaaaaaacaattgtccgtcgccacaatgagtgccttgtctcccaaggaactgacctcaacccattctaccaaattcttgtccatcttataaaccttaaaacaaacggttctctcggtaagaactcgctttacgcaaaatttcttatagaatcgatgaacaacgcatagttctccacaatactccacgagtctcttttctttgcaattatcaatttcgtagaagtccactggagttgaaggtccgtattgatatatgctgagttcagataaactaatccaccaaattgctcctgttaagtctaatgcatagatttttcctttgagacgtataatattcaaaaaacctttagcttcttcattgttgattcttgtacaatgtctagattcttttccactcttgcaacaccaaatttcgtttttgaagccaactacaaaaaatacattgtctaggaaaacaactctatccgaatccgccaatactgagaatgcataattcaatccatccgctgatggcgaacagaacgtatatggatttcaggaagctacatcgagtttcatcagacgcttgagttgcagacatggatgcgagagcacacgtggcaagctaaggcggatgatgtggagagtcaaggatggaagctaacttggcgtggtgtcaaagacaagaatcaccgagaagatatggaagatatcgtcttgaaaaattaggaaggaataagcttggagaaaacaagaaagattccttaaaacgagattctcggagatcctaggtttagggttctggagagtaggtannnnnnnnnnnnnnnnnnnnnnnnnnnnnnnnnnnnnnnnnngaatactacgatacaatcttcagagcattacaaaagtttgaaggtgagtgtgtaattctctttgtcttcacgtgagagtgataagaaacagaggagagaattaggcttagatattcttagtcgggtttgatcttttgggtagaatagatcaagtaatctccgagataacatttgtaaataacttgttatcaataagaatatagttataagcaattctctgtgttgtgttgatctctataccctcttaattggtatcagagcggacacctgataaaagaagttgtgaatctgttcaacaggtgagatcttgcgacaagggaaggagaaagcacaacggttcattgcgatacctaagccactgaagctggatgctgagcattacgggtattggaaggtgttgatcaagcaatcgattcaaagtatcgacatggatgcatggtttgcagtagaagatggttggacgcctcctaccacaaaggatgcaaagagagacattgtttcgaaatcaaggactgaatggactgcggatgagaagacagcagccaatcacaactctcaggcactgtctgtgatttttggatctttgttaaggaataagttcactcaggttcaaggatgcttatcagcaaaggaagcatgggacattctgcaagtctcatttgaatgcaccaacaatgtgaagcgtactcgtctggacatgcttgcgtcagagtttgagaatctgaccatggaagttaaagaatccgtggatgacttcaacggcaaactgagctccatcacacaagaggctgttgtcctaggaaaaacgtacaaggacaagaagatggtgaaaaaatttctcaggagtctacctgacaagtttcagtcacacaagtcagcgattgatgtatctttgaactcagatcaattaaagtttgatcaggttgttgggatgatgcaggcgtatgatactgataaggaagaaattctcaacagctacgcaacctattttggtaccattgaagatgatgaccacacggttgaggaagatgctcagatgggaacgattaggagtctgatactgattcagagtgattctgaaaaagaaggaaaatcaggagctcatttctgaaaaggaaatcttgatggaaaaagtttctacacttgaaaggagcatggtgaagagagaatcaaatccaaggattggagaaacagctagaagaccaaccgagaaacatcaagatgctgagtagggggactaaagacttggacaagctcctgactgttggaagaacttcaaacgttacttggcgtcttggatatgatggatcaagttcaaaaggaggaacgcgttttgtcaaagggacaacttcagatgagaaatctaatgatatcaaaccagtaaaagcacaccgcaaggatgcaccctcgaaggctcgaaaggcgttgaccaggagtatgcctactcagaactggaggcagtcagattattaggttgatcacaatcatctgaagagcataagaacaggatgttggtattgcggaagtcagaaacactacagagctgattgttacagctgaatcgtgttacgcaagtcatacaccacaagcagcaccacaagaacgataagcaagggaatcaagtctacataaagaaagatgatctttatcgtaatggtggatattcatgtacctcaactaagggtatgaatagagctgttcttgattac

SEQ ID NO: 38387 - DNA, 18933 bp, Arabidopsis thaliana landsberg
  unsure (1)..(18933): unsure at all n locations
ctgatgcgtatgcgataacactccccttttgcatcagtacgcatcctagtcccactattgatgcgtccgtataaaccgtatatggctcaccttcctccggtaagaccaatactggtgcattagtcaacatggcctttaactccaggaagcttttctcgcattcatccgaccagttgaatgcggtgtcttttccggtcagtcgagacaagggttgggccatgctcgcaaaacttcttacgaaccttcggtaataccccgctagtccgagaaaactcctaatctcggtggcattccttggtcgtggccactcctttatcgaccgtattttctccggatcaaccgatactccttggtctgagataacatgaccaagaaaaccaacgcttctttgccaaaatgagcatttacttaactttgcaaatagctcatgttcccttagccgttccagcaccgcccttagatgttcttggtgagcttcccaagatttcgagtaaacaagtatatcgtcaatgaagatgataacaaactcgtctaagaaatcccggaacaccccattcatcattttcatgaaggctgctggtgcattggtcaatccgaatggcatgaccacaaactcaaagtggccgtaccttgtccggaaagccgttttcctcacgtccgttggctctatgggaatttggtgatatcctgaggccaagtcgatttttgaaaaccactgtgcacctccaagttgatccatcaactcatctatccggggtaaaggatatttgtttttcaccgtaactttattcaatccccgataatcgatgcatagcctaaagctaccatctttctttttcacaaacagaaccggcgcaccccatggtgagctactcggcctgatgaatcctttatccaacaactcctccaactgtttctttagctccgccatttccgccggtgccatccggtacggagctttagatatgggggttgtcccgggctcgagttctatcgtgaacgggtctgaccggtccggtggtacaccactaacggccgcaaacacgtccgagaactcgttgacgatcggaatgtctttcaactccgcactcgcccccacttccttggttgtgatcgtggctaaatatgcctcacaacctttcccgagcatcctttcagcctggattgccgagattaccaagcttcccgaggttgttcttattccttggaattttaacataccctcgtccctctcgaattgtacccgtcctcggtgacaatctatgtgagccttgtacttccccaaccagtccatccctaagataacatcatgtttctttagtggaacaatgattaggtccgcgggcatattgacaccgttcactacaaccgagatgccccgaacaagtccggtcggatacattgcctgtccgccggccgctcgtaccattccataatcggtgtttggttctttcctgaacccacctatttcaaccaattctggactaacaaaacaatgtgtagccccagaatcaaatagagtgtgcgttactacgtcacctactctcaaggtccctacacattcccttagaatgctgagtacctcccctttcccatatgcatgatgcaatgcaatgcagttattgaaataatgaatagggagttgtgagaacgtaccagtgatcgccctgaagtttccggcatcgttagcttcctccgacaactcataaactcgcggtgccacggcttgccgctttgggggaggcggcagtccatttcccccgcgattgtccctttgtccggcctgcttctccgcagtcaacttagggcactctcgctttagatgtccagtctttccgcaatagaaacaagtccttgtctcttcaccgagaaccttggactgccctggttccattctcgggcaactttggatcgcatggtccttgcttccacaccggccacatgcacctatggccttccagcaagttccgctgtggctcttaccacaggtcacgcattccccggtcttagcatcggacttagtgttatccaccttgtcaaatttccttttcttatccgcaggtttggtggattgattgttccggatcggtgctttctcccggttcaagtacctctcctcctcgatcccttcctcaatcattgctgccctttcaaccaattcggaaaccgagttgaatgtccggaccaaacaatggttgcggatctctatccttagtccacggataaatcggcgcacttgagcttgttcctcctcaagttcacgtcccacataacgccttaggcggttaaattcctcatcgtattcacgcaccgtgcggttcccttgaactaggtcgaggtacgcacattcaagcctatcccaagcctccggtggaaagtacttcttgttaaactcgtcttcgaaatccgcaaaggaccggacctcgtcccctctgcgtttctcgacggttaaccaccaattatgggcgtctccttccaggaaatggaccgcaatgtccctttggtaatcctcagggcagcgggtagacttgaagttcctcttgagtctactcctccactcatcggccacaatcgggtccgtactgcccatgaagtgtctcgtgcccagccttgagacatgttcgagaagactcagatagtctccccttttccgcccatgattcggttgtggattcacttccacaacttcctagtcatcgtccttttggttatccccttttaggaccaccggatcagctacaacggccttggtcaatgtggctagttgcgccatcattcccttcatcaaatcccactgttcttgggccgttggagtattgttccggttatccgtgatgtcccttgcaccactactctccggtgcttcctcattcatggacttcttcccggcctcaggtccggccgagtctgtcccatcgaacactgtcccgactctggttttctcgttgatcatcgtttcctcctcaaccaaagtctcctcgacaatgcccttgtccttcttactctttcccgttttgctgctcttacccatctgcgaaacctctaaagttaatccacataactcctagtaaaatcgcaaaagagtaaagaacaactaccgcgagattctcaagccgacgagtggtgataccccttaacccaacacctagtcctagaaccaagcatgctctgataccaacttgaaaggccccgatccggactgcctaaagtccgggcgagttctctcgacccaagccactaagtgactcggccctaaccgtttatgaggttctttcctagtctaatccgtttcatatgattccgagattcaatatatgagacgaatagagtaaacaaacaatcggacactttattaattaagcaaaggattcgatacaacctatgagtttgcatataagctattacaagtcatataatcgatccctagactatccgaactatcaccacccatcatcccggccttgagtctctcgcgcctaagccaagtccttcccacgatcaccattcgttcctgaaagtcatagagccataagtaatcttatttacttaatcatatgtatgcaagtccatgcaatgctctatatgccatacactactcggatccgtggagagaattcagagaggggaagatcgcgcatcagtccggccgattctcggcaggtcagttaagacccgccggtcctccgccgagccgcgtccccgcctcagccgatccctacccggaccgagtcttgtgtaggatgcacatgacccggatactactcagccctctagtcggtcctttcaaggatccgactactaattcacatcctagaacccttagactcaaagtctaggatcccttaccttccttctcgaggttaggtcgatccgaccttccttctttattgccggccacagcccggctaccgaatcctaagactatttattctcccaagagggagagagttttaatggtgagttttcttgtgttttcggtgtgttgtggtgagtggaatggtcctgggcgcccttccttatatagggggcgaatggatgcttcccgaatcaacacatccgttccttgcacctttccgaagagttgcacctttccgaagagttgcacctttccgaagagttgcgcccttccgaagagttgcacctttccgaagagttgtatctcttcgcccataaccgcccagttcgtccgtcactcgcccatctacctcgagctcgtccgtcactcgtccagctacctcgagttcaaccgtcactcgtccagctgcctcgagctcgtccgtcactcgtccagctgcccgagctggactgtcactcgacctgagtaaccgtcactccttccagctgagcttgagctttgggcgagctgacccaagtgatttctttacgatcctagcttagcctgcatgatttcccctttgtccgagcttatggccagctccttctcacttgtccgagactccaccttcctctctcggaccaagtcctagccaacgatcctattgaggatcgcgggcgttacaagtctcccccccttgaattggattcgtcctcgaatccgcatcaagttgatctttacccatctccttgaaccactccggaaaattggccttcatcttattctcggtttcccaagtgtattcctcacggcctccacaattccacaagacttttaacaaatcccttgattttccccgagtccctttcgtcattcggtccatgatccgtaccggccatgcttccaccgtcatattttcctttaacccgggaggtatatcttccacgctttcttcttgatcacttaaacacttccgtaattgtgacacatggaagacgttgtgaaacgcacttaatttgggaggaaggtcaagtttgtatgccaccgcccctactcgttcgatcaccttgtacgggccaacataccttgggcttaactttttccttgaggtgaatcgccctgcccctttgtaggtcatcgcctttaagtacaccaaatctcctacttggaattccaattcctttcgacgtttgttggcgtagcttttctgtcgatcttgggcttcctttaacttgatttttaagaacttcattctctnnnnnnnnnnnnnnnnnnnnnnnnnnncaaacaaccgacgttcgcccacgggcgtccaacacaacggtgttctacaagctcgtccatacaacgcctcatagggagacataccaatactagcttgaaaactattattgtatgcaaactctactaaccttagatatttctcccagtttcctccccaatctaagacgcatgccctcaacatgtcctcgagggtttgaatcgttcgttcggactgtccgtccgtctgtgggtggtaggcagtacttaggttcactcgagttcctaaggccttttggaaagccttccaaaactttgacgtgaaccttgtgtctcggtctgacactatactaaccggaatcccatgtaaccgcacgatctcgtctatatacttctcggcaatgatttctgctccatccttatccgagatcgccatgaagtgcgcagacttagtcaatcggtctaccacaacccataccgcattgtgtttggacttgatccccgttggcagtccggtgacgaagtccatcgttatgtggtcccacttccattccggtataggtaggttttgtaacaacccacttggtacttgatgctccgctttgaccagttgacaagtcgggcacttggccacccatctggccacgtctttcttcattcctacccaatggtagtaccttttaaggtcgcggtacatcttgttcgacccaggatggattgagaacttcgattgatgggcctctcttaggatctcctcctttaatgccctatcgttcggcacacatactcgaccgttcaccacgattgtaccattgttcgaggtttggtactcggtcttattgtttagtgcccatccttttatctcctcatcccgttcctgagccagccggatcctactaagcaggtcggcctggtcggcggctcccaaccctaagggttcaacttctttagacaaggcattcacttgcaatgtccccatcatgttaaccaagtccacttggctccgttccgcctcaacttccgagcgcctcctactcagggcgtcggcgacttggttggccttgcccggatggtacgctatatccaagtcgtaatccgccacaagttccatccaccttctttgccttagattcaactccggctgggtgaatatgtactttaggcttttgtggtcagtatagatttgaactttagcaccatacaagtatgatcgccaaatcttcaaggcaaatactaccgcggccatttccaaatcatgcgtagggtagttcttctcatgtttccgcaattgccttgatgcgtatgcgataacactccccttttgcatcagtacgcatcctagtcccactattgatgcgtccgtataaaccgtatatggctcaccttcctccggtaagaccaatactggtgcattagtcaacatggcctttaactccaggaagcttttctcgcattcatccgaccagttgaatgcggtgtctcttccggtcagtcgagacaagggttggggccatgctcgcaaaactccttacgaaccttcggtaataccccgctagtccgagaaaactcctaatctcggtggcattccttggtcgtggccactcctttatcgaccgtattttctccggatcaaccgatactccttggtccgagataacatgaccaagaaaaccaacgctcctttgccaaaatgagcatttacttaactttgcaaatagctcatgttcccttagccgttccagcaccgcccttagatgttcttggtgagcttcccaagatttcgagtaaacaagtatatcgtcaatgaagatgataacaaactcgtctaagaaatcccggaacaccccattcatcattttcatgaagnnnnnnnnnnnnnnnnnnnnnnnnnntggcatgaccacaaactcaaagtggccgtaccttgtccggaaagccgttttcctcacgtccgttggctctatgggaatttggtgatatcctgaggccaagtcgatttttgaaaaccactgtgcgcctccaagttgatccatcaactcatctatccggggtaagggatatttgggtttcactgtaactttattcaatcctcgatagtcgattcatagcctaaagctaccatccttctttttcacaaacaaaaccagtgcaccccatggtgagctacttggcctgatgaatccttgatccaacaactcctctaactgtttctttaactccgccattttcgccggtgccatccggtacggagctttagatatgggggttgtcccgggtttgagttctatcgtgaacgggtctgaccggtccggtggtacaccactaacggccgcaaacacgtccgagaactcgttgacgatcggaatgtctttcaactccgcactcgccccaacttccttggttgtgatcgtggctaaatatgcctcacatcctttcccgagcatcctttaagcctggattaccgagattactaagcttcccgaggttgttcttattccttggaattttaacataccctcgtcccactcgaattgtatccgtcctcattgacaatatatgtgagccttgtacttccccaaccagtccatccctaagataacatcctgtttctttagtggaataatgattaggtccgcgggcatattgacaccattcactacaaccgagatgccccgaacaagtccggtcggatacattgcctgtctgccggtcgatcgtatcattccataatcggtgtttgattctttcctgaacccacctgattcaaccaattctggactaacaaaacaatgtgtagccccataatcaaatagagtgtgcgtttctacgtcacctactctcaaggtccttacacattcccttagaatgctgagtacctcccctttcccatatgcatgatgcaatgcaaatgcagttattgaaataatgaatagggagttgtgagaacgtaccagtgatcgccctgaagtttccggcatcgttagcttcctccgacaactcataaactcgcggtgccacggcttgccgctttgggggaggcggcagtccattgcccccacgattgtccctttgtccggccggcttctccgcagtcaacttagggcactctcgctttagatgtccagtctttccgcaatagaaacaagtccttgtctcttcaccgagaaccttggactgtcctggttccattctcgggcaactttggatcgcatggtccttgcttccacaccggccacatgcacctatggccttccagcaagttccgctgtggctcttaccacaggtcacgcattccccggtcttagcatcggacttggtgttatccaccttgtcaaatttccttttcttatccgcgggtttggtggattgattgttccggatcggtgctttctcccggttcaagtacctctcctcctcgatcccttcctcaatcattgctgtcctttcaaccaattcggaaaccgagttgaatgtctggaccaaacaatggttgcggatctctatccttagtccacggataaatcggcgcacttgagcttgttcctcctcaagttcacgtcccacataacaccttaggcggtgaaattcctcatcatattcacgcaccgtacggttcccttgaactaggtcgaggtacgcacattcaagcctatcccaagcctccggtggaaagtacttcttgttaaactcgtcttcgaaatccgcaaaggaccggacctcgtcccctctgcgtttctcgacggttaaccaccagttatgggtgtctccttcaaggaagtggaccgcaatgtccctttggtaatcctcaaggcagcgggtagacttgaagttcctcttgagtctactcctccactcatcggctacaatcgggtccgtactgcccatgaagtgtctcgtgcccagccttgagatatgttcgagaagactcagatagtctccccttttccgcccatgattcggttgtggattcacttccacaacttccgagtcatcgtccttttggttatccacttttaggaccaccggatccgctacaacggccttggtcaatgtggctagttgcgccatcattcccttcatcaaatcccactattcttgggccgttggagtattgttccggttatccgtgctgtcccttgcaccactactctccggtgcttcctcatttatggacttcttcccggcctcaggtccgaccgagtctgtcccaccgagcatcgtcccgactctggttttctcgttgatcatcgtttcctcctcaaccaaagtctcctcgacaatgcccttgtccttcttactctttcccgttttgctgctcttacccatctgcgaaacctccaaagttaatccacataactcctagtaaaatcgcaaaagagtaaagaacaactatcgcgagattctcaagccgacaaggggtgataccccttaacccaacacctagtcctagaaccaagcatgctctgataccaacttgaaaggccccaatccagactgcctaaagtccggacgagttctctcgacccaagccactaagtgactcggccctaaccatttatgaggttctttcctagtctaatccgttccatatgattccgtgattcaatatatgacgcgaatagagtaaacaaccaatcaaatactttattgattaagcaaaggattcgatacaacctatgagtttgcatataagctattacaagtaatataatcgatccctacactatccgaactatcaccacccatcatcccggccttgagtctctcgcgcttaagccaagtccttcccacgatcaccatttgttcctgaaagtcatagaggcataagtaatctcatttacttaatcatatgcaagtccatgcaatgctctatatgccatacactactcggatccgtggagaggattcagagaggggaagatcgcgcatcagtccgaccgattctcggcaggtcagttaagacccgccggtcctccgccgagccgtgtccccgcctcagccgatccctacccggaccgagtcttgtgtaggatgcacatgacccggatactacccagccctctagtcgatcctttcaaggatccgactactaactcacatcctagaacccttacactcaaagtctaggatcccttaccttccttctcgaggttaggtcgatccgaccctccttctttattgccggccacagcccggctaccgaatcctaagactatttattctcccaaaagggagagagttttaatggtgagtttctttgttttcggtgtgttgtggtgagtggaatggtcctgggcgccctcccttatatagggggcgaatggatgcttcccgaatcaacacatccgttccttgcacctttctgaagagttgcacctttccgaagagttgcgcccttccgaagagttgcacatttccgaagagttgtatctcttcgcccataattgaccagctcgtccgtcactcgtccagctacctcgagttcaaccgtcactcgtccagctgcctcgagctcgtccgtcactcgtccagctgcccgagctggactgtcactcgacctgagtaaccgtcactccttccagctgagcttgagctttgggcgagctgacccaagtgatttctttacgatcctagcttagcctgcatgatttcccctttgtccgagcttatggccagctccttctcacttgtccgagactccaccttcttctctcggaccaagtcctagccaacgatcctattgaggatcgcgggcgttacaagtctcccccccttgaattggattcgtcctcgaatccgcatcaagttgatctttacccatctccttgaaccactccggaaaattggccttcatcttattctcggtttcccaagtgtattcctcacggcctccacaattccacaagacttttaacaaatcccttgattttccccgagtccctttcgtcattcggtccatgatccgtaccggccatgcttccaccgtcatgttctcctttaacccgggaggtatatcttccacgctttcttcttgatcacttaaacacttccgtaattgtgacacatggaagacgttgtgaaacgcgtttagtttgggaggaaggtcaagtttgtatgccaccgcccctactcgttcgatcaccttgtacgggccaacataccttgggcttaactttttccttgaggtgaatcgccctgcccctttgtaggtcatcgcctttaagtacaccaaatctcctacttggaattccaattcctttcgacgtttgttggcgtagcttttctgtcgatcttgggcttcctttaacttgatttttaagaacttcattctctccgtggtttcatccacgatcgtaggtccaaacaaccgacgttcgcccacgggcgtccaacacaacggtgttctacaagctcggccatacaacgcctcatagggagacataccaatactagcttgaaaactattattgtatgcaaactctactaaccttagatatttctcccagtttcctccccaatctaagacgcatgccctcaacatgtcctcgagggtttgaatcgttcgttcggactgtccgtccgtctgtgggtggtaggcagtacttaggttcactcgagttcctaaggccttttggaaagccttccaaaactttgacgtgaaccttgtgtctcggtctgacactatactaaccggaatcccatgtaaccgcacgatctcgtctatatacttctcggcaatgatttctgctccgtccttatccgagatcgccatgaagtgcgcagacttagtcaatcggtctaccacaacccataccgcattgtgtttggacttgatccccgttggcagtccagtgacgaagtccatcgttatgtggtcccacttccattccggtataggtaggttttgtaacaacccacttggtacttgatgctccgccttgaccagttgacaagtcgggcacttggccacccatctggccacgtctttcttcattcctacccaatggtagtaccttttaaggtcgcggtacatcttgttcgacccaggatggattgagaacttcgattgatgcgcctctcttaggatctcctcctttaatgccctatcgttcgggacacatactcgaccgttcaccatgattgtaccattgttcgaggtttggtactcggtcttgttgtttagtgcccatccttttatctcctcgtcccgttcctgagccagccggatcctactaagcaagtcggcctgatcggcggctcccaaccctaagggttcaacttctttagacaaggcattcacatgcaatgtccccatcatgttaaccaagtccacttggctccgttccgcctcaacttccgagcgcctcctactcagggcgtcgacgacttggttggccttgcccggatggtacgctatatccaagtcgtaatccgccacaagttccatccaccttctttgccttagattcaactccggctgggtgaatatgtactttaggcttttgtggtcagtatagatttgaactttagcaccatacaagtatgatcgccaaatcttcaaggcaaatactaccgcggccatttccaaatcatgcgtagggtaattcttctcatgtttccgcaattgccttgatgcgtatgcgataacactccccttttgcatcagtacgcatcctagtcccactatggatgcgtccgtataaaccgtatagggctcaccttcctccggtaagaccaatactggtgcattagtcaacatggcctttaactccaggaagcttttctcgcactcatccgaccagttgaatgcggtgtcttttccggtcagtcgagtcaagggttgagccatgctcgcaaaactcattacgaaccttcggtaataccccgctagtccgagaaagctcctaatctcggtggcattccttggtcgtggccactcctttatcgaccgtattttctccggatcaaccgatactccttggtccgagataacatgaccaagaaaaccaacgctcctttgccaaaatgagcatttacttaactttgcaaatagctcatgttcccttagccgttccagcaccgcccttagatgttcttggtgagcttcccaagatttcgagtaaacaagtatatcgtcaatgaagatgataacaaactcgtctaagaaatcccggaacaccccattcatcattttcatgaaggctgctggtgcattggtcaatccgaatggcatgaccacaaactcaaagtggccgtaccttgtccggaaagccgttttcctcacgtccgttggctctatgggaatttggtgatatcctgaggccaagtcgatttttgaaaaccactgtgcacctccaagttgatccatcaactcatctatccggggtaaaggatatttgtttttcaccgtaactttattcaatccccgataatcgatgcatagcctaaagctaccatctttctttttcacaaacagaaccggcgcaccccatggtgagctactcggcctgatgaatcctttatccaacaactcctccaactgtttctttagctccgccatttccgccggtgccatccggtacggagctttagatatgggggttgtcccgggctcgagttctatcgtgaacgggtctgaccggtccggtggtacaccactaacggccgcaaacacgtccgagaactcgttgacgatcggaatgtctttcaactccgcactcgcccccacttccttggttgtgatcgtggctaaatatgcctcacatcctttcccgagcatcctttcagcctggattgccgagattaccaagcttcccgaggttgttcttattccttggaattttaacatacccacgtccctctcgaattgtatccgtcctcggtgacaatctatgtgagccttgtacttccccaaccagtccatccctaagataacatcatgtttctttagtggaacaatgattaggtccgcgggcatattgacaccgttcactacaaccgagatgccccgaacaagtccggtcggatacattgcctgtccgccggccgctcgtaccattccataatcggtgtttggttctttcctgaacccacctatttcaaccaattctggactaacaaaacaatgtgtagccccagaatcaaatagagtgtgcgttactacgtcacctactctcaaggtccctacacattcccttagaatgctgagtacctcccctttcccatatgcatgatgcaatgcaatgcagttattgaaataatgaatagggagttgtgagaacgtaccagtgatcgccctgaagtttccggcatcgttagcttcctccgacaactcataaactcgcggtgccacggcttgccgctttgggggaggcggcagtccatttcccccgcgattgtccctttgtccggcctgcttctccgcagtcaacttagggcactctcgctttagatgtccagtctttccgcaataaaaacaagtccttgtctcttcaccgagaaccttggactgccctggttccattctcgggcaactttggatcgcatggtccttgcttccacaccggccacatgcacctatggccttccagcaagttccgctgtggctcttaccacaggtcacgcattccccggtcttagcatcggacttagtgttatccaccttgtcaaatttccttttcttatccgcaggtttggtggattgattgttccggatcggtgctttctcccggttcaagtacctctcctcctcgatcccttcctcaatcattgctgccctttcaaccaattcggaaaccgagttgaatgtccggaccaaacaatggttgcggatctctatccttagtccacggataaatcggcgcacttgagcttgttcctcctcaagttcacgtcccacataacgccttaggcggttaaattcctcatcgtattcacgcaccgtgcggttcccttgaactaggtcgaggtacgcacattcaagcctatcccaagcctccggtggaaagtacttcttgttaaactcgtcttcgaaatccgcaaaggaccggacctcgtcccctctgcgtttctcgacggttaaccaccaattatgggcgtctccttccaggaaatggaccgcaatgtccctttggtaatcctcagggcagcgggtagacttgaagttcctcttgagtctactcctccactcatcggccacaatcgggtccgtactgcccatgaagtgtctcgtgcccagccttgagacatgttcgagaagactcagatagtctccccttttccgcccataattcggttgtggattcacttccacaacttccgagtcatcgtccttttggttatccccttttaggaccaccggatcagctacaacggccttggtcaatgtggctagttgcgccatcattcccttcatcaaatcccactgttcttgggccgttggagtattgttccggttatccgtgatgtcccttgcaccactactctccggtgcttcctcattcatggacttcttcccggcctcaggtccggccgagtctgtcccatcgaacactgtcccgactctggttttctcgttgatcatcgtttcctcctcaaccaaagtctcctcgacaatgcccttgtccttcttactctttcccgttttgctgctcttacccatctgcgaaacctctaaagttaatccacataactcctagtaaaatcgcaaaagagtaaagaacaactaccgcgagattctcaagccgacgagtggtgataccccttaacccaacacctagtcctagaaccaagcatgctctgataccaacttgaaaggccccgatccggactgcctaaagtccgggcgagttctctcgacccaagccactaagtgactcggccctaaccgtttatgaggttctttcctagtctaatccgtttcatatgattccgagattcaatatatgagacgaatagagtaaacaaacaatcggatactttattaattaagcaaaggattcgatacaacctatgagtttgcatataagctattacaagtcatataatcgatccctagactatccgaactatcaccacccatcatcccggccttgagtctctcgcgcctaagccaagtccttcccacgatcaccattcgttcctgaaagtcatagagccataagtaatcttatttacttaatcatatgcaagtccatgtaatgctctatatgccatacactactcggatccgtggagagaattcagagaggggaagatcgcgcatcagtccggccgattctcggcaggtcagttaagacccgccggtcctccgccgagccgcgtccccgcctcagccgatccctacccggaccgagtcttgtgtaggatgcacatgacccggatactacacagccctctagtcggtcctttcaaggatccgactactaactcgcatcctagaacccttagactcaaagtctaggatcccttaccttccttctcgaggttagggcgatccgaccctccttctttattgccgggcacagcccggctaccgaatcctaagactatttattctcccaagagggagagagttttaatggtgagttttcttgtgttttcggtgtgttgtgtggtgagtggaatggtcctgggcgcccgcccttatatagggggcgaatggatgcttcccgaatcaacacatccgttccttgcacctttccgaagagttgcacctttccgaagagttgcgcccttccgaagagttgcacctttccgaagagttgtatctcttcgcccataaccgcccagctagtctgtcacttgtccagctacctcgaggtcgtccgtcactcgtccagctacctcgagctcgtccgtcactcgtccagctacctcgagctcaaccgtcactcgtccagctgcccgagctggactgtcactcgacctgagtaaccgtcactccttccagctgagcttgagctttgggcgagctgacccaactgatttctttacgatcctagcttagcctgcatgatttcccctttgtccgagcttatggccagctccttctcacttgtccgagactccaccttcttctctcggaccaagtcctagccaacgatcctattgaggatcgcgggcgttacagtaaacgtcctgtagtaagaggagtagttatgaaccctgtcgaccatccccatggaggtggtgaagctaactttggttggttaatccgatcttcaaagaatggatctttgtgagattctcaaagaacaacagaattctcaattaccgcggacggtgttcttgattgtattaatgagaaaataatgattttatcgtacaagtgtgttagaatatgagaaataggtgtttttgccttcaaagtcagagcgtttttgatagcctgaagtttagagcattttttgtacgtccccttttgtttgttctctggggtgcttttatagggtccgagactatcacctctcgcgatattctcggaagattcctctttatctttatcttgttggagattgtttttatcttccgaggattctgggatttctgtatccggtgatatcttcgaagattatctcttccggggttttcggaggtgaaatgttttgaacttacatcggctaagtcttttgaagtttttcctcgtctaacccgagacctttccgagccgtgattaagttgtcctcgggtcatgatcgggatgctcggtccgcggtattcgaagacaagctctcgaggcatcttggagcccgcctcgggacgatttgccaagttttatgcccgaggcgtttcgaggtcgggtcgggggaccactgctcatctcgtgttctcgacatcgcctaggtaaggattcttgacgagacctccgaggtgttttgtggtccggttcgggataattcatcgatggttcccgaggcggaggtgtggtcggctcgctatcctgggtgaaatccgaccccaacagtttcccccccagttcactgacttagcagaaaaatgagcttcatgaatggatttcccgagctgactgttcatcttcttaagtctacctttgtcgcttcatattcccggacggtcaaacttccgtcgcgtgccgccgactatttttgagaagtggaaacgtttctcgcttattcccgaggatcacgcgggtgtctcttctgccgagcccacgcactacaacgcgttttatttacttgttgcgtacccaacgcgcctccaaaaattctatatatacggcgagccattccttcaggagctcatttgaagttttcaangaaaaaaaacaaggtttgcttccttctctctgatcttgatatttctattgttctctcttttccggtgaagctctgccgtttctttgttatttatgatttttccggtttagaaattccttgttttctggtcgtttctcatctcgtcgagcatccccgagccgaaaatgagttctagccagtctcttttgatcccgagcgcctctctcgccgattccagtgactcgaatcatctagatgaccttccccccatctacaaacggagagcggtttggatgtcttctgaagatgatgctgagtcttcttcgagtgcccacgagcagatgatctcttttacggctcgggaagataccaatgccgatattgctcaggaattggatttgcccgatgatcccgagccgcctctcgttcggaggccccttgccttgatggccgacgaagacaagacgtccaattggcgagacgtgcccgagcccttaatgccgacgataaagattgaggactttctttatttctgcccgaacgagacggaagacattctgcatctcaacgagcagagggctt

SEQ ID NO: 38388 - DNA, 7739 bp, Arabidopsis thaliana landsberg
  unsure (1)..(7739): unsure at all n locations
caagcaccagcagctcaagatcctgaaattaagtcttctcattcaacaaatcattcaaggacaagctggtggggctatggcttttgacaagaagtacctgagttacacaacaagatcgattgttcttaccacgatctaaatgtcaagttcaaagcttagaattccaaaatcaagtatgtggagagtcaatttgcatcaacctctgctttgaagcatcctcagcaacttccaggaaaagcagtccagaatcctaaggactatgttactgtaaattctatcacaatccaccaagaagatgagtctccaccaaatcaccagactcccaatactaaggacagtatgattcaagaagggggggattcaactcaaattgctgcacctgccactcagcagttcatctggactatagagcacacacctttgctgaatactcaccattctggaaaaaagttcaaaagtgaaaaactcaagaaggatcagaatcaagagatgatcagcaaggcctctactcaagaaacatacaagaagaaagtcatccaagaaaagcttgatgatcccggttcattcactcagccatgctctctaggaccattgacattcaataggtgcctttgtgatttgggagcatccgttagccttatgcctctctctacagctaaaaggctagggattatggaatacaagttctgcaacttatctttactcttagatgacggttctgttgcacatcctcatggtctaatagaaaatctgcctgtcaagattggaaatgttgagatacctacagactttgtggtattagacgtagatgaagaaggcaaggatcccctgatcctaggcagaccattcttagcttcagttggagcagtcatagatgtcaggaatggaaaaattaatctcaaccttgaaaaaggtatcaagataagatttgacatcagcaaagcttcggggaaatcaacaacaagaggtcagaattttgggattcaggacatggatgttgataaagaaacagaagctggaaccccaccaagagttaactatacttctcaacttagcaagctgaagagaacttttgaccacaagaagagagcaatagaagggttagctcagactgaagatcctacagaagatgactggtatgaaatgagaaaaaaaaataaatggcaaagaagagtcatagagggattatcttcaagggtgatgaagctgaaagatcaactttggatgtttgaaaaaagagttaaaaagttttcaaatgagtattgaccaagagaagatggaaactgcactagctatcaaggaggacgaaaatttcacaacagaacggtttgcaccagaagatcagaaaggagttcacttagaggaaagaagtgtagagagtaagttgttaagtgaggaggaaatccctattccgacttattctccagaagtgcctaaacagcccaccaacccctatgctgaagaagaacacttgattttttattctgttgctgaacaactcttggagctctggatagaatacaaagctcaagaggatatcattggggagctaacttacaaaatggaaggactgaacaacaccattctggaacttcaagaaatgtttaaaggctaccccagttttgaatttgaggattggtcaaaggagccgggttcagaagaagaagactactctactgatcagaaagaagcttactttgaagaaaaatcaaatgagtactcatcctaccatatctcaagagaggatgcggagtatgattcaagcactgaaaattcaaccactgaagatgaggacttctctgttcctctctttaacctttttcctgactaagcactgtaagagtccagcttactgacttaaaacaagctcacttgggaggaagtcccatgtctatccatgtatataactttctatttttcttgttatttttgatatttttgtttaagtgttttaggtttattctattgacccttaggaagtcaacggtcgactaaattcaaaacaagtcaagaaagatctcaaccgttgatcgagtacaatgaggaggactgctttaagccattggattcggatgaccaaatgagaggnnnnnnnnnnnnnnnnnnncaattcccgaactcaacaaccgcatctctccgcctcccataccaaagaattctcgaatccttacaattctctctttatctccttcacttccctttcttgtcaaaaacttttcacaaattcatttgtttcctccatcattcaatctcctaacctactaaattttggttttgagtttctcccacttttgttcttgatgacgaactggcgctcgcttttgtcaaggattcggaacaaagctctctccccatcaaagaggtacccaacaccttcttcgcatgcagcagctcgaggaccttcagaaccatcacccttggggtcgagtaggagagatcaagcaagttttgcgatcgatcatagtgaatcaagaagaagagacctttagctctccagcggaaaatactcgatcccgaaagtcgagtaagctttctgcaagagaattctcgaggaacaaggcagatatcactcaagggaaaaagcccgtggggaggaggttggagctggtagatgaagactccgaggaagatatggcttcacccgaggaagatgatcaaacggagaaaggaggcgatgatgatttggaatcggagaaatgtgcaactcgaaatgagtactacaagctgctgaagcgcaatgagtttttaggaactcggtactctcatcccgggaccatggagagactcggcatctatgatgatgtagactacatgtttaagcagtgcagcctgaatattcacatgtttcggccaatggaggggtatgaggaagagaccattcagtttctttcatccgtggagttgctcttatatggagagtcagaggacgatgaaatcaggccagacggaagtttgggatacttggagttttgtgtgtatgatgtagagtatcggcttccaatagagcatctcgagctgatgtatggatttccaagcggaaaagacacgagtcatcgttttgacaagaaagagcttcagtcattttgggccacgcttgggtctaagcatgtattatcattctttaggaccaagagcaacgagataaggagtccggtggttagatactttcataggtccttggctagtgcgctatttgcaagagagcggaatggaacctttgttaatagagaactagagttgatggagatagtactgcaagagttgcttggtttagcatcagacggtacagttctagctagagatcagacagacacttcggtctcattctacctaatcgagcacctgctgagttacagaggatgggctaagggacttaagaaaccaggaagaatggttgtgggaggagttgtgacactaattctgagagcttgcaatgtacctctacattcaaagccgattcccccgagatggattgatatgcaacaccttatcaattccaagagtttttggtcgcagcagaagaatgacctatataagtataggttcgatcaccccacagcaggacaatatatttttctcctcccaaatcccgctttcacttcgattagagatggtggcaacattgagttttgcccaccattagagaacctctatttttcaggtgatgaatgttgtgccgatggaaggaatgaataatgatgagaccccaatccatcattcagataatgaggcagaaccatggacgtgtcttacgcaacacaacaattttactttgaggagtactccgcaccgagtcaaagtaaagactcaaaggaaattcacaagcgccttggtttcctccagagctggtgtatgttccacaacaaggctctcgcgacactcaacaagaagtttaacaatctccaactcaagatcaactgttcttcttcaactacaacaatgccacataacatgccttttgggagaaacggatccactcgtcatgaacctatgcatttcgatccgccttcaaccaccaagacagtcgtcatatgagccgagggaacaccatgctgcactttcaccaccaaggcaatcatccttcgaacctagagaaaggaaaagaggagcaagttgaaaaagcgaagaagaacaaggaaatcagatgctggagtaagccactctaccgcaccacttgaggagccactcgatcaacaacccgagaaaagggtcgagcatccagctaatccaagttcagcataacccgttccttggagttatacaaaggagagtatggatgattttgtctcctcctacttcacctgatcactgaggtaacaccacctcaaccattgtacataccattagctttttattttccttttgtgttgtttgttttggtcttgaattctctttcagatttttattacacaagggattgtgtaattgaagtttggaggagggttcaagacatgtttaacatggtgttctcttttcttatttcaaattttgcatcatctaaggatagaaaaaccataaaaatttgaaaaaatttcagaaaattatttcacaaaaatagagtgtcatgtagattgcatatcattttatgattgtatatagtgtgattgcatttaggattgctcatttgcataggggatgatgatgatttcaaaccgataagcatgttttgattcaatgaagtaagttcaatgctcaagttgttaaatctttgttgcataaccgattgtatctctgaaataagaccgcaccctgctttgaatttgtaacttgactatactactttgatcgaaactagcttatctgatgccattccctatctactagaacctcaactgaaattgcaattatcatgtctatgcattgtctgtgaactcatggctaccatatacatacttggattatcttattcacttcaccaccctctgttaatccaagtagctgactctcatttttagagcagtttctcatacccttagcctagccttatttcaagccaaagatcatttgtgtgtgattatgaggtctttttcaattgagcttggtataacgtgttaggtatgagccgacaagagcagtctttcatgtagacctagcccacgctttttgggttatctaggactaggtggagacttgtatttaggattgagattgtgtatggattgaatgggaatgagaatgagaatgaaaagaaaagaaaaaaaaaaagagagtaagagtttaaagttcttaagggggatacaaaaaatgttagtctagtaaagggtttggaattcaaccaagttaggcattgtgattcaaagaaaagggtaaagcgccctctatgctaagattagaagaaaagtcttaatttttgtcaaagtataaaaccaaacccgctagactcttgaatcatttttaaagaagaaccccttagaacttgaaccaaaaagaaagaaagaatgaggaaaagggtagagttaggacatctatgggacatggatcattttctgagctatcatactatatatcattgggtagatgggagtatattcttgtatgtgtccattgggttttacctttagcattctgctaaagctcaatcttttctctgagagtcccctgttactcgaccaaattattagagggaccatttttgtctcttagcctaagcccgaaaccaagtgagttcataaccatagcattgcttgatccactgttcgtgcttaatgaatgttaaagggaattggttgatgagaatgcttgaatagattaaggcaagttgttaggttgcattgtgacgagtatggctaacgattttaagtaagggtctatcatcttgcaacctagaattagctacctggacattgagcttacccgttctatatgcatgcttcgggttttgaatccccaccttcaaacctctccttcaacttaagattttttgtttgcttgagggcaagcaagagataagtttgggggagttgataacactgcattttactcattttaggtgtatgtttataataatttagctttgcatttgctcattgtatcatatcgttttgcaccattttagcttattttgcatacttagggatctaggatcatcttgcatacgcattgcatgttttggtgtgttttcaggtgcaaaaggagctaaaaaggacattactcgatccattcactcgatccaagcagctatagaagaggcattatttcactcgacctctttacttgatccaggcagctacagaggaggctgtagtttactcgaccctcttactcgatcaaggcagcctcaaatgaagcagcagattgatctactcgcccctcctactcgatcctctactcgacccatttactcgaccaagggtgaccaactctacaagacttgttgatctatcaaagcaacttcggatcctcctcattccccactcaaccagacatctgagcatacagataggagaggaagaatcatctactcgaccaattgatcagagcatagacacaaaggcgcagactttgcagcaccctctttactggatccccaagatcgagatccgcccaaaccgcctgaagtctcttttcttctagtgaatctagggtttcaacattttactataaatatatcactttgggatttgtccgaaggatctagcatttatcctttagtttttctttgtctttataaatcttgaaaacttaattactcttaatctattttgtttttgcatttagttgttttagtaaagttgtttagcttgtttagatttacattttggtatgatttcagtaattgatgggtttgtgttatcgagaatgttgcttgagtactgattagggttcttgaggatcgattagctagattcgggtcttctctagtttagttaggtgattaagattaagttagaacccttctgcattcgcttggcccctatgcggttttcattggttaatgtggaaattcgatcatagacgtcttgctaaacccgtcttgctatatttcatatcaatccaaatccgtcccgctatttaaaaataatatttttttttactttaatgtgatgacattttttgtaaattcatactttataactcaaaagtactttaaaaagttacttcaatttttttaatatatataatgctatttttttgaaaattattatatataaatacttagtttaatcataatttgggattgatatacttgtgttttttgactaacttttttattattttaatagcctaaatttggggattttgttaacattatttgagtcaccaatatcagcttaatacatgtccaatttatttttaccaaaaaaagaagaaaatttcataaaaatcagggaagaaatttttagggagtgataattattttgtacaattgcaaatttaaaatgaaaaaatgtggattgggaaataattattgtttcaaatttttaaaatgttatgtaattatttttttttatagaaaatattgacgcatatattgtaatataagatttaattaatttattaacaattattgttattaatgctaattgatccttaaaaggaatgttagtgtgtagtatattgtaatttagatttggaaagatttaaattatttttgtgattttttcttgtagtttcctaaattttagtaacataatcgattttatatttagatttgaaaataaatttgtaaaacattaaatgtcagtggcatgacattgtaaataagttccaacttgaggaattatttgctaaaatagctg

SEQ ID NO: 38389 - DNA, 6694 bp, Arabidopsis thaliana landsberg
  unsure (1)..(6694): unsure at all n locations
tgtaccaatctgcaataggagaaaaggttgtgagaatttaatcaaaatcaaaacaactttttaccttatctatttaaaagaaatttaccaggagcctctgtccacatcctcttccttcccgagaacgaacgctcataagactcgaagtcaaccctaacgtagaagtaatattcttcccagttcttgaaattgctgactttaggaccgggaagaaaattatatttagggcggttattcattacccaaaatgcaggcgacctgatggctttcagcgtcgtcatttcttcgaaacaatggacgttcaccaggtaaccttcttcagcgccgaaagttaaagcagcaacaaaattgcagatcgccgccggcgtaagctgggagaacgccatacgacggcgattcagaaaggagatgatcagagacggaatcggaaaccagaggtgacactgtctgaagtaggcttcatacatacaaacataccctcgagggggattccatgggcgctcctcctctccgggaatcatgcaagtgagcgggcgatctccatagccacatagggcgaatacttccgcgacagactcggttgttgaaagggtctttttcgcggcgatctcggtgttccaatgaacaattgggtcgaggtcaaattcgacataatcctcatgaagtaatctcgcattaacttcagcctctgtatactgcggctgcgtgttgtaagcatcctccaggtcgatgagtgggtcgaactgagctaaaaaatccaccgaatcttcaggagcagcgggatgtccaccggaaccttcccgatctggctcatcaagcaacgtcggaatttcgatccgattcgatcgactagattgagcttcgtcacttggattcctggttaaccgagagtttcggcgaactaacgacgcttcactctcggaggaagaagaggacggagaaacaagaacagccttacccattgtcagaaaaatcgataaagaatcgagaatacaaaataattcgtagaggagagagcgaaagctacctttgattcttcttgcaagcggcggaaaatgaattctcgagggtttggtcgaatataaatagtaaggaatgtgcggcaaacctataaggtcatcattaaacctacgggacgcttggttcctgagcttcacgcgcgcgtacagacgcgaggttgtgacacgtgtcaaacgcgttcggagatacgaatcgattgggagatctaatgatttattcacatattccaaggtttgaaccaaatattcgttttctaagtttggaaatttcaaattaggcaactcggattctcagaactggggggggggactaattgttggtgcaggaattggcacctccgacaataccggtttaaaccggagaaaaatgtgaataaaatcgagaactcgatttaaccggggtaccccggttagcctgttaatgggcctaagttacgagatcgccagaagacctaattcgacaattgaagtcgcccagccgaattcctaaaccttgcaaagggaagccttccattttgagagaagaggatcttgtgaagaatagaagtaatgaagttttaggtcctagataattagaagtttatcatattttgatatgatcagagcattgtataaataaaggggttttgtcctctattcgaattatcttttgacctaatactaagcactacttttctcagagcaaaaccctaccttttactcaagcaaccttgttcatcttcttttaattactatagagccaagagagaagtaaatttatctaaccccttagtataaattcattgtttgatttacagaatcaacaggtcccatttttgttttttgtggtggtgctataggcacatatacctcacatcaaaaatgtggagatgagataaatttggtacttgaccataagtcatttgtaaaggggaatatacattatatgcgcttggtctaatctgaaccaaagttgcagcatgcaatatagcatgatcccgtatataaattgggagttttgttgtcaatattattggtcttgcaatgagttgcaaccttttaattaatnnnnnnnnnnnnnnnnnnnnnnnatgaacatgagagactggatgctctacatcgattctcatcgatacacaatagtcattaaaggttcgcaaagtaaattctccagcattatcaggcctgactttctttatggcatannnnnnnnnnnnnnnnnnnnnnnnnnnnnnnnnnnnnnnnnnnnnnnnnnnaaagccgtattttgtgtagtcaaaagatatacatgtgatcatctattagatgcgtaaagttataccataaaatatcgaaacggcccgtatggtggggggattggcccacatatatcaccatgaattctcgacaagaatacaggtctttcattcccaactttagttggcgatagtcctattatgagttttccttgagaacatgttttacatgaaaactcaccagatttaaatattttcaggtttttcaatggatggccattagaattttgcacaatttttcgcatcatgactgaacaaggatgtccaagtctttcatgccatatcttaaatgtactagtaaactcacacgagtgattgtcactcgagtttactgtaacatctgatgcgattatatttatttttgtgcaatataatctaggggatagcattggcaattcttctaatatatattgcctctcggattttatgcaaagatattcaatgccatctttattcatagtctctatatgatatccattactttggatatctttgaaacttatcaagtttctatgagacttaggggaatataatgcatcatttactttaaaatgagttccccttggcattgtaaaattgactttgccaaagcctaatattatctttgcatggccatttatagtactcacgcttctagcggagtcatttatttcgagagaggagaagtacttttatctttaaagatagtgtgtagaagcactgtctgccagacatatattttcatcctcaatcgcgtattttgacataggctatccatatgtcataacatattttctggaataaatatatttattcataaaactttgacataggctatccatatgtcattattccagaattacaaaagcatctataatgcttgtcatgcatagcatgattatacatatggctataacatattacattgattttccattgtcatgatcaatcgagaaaatctgtcatatcaagatgattatcatcatcttggcctttaaaggaaagttccgcctcatcacagatgagattagtttcaacatccctttcttttgccttttgtgaggcttgatacagatcggctatgttttggtatatgacacgtctggtacaagtgtcctttcatgccgcatctgtggcaagtgctttcaacatgccttttcttaacacggccaacatcattcacatgaagaattttgttggttttttccgtgttgaaatcattgggatggaaacgtctttcttttcctctgccacgaccacgacctcgataatatatccctattttcactgattttacttatgttttagaaataggattttgagtctttatgttatttctcaaatttttttagtgtcttttcaaatattctatgcagtgggacaacaatggaggtaaggagacattttggagcaagagctaaggaaaaggaagctaaggacgattttggattcaggaatcagcgatgagtgtcgatcgacacattcttggtgtcgatcgacaccaatttcggcccagcaaagtccaagacgctttcaagtttatagaatagaaaaattatctcagaaggcttccctatttgcattattagttcctggacgtttttagggtttatatatattgtttagacctaagttttcatcatctagttttgatcataaagtttctatcaagttcttatcaagcttctgaaaacccagttactgagagacataagctattcatctattgttcttcagagattcattcagttcttaatacagtgaagagatcccttcttactcttatcttatttgatgatgttatgctttctatctctattatgttgtttgtttcaatcaatatgtctgagtagtttgcttgttaggaatagggtttctcattagggattcatatggtttagtagatcgcccccctgataggttatctgtagaattcttcatctttgattgtgcttaatgctagatctagagtaattaactagatcttgaatccagacaatagatatgcccaccatagatatatgtaggtggatctattatttgatgagcctggtttataggtgtgtaataagaatcggcctatttactagaatgaacaattgtactcgtttagattgcatatttaggttaataatctctcggcttctccggttattcttagctttaggcgtagagagttttgcggaacaccaccggttattccataattagagttcgagtttaaaaatggtccgataacaaactagctttcattagatctactaaccaatagtttcctgagaataccctgttccaagctcttcatttaatctgtcttttgctgtcttttcactttgttttcttatcatttcaatcataccttgctatcataatcttgaaattgcactcattgtttgaactgaaagaattttgtgtaattcgatccttaaatgctgcaattgatctcttatttgaaagagtggttcttagggtaatttgagctttatcacttgaaaggcagtatagccgatttccacgtaattgttttgttatcgcggccagttataatctcaaaactaagttaaatcatattcttataaaagttaaaagaagcaagggagcagataccaactgtgatttgtagtaaatttagatgatcaaagagcttggcttagggtagttctcaagaaatagatgaataatagatctagcagttaatcatgatttttagcgaactgttctagaactcaaatcactaccctaaaatcaatcaactcttgtctgttttcctattgcttaataaataggaatctcgactctcatttgtaaatccttaaatactaaaacatgcactataaacaggtttgataagttcacctaagcatttgaacaagatatattcgtatctcaatacttaatgtcatctatgatagttcaggtaataagcagcctctgagatcttacctatcacctatgatcaagttctagttagctactgtaaaactagcattaagaacaattaagatgaagaactctaaagatattcctaacaggttatcgatctactaaatcatttgaatccctaatgaaaaaccttattcccaacaaggagattattcagacatgaccatagaaacagaaaacatgtttgaataagattgcataaagaaatcaaaagaagaatacagtttagaaaaaatcttctctctacagggttttgaaatttctgatgaagtactttccaaaatctcaaggaattctagaggaaaagataaaacttagaatggatatgtaaaaggttaagtctaaacaataaccttaaaaatctatatataatgtctcaaaaacgtgcagggactaatagtacaaaaaggaaaatcttctggggcaaattttggaaacttcagatctttaaaccgtcagacttcttactaggccatgaatggtgttcatcaacactgatgccttttttagactgcaaattcgttttttagcttgatttcttcaattttgctcccaaatgctttataatttccaaatgcatccaaaagtataaaaaacctgaaaatgactaaaacaaactatagaaattataaaaagaatctaaacattatacttagattatacctgaaatcggcaaaattcgaggtatattaatatatttttttgttttgtgaaccgtattacatcaaatctggtgtaacaccacaacgtcaaatatacagttcggttagagcaagttttataatatatttggtgggatgaaaagtcccattggaattggtctaagcacatctttcagctaattgaaagggagatcaatttctcttgaattgtgtacttttttagagcaattgtgaagttggggaagatccatccgtgaatgtgataactccatactattcgtatgatgaaaatagatggatattgtgagagttttctgcttcgttgtttctaaacactatatataacttttaagttttggttttaaaagcaatatgaaaaataaaaacaccttttgttactattttctttcctattggcatttaatttgaaatattattatacacaagtaaaatattgtcaaaataattatgaagtcgaatcacaaaatattgactcttggaaggttataaatatgggaaacatacctcaaaataatcatcaaatccacgaccatatattaaatgttaataagcagtacagaacaagaaagggctacatcttttcatcttgctccctttgcacaagtatgtagagagtacggtacgtaatctcttacactctctctattttctttctcccaaaaattctctatctttttctttgttcagagagatcctacgaagtaggattctttctctgtcctatntcacccacgaaagtaaaaagaatagtgtttcaagttgaaacttaaagtcacaacatatacactcatcagtg

SEQ ID NO: 38390 - DNA, 5876 bp, Arabidopsis thaliana landsberg
tgagtcttgcagttctgggattggagaaaaactttgacagaaaagctttcttacaatcatcccaggtggtgattgagtcatggggcagattcttctcccagatatgtgctttgtcgcccaacgagaatgggaacaaacggagcttgaatccgtcttcactgacaccattgatcttcgttaggttgcagagcctatcgaattcatcaaggtggtcgagtggatcctccattggcaaaccatggaatttgttcccctgaatcatcgagatgagaccactcttaatctcgaagttgttattctggatagcaggaggtgcgattcccttcctctgacggtgatcacgtggtgcatctccagcaccaatgttggcatggccattttgttgattctgttcttcagccataacgagtggttgctgaggtacagtgttgactgtggttctcctttttctgatttcgcgggctgtgctgttgatgttgtcgttgaaaaggaggttctggttgcctgttgatcgagttcgcatacagtagaggtgtacctggatcaagaagacaacaagaaaaacacacagttagtaactaaaaagaaaattaaaaaagaacttgatctaagcaagtctgaaatcttaaatgtaacaaacaaacacccaattggcaatggcgccaaattgataataggtttttagtcaattatcctaaaacaccaatcatatcgttgtagtattttaggttgtcaatccaaatgggtgtgatgctagcaatcaagatgtgatcagaagtcactaagtcaagccaagcataacaggttttggtgtgttccagcagtcctaagtgaacatgcagaaaacagaaaatcaaacagaaacagtaaaacactcgaccaacacagctctttgcagagcactaggtgaggtcgagtaacagacagaaaatgaaacagggatactcgactgcacagtctgttgccagacaactgggtggtcgagtaccaggtcgagtaacagtaaagaattgcagaaactaagcaatagatgacaggatgtagtaaacagcagtagagtaaacaataaaatcaattagaccaagaattcctaaggatggggtaattgagtaatttcgtttcctcagtttacaggtgattgacatgctcaataaattaaccctagacaataagttcatcaaccaaatctaagtgccaccgcaacagagactctcaagctaacctagtcccagactcaatcaccattgacgagagctaacctaacaggcattacgaatcaacaagttaaagccaaaacgctccctgcaaccaataccttggtacagggtcacgaatctctggaattagtggttcagacatttcatcgaacaccttttgggcgaagaaatgtctgggctcaaattccagttgatgagaaagcaataggcattaagaacaactaatccagaagggatctatcaatcaatactcaatcacctagcatactgagaattctacactactgtaacccatgctgagaaacctattcactactcagacatcataacagaaagcataaacgttgaacaggttgaagacatgataacagcaatgtaacagcagtatgataacagaatgaacaacagtaaacgaaaatcaagaacagaaactgaatactgaatactgaatagataaagagaaatccggattacaaaaattctagaacacaaggtctgcggaaataaaactaggtaaaaaacttcttgtcctgcgaaaatgagaagtacatgctacttatagccaaatatcccgaaaccctaatactcaaaacgacgaagtatttagacgggttaagaactgtactcgacccaggtggtcgagtgagaggtcgagtgaatagctgaagtcttcttttcttccttgtgctcgagtgtctggttgagtgcggaatgaagaaggctctgaagcttgtcatcgagtatgcagtcgagtggtgtgatggcgatactcgacctctaggtagagtgaagaggtccagtggttgtctggtgatggaggtgaagacactcgacctcatggtcgagtgaagcgatcgagtgatggagacgagggcgctcgacctcggggtcgagtggtgaagtgaagtagtgatgtcctctactcgacctcgtggtcgagtggtctcttgagatcttgaagctcctactcgacctctgggtcgagtggtttgtcatgatcaggtccgcttcttccagatagctcgtcaacagctccaaatcacctgaaatcaacgcaaatatgcaacatgcatgcaaaactatcctaaacatgcaaagtgatgacaaatgatgtgaaatggtataaaacagtgctgatatgatgctaaagtgatgacaaattgatgctcaaaacatgcaaaatacacacttatcaactctcccaaacttagtctttgcttgccctcaagcaaacaatcaagaacaagctggaggtgaggtttgaaagcggggactcagagccaaagcactagataaaccagatgaaatcaatgtccaagttgaaagttctaagctgcgagatcgaattctacttaaaaacgttagccatgcctcattaatcaatcaatccgactcatatgctcgacctacataagttttcaaatccaccaatccctttaacattcattagttctggaacgtgaatcaagcaatgcatcatcaaagaactcatttggctaaggtaaaaggtcaagacacaaagatgatcccttacagaataggcttcagtaaaaatgattattagaatgctaaaggtaagtcccaagctatgcatacagagataagatcccatttacccagagtatatcaaatgaagctctaatggtaatcccatctcccatctcaatacaagaactagactttaccctttgcattcatgaattttttttttagccctttttcgaatcattcttttcttttctcttaactctaggagaagctttctcaacactttgatatatctagcggagttggatttctttaacaactaaggttcctgttttttaacattctaaagccaagggcttttgcccatcttcaatagctaacaagaactctttcttttctttacaaatcccaaaacctttactagactttttctgcttctttagcttacttcacctagagtcttttaccttttcttatcaatgaatcaaccccttttttttcttttaaacacatcccaaccgaaagttaagcgcccacctagtcctatctagtccgaaaaatgcgaactagaactacatgagacactatctctgtcgttacgaacctaacactttctaccaagcttaatcggaataaaacctcacaaacactcacaagtgatatagggcttgaaagaaagtctaggtttgggtttgggttaactgctctaataaggagagtcagctacttggattaacaagagagatcaaaatgaataagaaaatccaagtattttagggtatccatgagttcaaatttgatgcagacatgataattagagatcagattcaggttcaaattgatagggaatggtatcagatcatgatagtgtggtcgagtagagcaatctaggcatggttcagttttatttcaaattcattgactacgcaacagacaactagcaacgagggcattaagtttatccggtgaatcaaaatgcttacaaggctatctcatcatcatcccctatgcatatgaaacaatcataaatgaaacactgtacactcaatccaaaatgtaatgcaactaaatgaacaatctttttttgtgaaatcattttctgaaatttttcaatttttttggtttttctatgccttagatgaatccagactcaaaaatatatacaatgcaatacacacttcctgagccctcccccaaacttaaatcacacagtccactgtgcgaataaacttggaagagagtactcaggacaaatccaatcacagaaacgaaatgaagaaacaaatcacaacagatgatataatacaatggtgaagtgaggcgcgtacctcaatcgaagaatgaacgtagttgctcgtcaatggctgcctgtgattgctcctaggccatagaccaaccgccctgttctgtctcagctccagcatgtgggtactcgacctcagtgcctctatggcggccagcaccgccatgagtatactcgatctccttccgtggataagctaaaacatggtcgagtatccttcattgctctgtgttcgagtatagtgttgtactctcagagccagaatccacttcactcggctctttatacttatctcttgaagacactaaccaaatgcatcaaaagtaacaaggaaaaataaagatatgtacaaagatagacgtgtgatttccttccaagtgagcttgttttaagtctctaagcttgacttctcatactcattaggcttagggtgggtggcaaagaggaaatgaggcatcctctccttcttgagtagtgtgatcatcatactcattaggatttttcgataggtctgcaattgggtactcagtggccatgtcctcacagtaagcttcttttttatcaagatagtcttctcctctagaccattccaatgtgaattcacatccttttttgctgactagaatagtggctccatcgtcaggggcgtccttgatgttgagtggtactcgattggcttttccattgagctccttgatttgatccttcagctctttcacaatatgtgttagctgttgtatggccttgtcctgccatttagatctctccttgagttctaaccaatcatttgacgtgtgagtgcttgccatgagttgttcggtcgagcatgagctttcaggacaagttggaggcttcttcgagttgttggtggaatcatttggttgagcatgtgttgaacttacttcattagcttttataatcttcgtgtcaaactccatcaagcccttgtaaacctgtgagccaactgctgccttgtatgattctaatgacttctcagaactcaaagtttcactagggagatacccaggtttaccactcttagtcaaaacagttttttaattatttgcttctttaagttcctcttgcagttcaccagctagccgatccacttccttaactaagaaggtctgttcttctattgtcggcttcttcatagcatcattgatatcaaacttcatttcaaaattcttccccagattaagatcaatctttccttgcttaacatctatgattactccaactgtagctaaaaacggccttcctaatatcaagggatcttttggttcttcatccatgtttagcactacaaagtctgtaggcacctccacatttctaatcttgataggcaaatcttctaataacccatgaggtagtctaacagacctatcagccaagatcaaggagatattgcagtttttatacttgttgaaaccaacctcttagctactgagagtggcatgagatttactgatgctcctaggtcacaaaggcatttattgaaagtcaatgaacctagggagcatggtagagtgaatgaaccagggtctcctagcttttctgggacatcgttctcttgtatgatggcactgcactcatggcttagaactgttgttttttgaacctcttgaattctctccatgatcaagtctttgaggaacttttgggaatccgggatacgcgttagagcatcagcaagaggtatccttaattcgacttccttgaagttcttggcaaacatagctctgtacttatcttctaactctttcttatgtcgaccaggaaatggaagtgggggcttgtaaggatgacaaatgaagacattttctttgtttttgacagcaacatgttttggagcagttggtgatgtt

SEQ ID NO: 38391 - DNA, 6001 bp, Arabidopsis thaliana landsberg
cgcgagacgcgacatgttaaagccctatataaagaacttctaaaggagagaaaaaggactcgctcaaaaacgctctcaactttaggctatcaaagacgctctgactttgaaggcaaaaacacttattttcaaattctaaaacacttgtacgatcaaatccttactatttcattaatacaaccaagaacaccgtccgcggtaatcgtcaattctgttgttctttgagaatctcgcaaagatctattctttgaagaaacccttaaaacaatttctattgtgcgagttttgactctcacaatttggcgctagaaggaggggattcgagatttctcttactcccggaacacagaaccaaccacctaatccacaatggtcaacaatcaaatctccggtaacacagttgatgcagagggaaacccaatccctccaaaccagacagacgttcctgaagccgctgctcccgcgaccctaacagaactaagaagtatgatggctcaacttcagaagaaagtgaacgattaagaacaggcaaaccgatccttggcacaacaactcgaagcagctacctcccaaggacagatcaagactacccgtttcggcgcaaggcatctttaggatcgacgaacagcagcagatctcaacctaacacgactcgtgttccacacgcctggcaatactacaagtcccgtccaccgaaccgcaccggaaattggaagagatcgaaccgagccggcaatcttgggaaatcgggaaacgaatctagcggaaggaaatgatccgcaactccttcctccccgagcagaaattgcccaggtcgattagatcggggtcttggacgatgaagattcagaagagaacgttcggtgggctgaggagtacgccagagaacaggaaataagcgctatcaagctctccctagccaaggcagaaaacggatgaagctcgtaagatcccaaatgcataacgcagtctccttggcctcgaacattgacggcattctggaagagtcccacaacacatctttcacacacaggatctccaacgcaataatctcagatcccggaaagctaaggatcgaatacttcaacggatcttccgacccgaaaggacacttgaagtcaatcatcatctccgtggcctaagccaaattcagacccaaagaaagagacgccggtctctgtcacctgttcgtcgagcacttgaaagggccagctctggattggttctcgagactcgaaggaaattctgtggacagttttcaggagctatcgacactctttctgaagcaatattcggtgttaatcgatcccggcacatcagacgctgacctgtggtcactatctcaacaacctaatgagccacttcgagacttcctcgcaaaatatcgatctaccctagccaaagtcgaaggaatcaacgacgtagcggctctctcttctttgaagaaagcactgtggtaaaaatccaaatttcgaaaagaattaaacttgtctaaaccacagacaatccgagataccttgcaccgagcctcggattacgtatcccatgaagaagaaatggaactactatccaaaagacacgaaccgtccaagcaaacgcctcgcatcgataaatcccaaaccagtgctccaaaccacaaaaagggcgctcaaggcgggacattcgttcaccatgaaggacgaggccgcggtcgaggcgaggcgaggccgcccgaggccaaggacgagaccacggtcgtagacgcggtcgagaatcctacacttggacgaaggatcaactcgcaggaaacgagcagaaatattgtgagttgcataagagttacggccatcatacttccagatgtcgtagcctcggagcaaagttggctgcaaaattcctagcaggagagatcggtggagctttaaccatcgaagacttggaagcggaaaagggtaaaaccgagcaggtcaatgctgtggccaatcccgagcaggcggcccccgcagcaaacttcgaaggacccaaaagaggtcgaggtaatcgcgaagcagacgacgatgagccagaagctgctcgggggaggatcttcacaattttaggagatttggctttctgtcaagacacggcggcatcaatcaaagcttatcaaaggaaagccgacgcgaatcataactggacgcggccatttaatgggccaaatgacgaagtaacttttcacgaaagcgataccaacagtttagaccgtccgcacaacgatcctttagtcattacactgacaatcgctgatttcaacatcgaacgagtcctagtcgacacgtgaaggacattggacatcatttttcttacaactctgcgagaaatgaagatcgacatgacgcaaattgtacaactccacgacctgtgctcggattccctggggaaactactatgactctcgggaccatcaagttaccagtccgagccaaaggaatatcaataatcgtcgatttctctgttaccgacgagccgaccgtgtacgacgcgattatcggcaccccatgggtaaatcagttctgagctgtcgcctcgacgtatcatctatgcctaaaatttcccacaagcgacggcgtgaaaacaatctggggaaaccagaaaaatgctcgcatctgcttcatggcatcacacaagctcaggaaccccgtcactgagtcgacggccgacgcgaatcataagaaggccaagcttggccgagctgaagaaaggtcaatctccgagcagttatagcagctaaagatcgaagaagctcgggaatctacgacaccaactcccgatccggtcatctcaatttgccttgacgacgcaaagcctgagcgatgcgtagaaatcggcggagatctgggagaagaactaacagctgaactcactaccttcctcaaagaaaacgtcaatactttcgcctggtcccctgaagatttgcccggagtaagtgttaacgtcgtatcacacgagctcaacatcgatccaactttcaaacccatcaagcaaaagaggagaaaattgggtcgggagcgagctgaagccgtaaaagccgaggtagaaaaattattgagaattggttccatcactgaggcgaaatatcccaattggatcgcaaaacccagtcgtagtaaaaaagaaaagcggcaaatggagagtctgcgtagatttcacagaccttaacaaagcttgcctaaaagacagcttcccattaccacacatcgatcgcctcagaacaagcgagaagtgcagcgcctaaccggaagagttgcggcccttaaccgtttcatctctcgatcaacatacaaatgcttagccttttacgatgtgcttcggggaaacaaaaagttcaaatggacgacccgatgcgaagaagcttttcaggaactcaggaagtacctagcaactccacccatcctcgccaaacccgtaatcggagagccactatatttgtatattgccgtatcagatactgcagtcagcggagtgttagtcctagaagacagaggcgagcagaagccgattttttacgtctcacagactttcaccggcgcggaatctcgctatccgcaaatggagaaacttgctttagcagtcgtaatgtccgcagtaatgggatccatgccactccgcgccatcttacacagtccaagccaatcaggacgtctggctaagtgggcaatcgagctcagcgagtacgacatcgagtatcggaacaaaacatgtgcaaaatcgcaggtcctagccgattttattgtcgaattacccaccaagaaggctcgggaaaatccactcgacacaacttggcttctacacgtagacggctcgtcatcaaagcaaggctcaggtgttggcatccgccttaccttgccaacgggagaaatactcgagcaatcattcaggttaaacttcgaggctaccaacaatgtggtcgaatacgaagcgctcgtagccggacttaatcttgctcaggggctaaagatagagaaaatccgagctttttgcgactcccaactcgtcgcaaatcagttcaacggagaatacacagctcgggacgaaagaatggaagcctatctgactcatgtacaaaatctagcgaggaatttcaacgagttcgagttaacaaggatccctcgaggagaaaatccatcggctgacgccctagctgctctagcctaacaatctgacccaagcctaagaagagtcattccagtagagttcattgaaaaaccaagcattgaccttggcaaagaaaatccaacccctaaaccctaacccctgaaccaaaaatcctaaacccgaaaccgtaaaccctaaaccgtaaactcttaaccctaaacccttaaacctaaacctttaaacctaaaccctaaacccttaaacctaaaccctaaaccctaaaccatagatcccaaactttaaaacctaaatcctactttaggcttccggaatccggttgcttttctagttcttatgctcaatgatacacaaagcatgtagtcatatttaactacaaatccgctaacaaagcttcttcttgattccaaaagctttgatggtgaagcatgaaggtcttttgagttttttggttctaccttaaacacgaactctaaaccataaaccgtatacccaaaacctcaaaacctaaacactaaacgcaaaacatgaaccttaaaccttaaaccctaaatcctactttaacttcctggttctttttgcgtttctagttcttagactagatgataaacataatatcaagtcttatttgactacagaaacacaaaccaagcttctttttgattctcaaagctttgatggtgaaaccgaagttcttaataagttttttggttttgaatcgtataacaaggaagcactactttactcttcgggatctcgttgaggttctagttttatattcaatcatacacatgacatctaaatgctaacccagattgatgtgatcatggaaagcacaaaggacatggaatttgatcaagtgcttgtagccgcggaagagcttgaagcagaggagcagcttgaacctgaggagcattttgaatcagaaaatgaacttataacggagaaagagtatgggaaagatgttatcttaacctcattggttttgatacatgatcatcaaatgggcatgtgtctcatttgtactctttttcccttgtcaagttttgtcccaatgggttttcttaacaaggtttttaatgaggcaaatgattcacattcaaatcacccatttgatgatccaaaccatggtataacattcaaaagttggttagaatatatatgaagtccagccaattttatgaccatcacaagcccaagaagagcccaaaccaagtgagtaatttgctggtcaagaggagtgacgaaaatagcatttcaagagtcatctttacagtcaaagagtcttttctattcaaattctatctttaatattatgttgtgtttctaggcagccttggagtatgttccaagacttgtctctttctcttcttttcttcttctctttataaactcatgtaatctcttatgagaacccatctatctttttatcaaaaactctcttttaaaaatagatcatagatccatttttgtatgtcgaattttgatcttttctcaacttatcaaaaggcttttccgcatccttttgtggcgtcattcaatccatcatctcgtctttcagtcgtgtgtcctttctatttcgggaatatccactccagatcttccaagtgccgaaattgggattgattcctcaccaggatcatatcaagtggtatcagagcacacttggaggttgagtcgtttctgtctgtcatcttgttttaattttcataattatttggtgtgtgataaaattgtgaaatcaactgtcacgggttcgaaaaagagtctagtattttgtaaaattgtttctagaatttttggaaaccctttgataatttttagcatccggtcaagtaaacggtcgtaattagggttctaggagagtttt

SEQ ID NO: 38392 - DNA, 14657 bp, Arabidopsis thaliana landsberg
  unsure (1)..(14657): unsure at all n locations
ttttttttgagaactacaaattttgtgacattagctatatagtttaggccaccaaatttacctttatttactcatattatattttatacgaatttaccacattactgaaaggcttaaagcttctattatttgaaataagaaaaatagtaaatatagaaaatacaatgctgcttcatacttctccaaatctgttcataacacataataacaaaaacaataatgataaatattaatacttaaaaagagtcataatattgtatatgatacatacatataagcatcacaaaaagcagctctatgagccatattaaaattttaaatgaagattaagcttgcgataaacttactttgatattcgacagaaacacaacnnnnnnnnnnnnnnnnnnnnnntggtggatttggttttgattctagacatttattgccacatttttcaggacatttttttttgtttagaaagattggattaagaaggcacagtgcaaagcatgtagtatagcaaataggaaaagttggttttacagtgattggagtagttgctatttcccttgattcaaccattagggttccaatcatcaacatcaccaccacaaatacacccattcttttgttctccattttatatgagtacaaatagttcttccttttttttttttcttgagaggatgaaatattatagaaggttatggaaaatgtttgtttattgtgaatgttattggagtacaatatgacttacttatatagagattgtggtatttaatttatattaggttagaatattcttaatcaacaacaaatttgtttagttttttggttaaatgagctgtcattgatttaatagggtttataaaagctactaattaataaccaaagagaatcaaagctgaacctttttgtataaaaacatgtgtttttctcttctgaatgtgaatgttagtgatattactaaggcatgcatgctttagatagagttacctttttttgtatgatttagatagagttacttcatatagagattgtgtaattttgtgtattagttatgaatttaatattctcatatttcaccaacaaatcagctgcaacatggtgagtaagtaacttgtttattcaaatctatcaccttgatcttaaatcatttttgaaatatccattctatgactatgtaacttattcattaaaacatatcattctatgactacaagttcaaaatagtcacagaatatttatatatttttatactgaaatgtaaatatctttatatatttatcctttttgttttaatataaatatttctatttatagtaacttatttctacatgcaacatttcaaaatatctttttaaattaaatatttatatgttgatttctatatatgtgatgccattctgacaaataaaaatattaatagaatccaattttaccgtaattgacatatttgtgagataattttgtttggatacgttttgcctaattctcaaatatatatggctgagaagcttaaaagatatatttacaaaattcttctatctctttgctatctctccggagagcttccacgaaattaccccggtggcagaagtgacggtggcaacagatgtggaagccaccgctggtcaccgtagcggtggctttcgtcctggcattacctcaatggccgtgaagaagtgaacatgtagacttgtccgcaacggatgatcggtggatggggttgagttgagtaaacgaatgctgcagaacattagatgctacgtgggatcatcgtagattcctatccacgctttattctttggacgattatttgctgttacctcaaggacgatattttaagtaaacattgcttccactcacaatcagaccaatagctttgacccgaagaagcaaaattctgctccgtctgcgacgtccattattcaagcatggtctgagattcgtgaatctctccaaaaccaaaactttgattcacgttaccttcaagctttcagagatttggttagctctaagtccactatccatgttgcagatccccaagcaaagctactcatttccatattagctttacgagatgtatctctttcatctgaggcttacacacttgttctcagacttctctatgtgtggattaggaaatcatttcgaccgtctcaagctcttgttggtttagcggttcaggcaattcgtggcgttgttgatgacatgcgtaatctccaaccagccttagtagcgcaaagcgttctgttctctggtgcgtttgcttgtgttccttctctgtcaggagacgtgaaagtcatgacaacaccgtggttgattctcgatcaatcccgtcaaatggaaagagagacacggctaagacatggccacatagaatctctgaccgggaagatgacggcgctgatgatcctgaccggaagtggatcggcggcggggagagacgcttggatggcgcacacggctatgggcgtttgttcagctctttaatggtggataccatgtgattacaaaagtagctcttaatgttggagtcaaccagcttgtcttctgtgtatgtcgtgatcttcttgctctctctattctcgctcctcttgcttacttccgcgaaaggtctcaacttttttttgtttcctctgtttttattagttctgaattctccccgccgtacgtcctatttgtttttcaccgaaatcataacatagaagctcataattggttctatagattttacactagtttttctattaaatttttgtcaaataataatatcataaaattttacataacattgaataatacttgaatttaatagaattaagaattcaacaagttgaataacactagaattaaaagtattttaagagaatggttacaaatacttatttcaataacacaagaatttaatagaatctacaaaacgtgaaaatgaataacactagaattgaaattctgttagattctattaatttccttcatccaacctaaatcctactttaggcttccggaatccggttgcggttctaattcttatgctcaatgatacacaaagcatctagtcatgtttgactacaaatccgctaacaaagctttttcttgattctcaaagatttgatggtgaagccaaaattcttatgattttttggtgttttgtatcgtttaacaaggaagcactactttacttttcgaaatctggttgaggttctagttttctattcaatcatacacataacatgtgctcatatttcactctaaaacgctaaccaagattctttttgcttcttaaagtattatagtatatttgctcctaaacactaaacctaaactctacaccataaatcccaaaacctaaaatctaacccctaaaccctaaaccctaaaccgtaaaccctaaatttagaaaattgccatttaccgacttcagtattacgactaccttagtcgctcacgagaatgaacaccctcactgtagtcgttaaacacctctttacgacaaataaacgactattaaatttagtcgctaatcgagagtcggtaaataacgtagtcgtattttagtcgtcaatgagcgactaagttacgactaagtttaggtaatcgcttttttagtgacattttagtcgttaaatttagagactatgtgacgacaaattaacgattaacttgagggttatgtagtcgttgtaggtaaattagtcgttaaaatttacgactatgttgtcactatatttaagacatatttgcgactaaaatatcctttagtcggaaattttagtgactaaattgttatcaataaacgactgcttggttacatttttgatgactaaatttgcgactattgttgttattagaacacctatatgattgttctaaagatggaaaccttcctgagaaaacaaaacattacaagaagcataaacacaatacaagaagcatgaacacaaatttattgtcatttcagaaaagtacaaaacccaaattacaaaaacatgttcgattcactacaacttagaactttgttcagcataagtacaagcaacacaagtacacatatataaaaactttgagccgtgatattgagtcttgaggaaggagttaagattcagacctatgaagcagatgaagagggagaggcagctggagagggtgagataggatatgtggttgtctccttagctgaatgagattcgaggaaattgaggaactgaggatcattttcgcgcaaaaacttctccactaaggacaagtgctcaagcttcttcttctactcatctgcagctcgggaattctcagcttcacgccaagcaatctcagattcacgcctttgattgtaagagacctgctcttctatcttgcgttgagcttcaagtaattgttcttgcaaagccacaaaagaagttgagtcacatgcttgcttccgcttgccattgacaagagactctttgaggcttcctactccataaggaacgcctctcgaatccctctcagtggactgcatagtatgataaaagctgagattagagaatgaaaaagacaactcgaaaacactaaattgggaaacataaaacgttacctaaataaatatggttgtacattcctcagctgtgagctcccgtgcccgcgaagtgccatctgaaacagcagaagcttcagcctcgagctcagactgcctcagttgcaaattcttctaatataactctgcaatcttctccgcctttcgatcaacatacgtcccatcaggttttgtatgtgttttgatgaaaacgtcaccaatactgacagttttgcccaattgctcttcctgtaatgaaaaaaaaaacaagtcatagaaaagtagagaaacatcagattaaagttgcaaaggagtaaacagagagaagacttaccaattcgtctcggatttgatgatatgacttagaccctgagaagtgtatgtgaggacctagaccgttacggtcagacatacgggcatttgaatagatttgacttctttcctgagcttcttcagtgtcctagtacgcagtcatttccttccatagagttttcccgatccatttaggtttctttcgactagttcttacaatgctaaccatgcctttcattcgccttaaacagatctcgttgaagtaaaactgaacagtccctgtgatcaaaggatcccaatggtgtgttttctacaaatagaaaaggtaatgtcagtaaaaaaaagaagtgtaatcaactatataaaagaagggctgaaagaacacttaacagcaaactcgaggaagtatttctcttgcctctcttgaggcacacatgtccagctgtagaagagaccatcaaacttgtttgtaaacactctagtgatattcctaacaagtcatgagtttgtgtcccgagtaaacctccatacacaagaaaaacaagttgttattatatgggagaaaatatctaaatatcagaccaaagactagcaaaacataaattatggctgcaaagtatcatacaaacagatcatatagagcagaacatagattgtggctgcaaagtatcatctagaactaaacttacacaatgacagacacgatactttgcagccacaagcagttgttctcgcaaacaacaagtagagtagagacctagacgacaaggctcttcaaacacattgcaatagattgtggctgcaaagaacatcaaaatatcaaagaccaaagaccaacacaacacgagactaaaacaaagaatcaattcagacattttctcaatctaatcaatctcacaaagctcattactcaactaaaccctaagatcaaaacacaacttaacaaaacatgttctcgcaaacaacaaaataagaccaacacaacaacactcttcaaacaacagaatagattgtggctgcaaagtaacatctataatatcaaagactttcagaccaacacaacacgtcacaaagatcattacccaactaaaccctaagatcaaaacacaacttaaactacttgttctcgcaaacaacaaaataagaccaacacaacaagactcttcaaacaacagaatagattgtcagatacatccataacatctataatatcaaagactttaacaccaacacaacacgaaacacaacaaagaaacaattcagacattttctcaatataatcaatctcacaaagctcattactcaactaaaccgacattgaacacaacatggcatcacaaacaagagaagaagaagatcataccatgtcgtatttggtcgaggaatgggagagaggacggtgacgaacttatccctctccggcaacataagcagatcatttagggattgaagtgtgtcctcctggagatccggtgacagaggtggatattcttcgaagttgttgccttgagaggatgggtgactgtgagctcgagactcttgaactagagaaggcggagggtcttgctgagaaggcggagggtcttgttgaggagtcggaggaacctgctgagtagtcgcggcttgagtcgctggattgttctgcacttctactgaggcagtcctttgcacttcaggttgtcgactgccagagtgctgaaacaactgtagaggcggcggatagttctgaacaggagctgccgttgactgtaaaggaggaacggaggcttctgttgtaggcgtctctagcttaggagactgttctgctgccggcgtgaaatcgtactgagacggaagagaacgaggtcgtcgaccagccgtggatgtggaggctctctgagcaaggttaggactggttcgcttcttttttcctcgcccaaacattgtgtgaaggagagatctagatgagacagaggttcaaatcaaagaaatcgaagaagaagaagagattaagaggaaaacaaagaggaaagattgatttggtagggttcgaagaggaaatcgaagaggaaatcgaagagagaaattgaagaataagactgcggatgtttcgaagagagaaagatatttttgttagggttttcgcataacaagtgaatggtttgggcctaaagggtttgagcctaaaaggttcagtttgtttaaacattagtcgcttaattgtcacaaattagtcaccaattttgggcctcgaaatttttggcccaataatattgttgtagtcgctaaattatcacaaattagtcgccgtagttgggcctcgagttattttggcccaatagaatggttatagtcgcgaaaatgtcagcaattagtcgctttgtttaatttttaataattgggtttgggccttgtgttttttcgggtcttagatattcaaaaatagtaattatatatataaatataattaaacataacatacttagtcaatatagtttttcaaaataatttaaaattgtttgcataacttttgaaaataacttaagtacatatcataattaatagaaataacttaaggtacatatcataaacacaaaactaatattgttcttcgccttcatgttcttcatcatcagaagacgataaattacataggaatcgatcttctggatcgacgtctccgacatcgtagtcaatatttattgggttgcaatcttatgtcaaattgtcgagtacaagatcttctattgttgttattaaaacatcatcatcattttctgtttgcaataaactcgggtctttattttcatattctcctaatatgtttccccttggatttacttttaaaatattgagccactcccgctttggttttttcatgtatggataaggaataaagcacacttgttacgcttgagatgttgtttgtaaatgcaccatatttggagaattagatatttgtatattaactagaaaaactaaatgaccatatatatataccatacgtacctaaaataaagggttcgtatttgtagtattttcttgatgaaagaacgtcgacaacaccactattgctcctccgagtacctctttcgagcttagggtcataccacgaacatttaaaaagtgttatattcaaactgaccaccccctcatactcaagttctatgatatcggttaagtatccatagaaatctgcggtatcagatgcatttgtgtaattttcacctttcacacatacaccatagttacacgtctacgtcttgcgccatgattttgtgtatgaaacaaatatcctctagtaaaatacattggccacgttttgaccttgtgcaaaggtccaccaactaaatctttaacccaaaaaggaaatgttaacttgtcgctccaatatgtaacctgcatatatatatgtaaacgaacatcatttatataaattaataagtataaataaatgcattcatatatacattaataaatgtaaacaaacatacatattctttcacccacacatgatattcttcagatcttttcgtagagagttctttttcagacattcctggatattttatagaaagcatatcctcgaacatactatacaaattaaaccaaaaaatatatgagaagtttcacaaatatgctaaatttttaaattaaactatatcatatacctttcaattggttgaaaataatcacaattgcgtannnnnnnnnnnnnnnnnnnnnnnnnnnnnnnnnnngaaagccatacttcatgcatttccccacttggacgaccaacgtgagtaaagatatttggtactccaggaacatgatacacaggggcttcaccttcattgaatcttgttaacctgatcgaaataaactatattaaaagtcatgattttttattcatagaaacttaaattaataagtatagatatttgattaccttgattttgtttgtatactgtcggcaaagtagtgctctgagaaataagcaatctcgtcattgatataagactcaacaattgatcctgccgcatatcttttgttcttcgcttttcctttcaactttttgaaaaacctctcaaaggatacatccacctatattggacaggactgcccggttctgcttcgtaggggagatgtataggcaggtgctccatatcatcaaaaaatgatggtgggaagatcttctctaagttgcatatgatcaaaacaatgttctgcttaagaatttgaatgcgccttttctgcaaaattctcggacataagtccctaaaaaatgcactaacccctggaaaaaaaatgcatcatctcaagtgcatatatgatataaagagtaaattatattcttattttacctgataatgcaaggtgaacgttccggtcgaggagttctgcaaagataaatgaaagtaactgctccataaaaatatggcaatcgtgactcttcatacctgataacttcccattctcaatatcaacacaactactcaaatcagacgaataaacattagggaatttgattgcatgtttaacacattgcaataaactcattttggcttcatttgtcaatgtataagctggaaatggagcttttcccttactatcaatatgtaagtcaggccgagaacaaaatcgttctatatccattcttgacattatgttgtcctttgatttacccttcacgctcataagagtattcattatgttatccaaaaaattcttctctgtatgcatcacatcgatacaatgtcggagattgagatccttccaatatggaagctcccataatatgctttccttgtgccagttatgttccttcccatagcctggcatcttcttttcgtgaccgttgccaccaacatccttggttcttggtggatttacaccagacaaccgctcgtaataaatttgctcaccggttaaagactcaggtggatactcggtagaagcgtcttttccttttcggaagtcttttttgttcttccgtaatggatgaccatgagaaagaaatcttcggtgacaatcaaaccagcacgtcttccttccattaggtagataaaaagagttagtactttccatgcaaattggacaagacagtttaccgtgggttgtccatcctgataacatgctgtacgccggaaagtcgcttatcgtccacagcaacactgcttttagattaaaattttgattcaaagacacatcatatgcatcgattccagtagaccataactcttttagctcctcaataagaggttggaggaagacatcgagactacctcgcgggtgatttggcccaggattcagaattgtaagaaacaagtactatgtattcatgcacatacccggtggtaaataatatggagtcaggatgacatgccacaaagaatgatttcgcgacatgccaaatggattaaatccatcagtacataatccgagataaacgttacggggttcttcggcaaacatgggatgtagctcttggaaatatctccacttcaccgcatttgaaggatgattcatttcttcttcttttgattggtgttcggtatgccaacgcattgcagctgtagtctcgtggctctgatacattctcttcaatcggtcaccaatgggtagataccacatacaactatatggcactttgcttcttcgacggtagtcatccataggcttccatctttgagcactacaaaaccgacatttatcttccttttcgtcttctttctagaaaagcatacaattgttaatacaaacatcgattgtataataaggaaggcctaaattgcgcataaatttttctgtcttgtaatggaaatcagtagcttggtttccttctggtaaaaaatttgtcaacatttgacataccgaatccgcacatctttgactcatattatgatccgccttgttgtgcatgactcgagctgctaacgataattgagactggctttcacgacaaccatcgtacaatggattttgagcaccttctatcaagtcgtaaatttttttagaatggttacgtaccggttcctccattttctgataagtaccgtcttgatgatagttatcatcaaaccccacgttataacgaaatgcatcgttcaccatatccacatatggatcttctacaacattacccacatctacatatggatcttctacaacattacccacactttcagaattctctcttacatacgttctatcaacataattactcgttcgtacattcatgttgaaatcttctccatgcttataccaaacataataatcaggcataaatccttgactaaacaaatgactactccttttctaccccagacgatatgttttttattcttgcacacagcacaaggacagtggaatttacctcgacaactttgtactataggctggctattagcaaatgtcaagaactcctccactcatgcgacgtaatataatgacaaattcaccgtcatttcatcgaacctcttgtacatccaatctcgattaaaaaaccgctactcggataattatagtttcccgccattataagaccaataataaaactaaatatatttttaacgttttttttctttaaaaacgttttttttttcttaaaggtattatttgtattgtgtttatgttgtgaatgaattttgtgtacgtgaaattttcattatataggaaaattttagagtgactaaaacacgactaaatagtgtagtcgtttaaaacaggtacaacaacttacaaaacgaaatacatgtgcttttttaatcgataattacgtctattttgcgactatatttaatgacacgccggagtaatcatacaatagtcgctagttaacgactattactgcgtgtcgtatataagtcgcaaaattgtgactaatttacgaccaattttggcgactaattacagcgtgtcatataatagtcgccttttagcgactactaaggcgtcacacctctatagtggtaatttggcgactaactaacgactatagtgttattagttgtaaattagtcgtataaatgtagccaaatagtcaccaaatataacgactatttatgtagtcgccagttgtagtgggtagttagctgttttcttgtagacccctaaatcctacaccctaaactaaaaacccaaaaccctaaaacctaaacccttaaccatagtccccaaactttataaccaaaatcttactatagcttctggaatctggttgcagtcctagttcttatgcttaacgatacacaaagcatctagtcatatttgactataaatccgctcaccaagctactttttgattctcaaagctttgatggtcaagtcaaagttcttatgagttttttgttttgaatcgtataacaaggaagcactactttacttttcgggatctcgctgaggttctaatgttatattcaatcatacacatgacatctaatcatatttcactctgaaacactaactgataagtgtgtattttgcatgttttgagcatccatttgtcatcactttagcatcatatcatcactgttttataccatttcacatcatttgtcatcactttgcatgtttaggatagttttgcatgcgtgttgcatatttgcgttaatttcaggtgatttggagctgttgacgagctatctggaagaagcggacctgatcatgacaaaccactcgacccagaggttgagtaggagcttcaagacctcaagagaccactcgaccaccaggtcgagtagaggacatcactacttcacttcaccactcgaccccgtggtcgagtgccctcgtctccatcactcgatcacttcactcgaccatgaggtcgagtgtcttcacctccatcaccagacaaccactcgacctcttcactctacctagaggtcgagtatcgccatcacaccactcgactgcatactcgatgacaagctttagagccttcttcattccgcactcaaccagacactcgagcacaaggaagaaaagaagactccagctattcactcgacctctcactcgaccacctgggtcgagtacagttcttaacccgtccaaatagttcgtcgttttgagtattagagtttcgggatatttggctataagtagcatgtacttctcattttcgcaggacaagaagttttttacctagttttatttccgcagaccttgtgttctagactttttgtaatccggatttctatttatctattcagtattcagtatttagtttctgttcttgattttcgtttactgttgttcattctgttatcatactgatgttacactgctgttatcatgtcttcaacctgttcaacgtttatgctttctgttatgatgtctgggtagtgaataggtttctgaggatgggttagagtagtatagaattctcagtatgctaggtgattgagtattgattgatagatcccttctggattagttgttcttaatgcctattgctttctgatcaactggaatttgaccccagacatttccgcgcccaaaaggtgttcgatgaaatgtttgaaccactaattccagagattcgtgaccctgtaccaaggtattggttgcagggagcgttttggctttaacttgttgatttgtaatgcctgttaggttagctctcgtcaatggtgattgagtatgggactaggttaacttgagggtctctgttgcggtggcacttagatttggttaatgaacttgttgtctagggttaatttattgagcatgtcaatcacctgtaaactgagaaaacgaaactactcaattaccccatcctcgggaattctttatctgattgaattctttgtttactctactgttgtttactgcatcttgttatctgtcgcttaatttctgcagttctttctagttacttgacctcatactcgaccacctagttgtctggcaacagactgtgcagtcgagtatctgtgtttcatttcctgcctgtcactcgacctcacccagtgctctgcaaagagctgtgttggtcgagtgttttactgtttctgtttgattttctgttttctgcatgttcacttaggactgctggaacacaccaaaacctgttatgcttggcttgacttagtgacttctgatcacatcttgattgttagcatcacacccatttggattgacaacctaaaatactacaatgacatgattggtgttttaggataattgactaaaaacctattatcaatttggcgccgttaccaattgggtgtttgtttgttacatttaagatttcagacttgcttagatcaagttctttttcaattttctttttagttactaactgtgtgtttttcttgttgtcttcttgatccaggtacacctctgctgtatgcgaactcgatcaacaggcaaccagaacctccttttcaacgacaacatcaaccgcacagcccgcgaaatcagaaaaaggagaaccacagtcaaccctgtacctcagcaaccactcgttatggctgaagaacagaatcaacaaaatggccctgccaacattggtgctggagatgcaccacgtgatcaccgtcagaggaaggaaatcgcacctcctgctatccagaataacaacttcgagattaagagtggtctcatctcgatgattcaggggaacaaattccatggtttgccaatggaggatccactcgaccaccttgatgaattcgataggctctgcaacctaacgaagattaatggtgtacatgaagacggattcaagctccgtttgttcccattttccttgggtgacaaagcacatatctgggagaagaatttgccccatgactcaatcaccacctgggatgattgtaagaaggcttttttgtca

SEQ ID NO: 38393 - DNA, 1392 bp, Arabidopsis thaliana landsberg
ctccgcctttttggtgtttcataattataagttttacactcccatttccaatttaccatgaccagcattttaaaattaatttacgtagttttcataaaggaattgatcctccccttcaaatctagttcggtgagacaaatctcgtaatgagttgcatcaatatacttgtcatttccacgtgacaataatgcgatccaactattcatgtgactcctgtgtccctcaataaacgatatgatgcagcatttggagccatctacttaattattcatctactttttctattagtatacgtgtagacataccaaaacaaagagaaaaggatcacttatatgaacacgttcacagtttgctttgattggtaatcagtgtcaggattcagtgtaattaggcaaatttatcaattatatatatatatatatatatatatgttatgctatgtgatgaagaatatttttaaatagaaagtctcattcaaaaaccatacaaaatttttatgcatgtgaagaacttgtatcatttaaaacatttacaagggttagttatgattgaaatcgcagggaaagatttcaacttttttctctcaactattttggttgatctttcgaccgtcatggtttaagaaaagtaacacactgtcagtttgatgttctgaatatgatatgttttagaaaatatcacttgaaaactctaattatatttcacatatcttttttttttatttttttatttttttatttttttatttcacgtatctttagaaaacgaattaaaccttttccatgcaatgtttccaaacaatatattaaattttctgaatcatgtgcaatatccatttatatgacatatcaataactattttagtgtaactttttttacttcaatagtttttgcagatcaattcgagtatttagggtttacattgtaaactcgctagttttctcttgcgaacagtcaagctacgagtgggcgacttcttgtctcggacttcggtatgagtgacttaacattgtgggtttgttgtatagtgaagaggcttggtcatctccggatgagttggggtttatccggacagcatcgtcataaaaaaatgatctagcaaaatgggattttttagaacaagtgtggggtgtgtgtggtggagaaggtaataaagttgacatatagtacatatgacaagttcagtgacaccaaatgaatattatcaaacggctcaatctaaacttgagattgatgataggctgtatattttaaagcccaggcccataaatgaaatattcatactctacaaatggagtgtaaaatacggtggttcaagaatatgatttaagtatttaagtataagctaattcatacaagaatatgattcataaacgacaaaataagtatctt

SEQ ID NO: 38394 - DNA, 3456 bp, Arabidopsis thaliana landsberg
  unsure (1)..(3456): unsure at all n locations
caatctctctgaatatatgtcttgttgcctatagctaatcaaggaaggaagagaaaagctgatccgaatgtatcacaaaggccgggtgccgctaaacccactactgggacgggagaccctctacctagtgaatacaactacccaccccagggcgagattactgctgctcaggcttgccatgggcgactccgagctaaccccaacgagcatgggcaccaggttcactagtgttcgactatacacctgctaagaacttttcagaactccgtgaatcatgatctccctgcacctctttcgtcacaagaagtccagaatgatgcagctaatcgatcgactccacaacatgaccctccaagttctccaattcagaactctcatgccagtcaaccatcttcccaaggtaacaacttccaagaacgtgttagttccatgttaccggaactccaagccgataacgtaaaggctctaaacgacattcttcaagtgcctggtcgtgaggcgtggacaactgttctttctcccatactgatggaaaaaacaacttggttagtcatcgttttatctggttttcaaatattatttaggaggttggtctctagtttagaattaagtgtgtttggtctttgatttcttaacgtttagttgatgtgtctggttttgatgtgtgaatgtattgattagagtccgagtgtattgatgtgtgtgagtgtattgtgaagtgtctagtttagttgtgtaagtcctaagagtctgagtgtgatggaaatcgatgaagtttgtttctttctttcctaacattagctttgaaatttgagttaagacagtaaatgagaaatcgagtgttggagtaaagattcattgagtattgaacctatggaacttgttttgataggagaatgatcgagtggtcgttgataacacttgagcagtctccatgctttgataacctctggaacttgttttgatagcttttgtgtaaagaggttctagttagggtttatgtttagctcagtctccatgcctttatgtgtttctttctcttttagctcattagctagctgtgctaagatttagtgaagtgttttggttacttgttatattttggttttgatgtctggttttgattgaagaattggttttgatgtttggttttgatattgtcttgtttctttcttaacaatgtattgattagagtccgagtgtattgtgtaaatgtattgtgtaagtgataagagtgtaagtttattgtgtaagtgataagagtgtaattttattgtgtaagtgtattatttagttgtgtaagtgtctggtttatttgtgtaagtgtctggtttagttgtgtaagtgtctggtttagttgtgtaagtgtgttagtgtattgtgtaatgtgtaatattaagtgtctgctttagttgtgtaagtcataagagtgtaagttttttgtgatgtgtctgcttagtaataagagtccgagtgtattgtgtaatgttaagtgttaaacttagttgtgtaagttgtgtgggtctattgtgatctctagtatgcgtctggttatgatgtgtgagtcaattatgatctatggctttaatgtgttagtgcattgtgatctctggtttagaaatgtgagtgtcttatgcatttgatccgtgtattcttgtcatgtctttgcaggttactcgtgacacatcttcgaggctgattcgaaagattactagagtatggacaaacaaatttgatggtgtcttctatagctggtcatgtgttccacgggatcgacgagaaatatactttctcgagtttgcggtatagttttttctcttgcattcacttaaatgtttagctgttaattatcttcactaacatcatgtctttgtatttgtagaaaacacaccattgggatcctttgattacaggaacagttcagtactattttgaagatatatgtcaaagacagatgaaagatatgattagcactgtgaggactagtcgagagtgtcctaaatggatcatcgattcccatatctgggaaacgatgtgtgcatactgggatactgaagaagcaattgcaaagagtctgacatattcccaggctcgcatgtctgaccgtaatgggctcggtcctcacatccatttatcagggccgacgtcctatcaacaaatccaatcagaaatggtaaataacttcttgttctctctgttatttgttttacatagtccattgcaagtttagatgttgtcttagtccttgttcatttttaacattgcaggaagaggaattaggaaggacagtgggtattggtgaggtctttgtcaagacgcataccaaaccagatggcacttatgtcgataagaaggctgagaagattacaaagaactatgagcagaaattgcaggagaaagtttctgaaatggaggcagagacttcaaatgtttcaaacggggaatcatgacctcgggagctcacatcagatgactgtactctcatcttcctacaggtaaagtttacattttcataattatggtctgcatattctcatgctctttagtaattgtttgtctctttcttttcacagtccacagagacagattcacgaggaaactattatggactgggcagtcttaaggagaatcttccggatctagtcactggaaaacgcaaacatttaggagaatcttcttctttcgtggcattgcaagtgcaactgaaggaagctcaacaaaaaatnnnnnnnnnnnnnnnnnnnnnngcaaaacgtgaggaagagcaaaccaaggttgtagctgagcagaaggacaagttggcacacttgtccttggttgagaagtatttgcgccaaactgatctggcctttctccacttcatcgactctcattcacctgaatcaactacagagcctatctcatctccaactacttcttaagttacttctccctctttacaaactagcatgaacttgtagtcttttgagaatttagtgtaagttgaattgtattttgagaatttagtgtaaattgaatctttattttggttacaatattaatgaatttggtgtttgtttgaatcatgagtttgattttgaaatttagataagaatagttgttaaagcattacaggattaagcaatataaatcagaaataaaaatgacatttttttcttttgtctaaaaccgtagtcgttactcagtcacatattagtcggtaaatagtcgcagactgtccctacaataatcgaaagttcatatagtttaatcgtaacttagtcgtaacatagtcgtaacagatagcgactattttacgactaacattacaactacatgagttttgtcgtaacttnagtcgtaaattggcgactaaaattacgactattggtgtttagcgactgtggatttgtgataacattgataagtcgtaaaacagtcgtaatctatcgatttacgactactttgcgactaaat

SEQ ID NO: 38395 - DNA, 3074 bp, Arabidopsis thaliana landsberg
accggattgtcttttgttgctgcagggtttgaatgataaagtggtagtcttcatgtacaagcctaagtagttgtaccgtagaaatatcggtcacagacaggtattgctgaaagtcctcttccttatatttgaactatatgtagagttacaatcaacagactactatcagttacttgttgtaatttgctatggctgatgaaactgaaatctctttgaagtaatgacacttatgttgtgacttatgtgttgatattgtagccgaatacgaggattcggattaccggaatcacagggtatgaagagtatccagcctcgcccaatgttgcagttggagaagtaaatctttgacacaaaatgtttcttgaatgttaaaatttttctgatcttctctatgtaattttgtaaggaccctggtcatttcatttctgctgagattccttttattaatatgtacctgcttttgccattctttgatcacaaattctaagttagtgtaagaaaacttcattattgctcatcaatcaatctaggcgtactaatgaattttatagaataaaacaacttctaccacatttgtcgctgtttttttcacttcagtggcacaaaacagaaattgttattgagattttgaaaatggacaggaccgtccataacatttatccgtccacaaagacattatggtgatttttgatatgtttctgacaagattttgataagttgtgattttctgatgaggaattgagaaatgaagttttgtttatatatgcaaaagatagatggtcaccgatgactagtttgttgtgaaccaagattgttgagaaggctatatacatgttgggttgtaattttttgctttctcactcttgtggttgattaggtccgagtttgatttactaatttgcaaactttttttgtctatataagtttggtgcaacaaaacccgttaccaaaaatatttaggttaagataatttataaataaataaataatgactaattgactattaaaaatatatgctttaaaatggagtaaaatatatattcatttagtttatgacttatgagattccagttcactcatagatttactttctaacttaaatttcagagattttatattattttcgatcttttttttcttgtccttttaaatttaagaataattcactctaatgcccttttctcaatgttcttttttaactctactttttttcccattttcatttctaccccttcttatacttttatccccaaattacccttactgagctacacacacttctaacctaattcatttcctctctctctcttcttcctccatcggaaattgtgaagtttgtcgccgttgaatcccatgccgtcaaaaatagtgaagtttgtcgccgtcgaatcccatcttcgccgtcggaaatagtgaagtttgtcgccgtcgaatctctttatgttattcctccatcggaaattgtgaagtttgtcgccgttgaatcccatcttcgccgccggaaatagtgaagtttgtcgccgtcgaatcccatcttcgccgtcggaagtagtgaaatgtgtcgtcgtcgaatctcttgttttcccagatttgaatttgtaatgttagcttaaatgtcagattttgaattggtttattcgatttttgttgttgcttatgtgaattcgttatttgaatcctgattcaatcgacagttttgacatttgcttcagcttcgaatttgaattttgtttgagatttgatgattgaatttgtttctaaaatccttgtaaattccttatactgttttgctttcgatttttgggtagattatgtgaattcgttaataccttttgaattcgttatactgtttcgtgatagatttgcttatgtgaattcgttatactgtttcgtgatattgattccatcgacagtttgacatttgcttcagcttcaaatttaattttgtttgagatttaatgattgaattgtttctaaaatccttgtaaattcgttatatttttttgctttcgatttttgggttgattatgtgaattcgttaacaccttttgaattcgttatactgtttcgtgatagatttgattatgtgaatttgttatactttttcgtgatagattttggttatgatttagtgtttacccctttacttatgctttcgtgatagatctatgccacttacttatgctttaaaacgattttaaaccatgttaaccacttttcaaagcttttaaaattccttgtaaatcattctatgccaattacttatgctttaaaaatgattgtaaaccatgttaaccccttttcaaagcttttaaaattccttgtaaatcattgggttggccgaattttccaccctctactatttacaatctcaacattcccccctgaacttttggctccttgaaatatcaccatcaactaatatattctcaaaataactaaatgtacttttggattcatgtgaaatactacgcctccaattgaactagtgattaaaccgggattaaccataaacccgcgttcgttgtaccgcgattgcgattaatccaagtaatcacccatgatccgattgagaaacgacgtcgttttctcatttttttaactcttcgaaacataaggaaaacgacgtcgcttcatccacccatttgaacaagtgcgactcattttccctctaacataacttaatttccaatcaacattaactcgtttaatcaacaattttaaccaatcaaaatgcatacttgtaatgcaatagcgcatttgtaaaatctacggtatggattatcctttgtctttgatgtaaatgtgattatctcttccccacaccagcatttcgagggcacaccaatgggacaaagacgacgcccagagctggaaccacttgagtagctcgtggtgctcatttttttagatttggtaactgaagaactctaaacccccaaaattcgattttccccttcctctctcaagaaccctaattttggtctgcaacaatgactttatcgattcgaatcgatttgtttagaaaataagagagaaacaacgtcgtttctcagtcgagtcatggatgatta

SEQ ID NO: 38396 - DNA, 6661 bp, Arabidopsis thaliana landsberg
  unsure (1)..(6661): unsure at all n locations
ctgagttactcgttatattttggaggttgaaatgagcttcccgaaaagatagagagattgatacgctgtgatgcttctgcttatcagaagctgttgatgaagagggttgaggataatttgggttcgattggaaatgcgaaggtgtggttttatgctctaggtgtgggtagttttgcgataatgttgagttatttttttagttattctcttttgtttacagtctcgtgcagtgcacaactcagtaatggagcttcggaatatttgcaatcatccatatcttagccaactgcattcagaggaggtaatggttttcatttatctggaagtgttattgtaaatgcaatgaagcactggttagcgcactatggacaaccctaatgaagggcatttcacttttattaggtcaataacataattcctaagcatttcctgcctccaattgtaagactgtgtggaaagcttgagatgttggatcggatgttgcctaaactcaaagcaacagaccatcgggtaatgatttctctcttttccctcatggtaataggatagttgtgatgattcaatgctcttaaagacgaaagcttattattgaagttgggctaagtgttttcaagtagtgtgctagagtaccttgcattgcgttcgcctctggaggattaaagtgtctattacgaaaagtttttgaaattatgttttgattggatgaagcattactgttttttttccctttatttggttgcttacttgcttctatatcacttcacgcaaaacatcaagtcctcaactataagattttctgttatttgtgaaacgcacatatatattagaatttgtaacttttttgcatttttaccttaaatttaatactgaagcttataaatggttgttacttttatttatggtatgcatgaattcccacaggttcttttcttttccacaatgacaaggcttcttgatgtaatggaggattacctcaccttaaaggggtacaaataccttaggctggacgggcagacatctgggggtgatcgtggtgctcttatagatggcctcnccccgtcgggttccccgtttttcatatttctgttgaggtgatgtatcatatatcatggctggctttctgtagttctaatctctatcgggatgattcatgttcatttttaatagatttagttatgttcctaaatactacaagttgtaaactcttttgggcgttcagtacgactgatatgtatttgtatgtgattgctgaatcattcatggaatttcagcattcgggctggtggagtaggagttaatcttcaagctgctgatactgtgatactattcgacactgactggaatcctcaggttagacctagcatttccatatgttaagttatagttgaatactgtggacatcaggccggacttgaagcagcatttattatacatttcaggttgatctgcaagctcaagctagggctcacaggattggccagaaaaaagatgtgcttgttcttcgttttgaaacggttagttttttatttattgtgctcaaggaaattaaacatctgaataaatgggttgatttgtgattggttgtaacttttaccctggtgtttttagtttatgttgtttcatcattgggctacataatgtagtgttgctgtcctaaatctatggctgttcaacatgacttatgaggcaaatagaacagtgcagtactcttgggagatactaattgtttcttggctttttccctttcaattgacgcgttattatataattaagctgtctgaactgtttgtttgtctttcgtccttaattatatcctaaggtgaattctgttgaggagcaagtcagagcttcagctgagcacaaacttggagttgctaaccagagtataaccgctggcttttttgacaataacacgaggtgaatcgagagacatcccttttatgcttcaagaagtttcaactaccaattctctaaaaaaattcttactttgtaacagtgctgaagatcgtaaggaatatttggaatcccttttgcgtgaatcaaagaaagaggaggatgctccagtattggacgatgatgccttaaatgatcttatagctcgaaggttaatactcttttgcatcgttttttatacagaataatttacttgcacaaattttaattttacaacagcctatgcatacgtggttttaaaataatcctgatagtttggttcctttgcactatgataaatctagaaattctaccaagattactgccaacaatttgtacaaagtattttactttctaactgtaaatatttgtcttctatattattttctattttcatagcatctactgttttttcatgtgttctgtgttaattgatagcttggcttcctttttaattcttagatgacaatctttttacatttccatgcatctcgattttcttttaactttcttgcagatctgacatttttgttatctttctagggagtcagagattgatatctttgagtccatcgacaaacaaaggaaagaaaatgagatggtatgcttgttcttattaactttattttcgggttatatcgttttatgatgtttatttgaaaaagatatggccgtgcaggaaacatggaataccttggtacatgggccagggtcagatagttttgcccacataccatctataccctctcggcttgttactgaagatgatttaaaactactatatgaaacaatgaaactaaatgatgtccccatggttgcaaaagaatcaactgttggcatgaagcggaaggatggttcgatgggaggcctagatactcaccaatatggaagagggaaacgagcaagagaggtttgttgacttttctctttgtaatatgatactgcatacagtattttcacttattactatagaatgacaaatattgcaacttcattaggttcgatcttatgaagagaaattaactgaggaggagtttgagaagctgtgtcagactgagtcacctgattcaccccaaggcaagggcgaaggaagtgaaaggagcttggcgaatgatacatcaaatattccggttgaaaattctagtgacacactactccctacatctccgacacaggcaattactgtacaaccaatggaacctgtaaggccacagtcacatacactgaaagaagaaacacaacctataaaacgtggtcgtggtaggccaaagagaactgataaagccttgactccggtatcattatcagctgtaagcaggacacaggcgacagggaatgctatatcatcggcagcaactggtcttgattttgttagttcagataaaaggctagaagccgcttctcatcctacttcgtctcttgccctgacttcgcctgatttatctggtcctcctggttttcaatcattgccagcatctcctgctcctacgccaataagaggccgaggtaggggaagaagcagggggcgtggagcaggaaggggaagaagagttgaaggtgtattgcatggttccaacagttctattactcagagaactgaaaccgctacatctcttgcaagtgatgcagaagccacaaaatttgctcttcctcgttctgcatctgagattgtttcaagagtccctaaagctaatgaaggaagtacttcgaatcctgaccaagtatctcccgtgcattctgccactactgcactccgatcagacaaagcagcagataaggacctagatgcaccacctggttttgattcgggatcccatgttcagacgctaaatgtacttgaaaattcatcggaaagaaaagcatttgctgtaaagaagaggcctttgatccaaggtgtgagctcccagcatccagggcctaataaacagccacttgacttgccagtctccactagctccactttgttgggtaaataaatcaaacatcactatgtagttttcatattcatctaggatgtgtagttatgacttgcatgaggatgatggagaacataatgctgatgggaatcttaatgccatgttattttggtaggtggtggcccagtgcaaaatcagaatgccgtgtcttctgtttgtcatggatccgaaagtccttaacaaggtcgaacatatacagctttgcaaggnnnnnnnnnnnnnnnnnnnnnnnnnnntctgccaatgagttctcaaccttctgatgctactctgccaatgagttctcaacctgtcggttctacggttgaaggtataaatctatgaagcatcgtaacttgcttaaaactgctctgatttctaaatcttttccgtattgtacatgtcatctttgcagctcaagaagccaatgttccttctcttccagcagccttgcctgctaagaggcgagtccgcaatttgccaagcagaggagaaactcctaaacgccaaggaaagaggcgtggccaacctttacctgcaaccgatgcctcttctgcaaggagtacaggattaacaccacaaatagaggtcaaggttggtaatttatcaggcaccaaagctaagtttgatgctgttgccaaagaacaaccccacttcagccagtcagttgcacccgatattcactcttctggtagtttgagtcaggaaattagaagagacacctctggtactggtggttctgctaggaaacaaactgctgatgtaactgatgttgctcgagtcatgaaagagatcttttcagagacttccctattaaaacataaagttggagagccttctgcaacaacgagaacaaatgtgcctgacgcacaatcccctggtgagatgaatttgcacacagttgagacccacaaggcagaggattcttctggtcttaagaatcaagaagctttatataacctgagcaaggcagataaactggtatcagatattcctcatcctgttcctggtgatctgacaacttcaggatcagttgcaaacaaagatgttgacattgggtcgtctaaggttgctgctgaaaatgagcttgtcaaaattccgggtggtgacgtagattcttctgtaatacaactctctttgggaaatactttgactgctaaatcgtctttggaaaagtgcactgcagatcagcttctgggagaaaaactgtctcaagaaggtgaaaccacacctgctagtgatggtgaaacatgtcacctggcagaagaaacggcatcttcattgagttatgttcgatctgagcctactgcatctgcgtcgacaactgcggaacctctacctactgacaagttggaaaaaaatatttcttttcaagatgaagttaaaactctcaatggtgataaaagagaagctatcctcctaagttcggaagagcaaacgaatgttaactccaagattgagacaaattctgaggaacttcaagccagtagaacagatgaagttccacatgtggatggaaaatctgttgatgttgcaaatcagacggtgaaagaagatgaggcaaaacattctgttgaaattcaatcgtctatgctggagcctgatgaactgccaaatgctggacaaaagggtcacagtagcattgacttgcagccattggttttagttacaagcaatgagaatgctatgtcccttgacgataaagattatgatcctatctctaaatctgctgatatagaacaagatcctgaagaatctgtttttgttcaaggtgttggtaggcctaaagttggtactgctgatacacagatggaggataccaatgatgccaaacttctagtgggttgttcagttgagagtgaggaaaaagagaaaactcttcaatccctcatacccggtgatgatgctgatacagaacaagatcctgaagaatctgtttcggatcaaaggcctaaagttggttctgcttacacacagatggaggatacggatgaggcgaaacttctaatgggttgttcagttgagagtgaggaaaaagagaaagctcttcaatcccatatacccggtgatgatgctgatacagaaaaaaatcctgaagaatctgtttccgttcaaggtgttgataggccgaaagttggtactactgacacacagatggaggataccaatgatgccaaacttctagtgggttgttcagttgcgagtgaggagaaagagaaaactcttcaatcccatatacccggtgatgatgctgatacagaacaaaatcctgaagaatctgtttcagttcaaggtgttaataggcctaaagttggtaatgctaacacacagatggaggatacggatgaggccaaagttctagtgggttgttcagttgagagtgaggagaaagagaaaactcttcaatcccacatacctggtgatgatgctgatacagaacaaaatcctgaagaatctgtttcgaattttgataggcctaaagatgggactgctgacacacatatggaggatatcgatgatgccaaacttctagtgggttgttcagttgagagtgaggagaaagagaaaagtcttcaatcccatatgcccagtgatgatgctgttctccatgcgccttttgagaacacaaaagacagtaaaggagatgatttacatggagagtctcttgtttcctgtccaacaatggaagtgatggaacagaaggggtttgaatcagagacacatgctcgtacagattcaggtggtattgataggggaaatgaggtatcagaaaa

SEQ ID NO: 38397 - DNA, 10979 bp, Arabidopsis thaliana landsberg
  unsure (1)..(10979): unsure at all n locations
cgtcgtctgttttgcgattgccttggcctctcttggatccttcgaggttcgcctcgggggctgcctgctcaatattggccatagcgttgacatgctcggttttggctttttccgcttctaagtcctcgatggttaggcctccaccgatttttccggctaggaacttagctgccaacttcgccccgaggctacgacatctagaagtatgatggtcgtaactcttatgtaagtcgcagtattcctgctcgtttcctgcgggttgatccttcgtccaggtgtaggattctcgtccgcgtcatctgtcgcggcctcttccttggcctcaggtgtatcagcttggtaattgtgggctccgggaaaattccgtccttcatggtgaacaaacgttccgccttgagcgccctttttgtggttcagagcactaagttaggatttttcgctacgaggcgtttgcttcggcggctcgtgccttttttatagcagttccatttcttcttcatgggcaacatagtccgatgctcggtgtaatgcatctcggattgtttgtggtttggacaaatttaattcctttcggaattcttacttgtaccacagcgccttctcagagcagagagagccgctacgtcgttgattccttcgactctggctagagtagatcggaattttgcgaggaaatctcaaactggctcgttcggtggctgagacaatgacaaaagatcggcgtctaatgtgccaggatcgattagcaccgaatattcctttaggaagagcgtcgatagctcctaaaaactgtccacggaatttccctcgagtcttgagaaccaatccagggctggtcctttcaagtgttcgacgaacaggtgacagagaccggcgactctttcgtcgggtctgaatttggctcgggccacagagattatgaatgacttcaagtgtccttttgggtcggaggatccattgaagtattcgatccttagctttcctggatctgagatattgtgttggagatcctgcgagtgaaaggagtgttgtgggactcctccagaatgcggtcgatatttggggccgaggagactgcgttaagcatttgggatctcacaagcttcatctcgttttctgccttggctagggagagcatgatagcgcttatttcctattctctggcgtattcctcagcccatcgaacgttctcttctgaatcttcatcgtccaagaccctgatctgatcggcctaagcaatttctgctcggggaagagggagctgcggatcgtttccttctgttcggtacgtagtgtcccgatttaccaagattgtcgactctgctcggtctcttccaatctccggcatggttcgcgagatgggcctcgtgagtgttgccaggcgtgtataacacgagccgtgttgggtttaggtctgctgccgctcgtcgatcctgaagatgcctcgcgccgaaacgagtagccctgatctgtccttgggaggtagctgcttcgagttgttgcgccaaggatcgatttgcctgttcttgatcgttcaccttcttctgaagttgagccatcatacttcttagttctgctagggccacgggagcaacgtcttcaggaacgtctgtctggtttagagggattgagtttccctctgaacttccagtgctatgtctgcacatttaccgcttcctcttattaccctacctccaccaacctttactctaaagcctctggtttctgtgactcgccaacctttgtgtttcactataccttcgtgaatgaagcaactcgtggccccaaaatctatcagtattaccacgcttgtgctcctaatgtatccacgcatcttcatggatttacccctcgagttttctgacatagtgcctagtgagagtatctgcaagccttcctctgcttcagcttcttcatcatccaaaggttgtgagagtcaaaactcgcacaatagaaattgttttaagggtttcttcaaagaacgagtctttgtgagattctcaaagaacaacagaattgttgattaccgtaaacggtgttcttggttgtactattgaaatagtaagaatttgatcgtacaagtgtttttgaatatgaaaataagtgtttttgctttcaaagtcagagcgtttttgatagctttaagttgagagcctctctccttttctcagaagttctttatatagggctttaatagatcacttctcgcgatattctcggaagatttctccttatctcagagctggcgaaggagatttatctttatcttccgaagattctggaaatccctatatttggtgatatcctcggagatggtatgtttgatctcatattggttaagtcatttcttgaatgttctgtcccgatccgatgttcctccgagccgggttgagttggctctcaggttgtggttgagtggctcggacttcgttaatcgaatgatgcgctcctgaggcatcttaaggtccgcctcggggtgattctccggattgctgtccaaggcgcttcaagatcaggtcggggaatcctttctggcgatgttccgaggcgtttttggcgtcgcctcgggacatttcctcgacataatccccgaggtgttttgggcttggctcgggatggttcttcgacaaggtcgccgaggcgttaaacatggtcggctcggtttattaggtggaatccgaccccaacagtttgtcccccagctcattgacttggcagtgagacgatgagcttcatagataggttctcgagccgactctttatctctttagacttagttgtcgcttcatcttcccggacggtcaaacttccgttgcgtgccgccgattttatttttaaagaagtggaaacgtttctcgcttattcccgaggatgacgcgggtgtttccttcttccgagcccacgcgcttaaacgcgtttcaattgtttgatgcggacccgacgcgcctccaaaaattctatatatatggcgagctattccttcgggagttcacttgaagttttcgaagaaaataaacaaggtttgcttccttctctctgatcttgatatttctatatcgttctttcttttccggtgaagctcccccgttcttttgtcatttttgatttttccggtttagaaatttttgtttactggtcgtttctcatcgcatcgatcgtccccgagccagaaattagttccagtcaacctctttcgaccccgagcgcttctctcgtcgattccagcgactcgaatcacccagacgacctacctccaatctataaacggagagcgttttggacgtcttctaaagatgaagctgtatcttctttgagtgcccccgagcagatgacctctttcatggctcgggaagataccaacatcgatattgctcgagaattggatctgctcgatgatcccgagccgcctctcgttcggagatgccttgctcctatggttgatgaagccgggacatccaactggcaaggcgcgcccgagcccttaatgccgcaaataaagatcgaggactttctttatttcggcccgaacgagatggaggatattatgcgtcttaacgagcagagggctttcgagaaagcctagaagaagaggaagaagacaggcaacagggcgatagtgccggatccccctggcttgactttgtttaccaagcggtcgctttcggatctgagggcctgattcaatcttggtgaggtcaccgtgcgtgtgtcgatccctgatgnnnnnnnnnnnnnnnnnnnnnnnnnnnnnnnnnntctgtatgagggatttttctattattgcttcttgtggcttccggtcccgaggctggttttgcagtacgtgacatcgtaccagttcgccctctcctagattacgacgcgatctttgagacatttgctcgggattttggtgcgaagttatgaatttaagaccgacatcacgctcgctcatttgagaaatctccttgatcgatattatatctctcctgccaaaggtaggaaggttattgacgggttcctgagcaaggacgagccgtataccgatcacttcttcttcgtggcccttgaagatgctgttcacgacttccttctcgggacggttctgacgagatggtgaacttcgggtagttgtagctaacaatttatttgtgtccgacgcggttttatagtttctttttcttacagtagtttttctttgttgcagaacgcaccctcaagttccttgagccgattcgagatgatttcctttcggcttttcacgcgttatcagctcagaagtgcgattggtcgaaacatttctctcgggatcaagtcgaacgagccctccgtcttcttcacggcgtttcctgtccttccaatttggaatcttcggaccatcgtactcaattcttcgtcgatatgcagtcaaccaaacttactttgagggaggtgtacgcgaagaagaaagtagataaagagagacgcttggcaaaggagaaacgccttacggatgcggggctgatttcgcctggggcggcctctctcgatgagactcaaaaccgggacattgttcccgatgttacggccccagttgatccgacgccttccgaggctcaagaggttgatcccactgctcgtgcgcctttgcccgaggcgattgtcgcactgccagcgagcgacaaggcggtgggtaagcgcgctcggacggacgatttaacgtccaagaagaagagtaagaagaagaaggctcgggcgccgaggcggaaatagagctcccaatttttgaagatcgggtagcctctgcaaacctcctcgggggatgcgccggtcctttgcttcctctccggatactcttctggagtcgcggaagtatgctgaaacggcttcccacttcttgcgggtaagtgcgtattcaattttttcatttttcatgtctggatctccgatctgtaattttctttctttgttctctaggttgtcgcctcgatgaaccgaatggtgcattcgtacgattcggccatgagaacaacatggaggcgccaacaggttggccgagatgatgctcggatccaagctgccgagcgagaaagagatgaggcgctctcccaagctgccgcggcaaaaatagcgaaggaggaggccgaaaaggaggctttcgtgaacaaggcgaacgccattaagatggccgagctgaacctgagggcggactccgaggttgttcgtctcaaacgcatgctgaccgaggcgagggggctccgcgatagcgaactggctcgggcttctcaaatggcaaggcgcgaggcctccgaggctttcatcgccaaacttaaggccgccgcagaaagtgtcgcttcttgacgggattaatgatcagtttatgtatttatcccaagcgcgggctaatgcgcaactgatcaaggcactctaggagggtggagtgctggcgaccgagaaggaccaggttgaggaatggctgaaagacttcgccaatgtcgaggttgactttgccaattttattgccgagctgaaagaggaactcaaggctcctactcccgaccccactcctttaagtccgggtggtcacagatcggtcgagactcttgccgacgaggcgggggtcattgatcagtctggatcacttctgcctgccgaggatattcgcccgtctgaagagctcgactaaatacccgacgcggggtcttttgtttttttttgtcattgttttttttttgttttgttaatctgttcgatttgttgtacttgcgcttggatggctttatccaatgatttgtagaacctatgcctggacggttttatccattttgcaatttgaaatacttggtgggattctaaaaatccgaaccgttttattgcctgatatgattcagtttaagtgtgggtgaagcttttcggttgcgatccgatccgattcatcctttgaccagcgtttaaaaacgagctggggtaccggtgagtgagtatgaccgggtttccgaagatagaaatttcttttcagaaataatctgaatgaatttatcttgtatttatatagcgcgccgtagccgagcaggcgtaaaagatactccgagccgtcgttcatcgtatttagccgaagcgtttaaaagttatgaatcaaacttattatttatgtcgaagccagtacttgtacaaaataatgagtgggagtatggatatacggacccattccccccctttttaatggggggggggtagctgaactcgtccgaagacgagctgcctacgtacccttttcagggatcaagccacctcgtagttcaagtttagtcacctcggatttatttgtagtatttccttaggtgcattgcgttccaggatcttggaacggctttgccgcttaagtctgcgggctcatatactccgggtcggataactttagagatcaagtatggtccttcccagttcgtctcgagctttccagcgtttggttcggcggtgttctgaaaaacttttcggaggacccgatctccttcatggaatcttcgttgccgaacatttgaattgtaatgacaagccgtttcattctaataattttgtatacgaaccagggccgaatcttttcgttcatcaatcagatcgagttcgtcgaggaacctttgagtgttatcaggggtgttctcgggggatagactccgtcgtaggcttggcactatcatctcggccggaattatgcattccgtcccgtagactaaagcaaaaggggtttctcctgtggctcggcgaggagttgtccgatgcgaccaaagtacaccttcgagttcgtcggaccacgagccctttttagcatcgagccgtttcttcaatccatcgaggatcgttttgtttgaggcctcggcttggctgttcccttggggatatcgtggtgttgacttgctaagtcgaattctccatttatcacaaaagccttggaagcgggttgatataaactgcgagccgttatccgtgacgatctcataaggtatcccgtggcgacataagatatgtttccacacgaagctctcgacttgagcgtcctttatgctggcgtaagattcggcttctatccatttagagaaatagtcggtcaggacgaggactaactttttttgcttcgagggatccataggtataattatatccattgaccatcgcatcaagggatatggcgaggtgattgatgacaagagctcggccggttgatggattgttggcgcgtgcctttgacacttttcacatcgttttgaaaatttttcgcaatccttgaccatcgtcggccagaagaatccgtggcgttttattttaatggctaaagcccttcccccagaatggtttccgcatgagccgccgtgaatttccttcatgatcttacaagtcgcttctccttccacgcaggtcatcaagggtccggataatcgccacttgtaaagtttttcatctactaagacgaaacgcgcagcttgagctttgagtttacgagccttccattttgtccgagggcgacttcccttcggatatatagcttatgatgggttccatccattctgagctgcattcgtctgggtcatcttgatccgcgctgatttgtatggcgaggacgtgctcttcttcgccgaactcaatacttggcttttcaatgaattccactgggatgactcttctcagctagggcgtcggccgatgtattttctcctcgtggaatccttgttaactcgaattcgtcgaaattctttgctagcttttgaacatgaatcaggtaggcttccattttttcgtcccgagctgtatattctccgttgaattgattcgcgacgagctgggaatcgcaaaaagcgcggatttttcctatcttcagtccccgagctagattaagtccggcaacgtgcgcttcgtactcggccacattattggtagcttcgaagtttaacctgaatgactgctcgaggatttctcccattggcgaggtgaggcggatgcctacacccgagccttgctttgacgatgagccgtctacgtgtagaagccaagttgtgtcgagtggattttcccgagcctcctttgtgggtagttcgacaataaaatcggctaggacctgcgattttgcgcatgttttgttccgattctcgatgtcgtactcgctgagctcgattgcccacttagccagacgtcctgattggctttgactgtgtaagatggcgcggagtggcatggatcccattactacgatggaatgggattgaaaatagggtcgcaggttccgagccgacattacgactgctaaagcaagtttctccatttgcggatagcgagattccgcgccggtgaaagtctgtgagacgtagaaaatcggcttatgttcgcctttgtcttctcggactaacactccgctgactgcagtctctgatacggcaatatacaaatataatggctctccgattacggagttggcgaggatgggtggtgttgctaagtatttcttgagttcttgaaaaggttcttcacatcggatcgtccactcgaactttttgtttccccgtagcacatcgtaaaaggctaagcatttgtctgttgatcaagagatgaaacggttgagggccgcaactcttccggttaaacgttgcacctctcgcttgttttgaggcgatgccattcccaacaatgcctcgatttgctttggattcgcctcgatgccgcggtgggtgaccaggtactcgaggaactcgccggatcttacatcaaagcgacactttgtggggttaagtttgacgttgtataagtttagttgtttgaaacattcgcgcaggtgggctatgtggtcttcccgatctgtaaggcgaaaattttgttaacgaagcgttgataggtcgccccggcgttcttgagtccgaagggcatcactcgatagcaaaaaattccttgctctgtgtaaaaagcggttttttcttgatcttcggggttcatcataatctggttgtaaccagcaaaagcatccatgaacgacagtagcttgtttccagaagttgattctacgaggcgatcgatgtgtggtaatgggaaactgtcctttggacaagctttgtttaagtccgtgaaatctacgcagactctccatttgccgtttttcttttttaccacgactgggtttgcgatccagtcggggtacttcgcctcggtgatggatccgatcttcaataatttttctacctcggcctttacggcttctgctcgttcccgacccaattttctcctcttctgcttgatgggtttaaaagttggatcgatgttgagctcgtgtgatacgatgttaacacttactccgggcaaatcctctggggaccacgcgaaagtattgacgttctctttgaggaaagcggtgagttcagctgttagttcttctcctagatctccgccgatttctacgcatcgctcgggctttgcatcgtcaaggcaaattgagatgaccggatcgggagttggtatcttagattcccgagcttcttcgttctttaattgctataactgctcagagatcgacttttctttggctcggccaagtttggccttcttatgattcgcgtcggccgtctattcagtgacggggttcctaagcttgtgcgctgccatgaagcaggagcgagcattttttctggtttccctagatgggtttcacgccgtcgtttgggggaaatattagggctaggtgatacgtcgaggcgacagctcggaactgatttagccatggggtgccgataatcgcgttgtacacggttggttggtcggtaatagaaaaatcgacgatttttgttactcctttggctcggactggtagtttgatggttccgagagtcatagtggtttcacctgagaacccgagcacaggtcgtggagttggcacgatttgcgtcatatcgattttcatttctcgcagagttgtaaggaaaatgatgtccagtgtgcttcccgtgtcgactaggactcgttcgacgttgaaatcaccgatggttaatgtaatgactaagggatcgttgtgtggacggtctaaaccgttggtatcgctttcgtgaaaggttacttcgtcatttggtccattaaatggccgcgtccaattacgattcgcctcggctttcctttgatatgccttcattgatgctgccgtatcttgacagaaagctgaatcccctaaaattgtgaagatccttccccgaacagcttctggttcatcgtcgtctgtttcgcgattaccccggcctcttttaggtccttcggggttcgccgcgggggcgatctgctcgggattggccacagcgttgacctgctcggttttacccttttccgctttaaagtnnnnnnnnnnnnnnnnnnnnncgatctctccggctaggaatttagttgccaactttgccccgaggctacgacatctggaagtatgatggccgtaactcttatgcaactcacagtattcctgctcgtttcctgcggtttgatccttcgttctggtgtaggattctcgtccgcaccctcgaccgcggcctcgtcctcgtcctcgaggtgtatcagcttgataattgtgggctccgcagaagtttcgtccttcatggtgtacgaacgttccgccttgagcgccttttttgtggttcggagcgctaggttgggatttttcgccacgaggcatttgcttcggcggctcgtgcctttttgatagcagtttcatttcctcctcatgggaaacataatccgaggctccgtgcaaggcatccaggattgtttgcggtttggacaaatttaactcctttcggaattcagacttgtaccacagcgctttcttcagagcagagagagttgtgacatcattgattcccttgactttggctagggtagatcggaactttgcgaggaagtcccgaagtggctcgtttggctacggagacagtgaccaaaggttggcgtcggacgtgccaggatcgattagcaccgaatattgcttgaggaagagcgttgatagc

SEQ ID NO: 38398 - DNA, 249 bp, Arabidopsis thaliana landsberg
gacggcgcgggcccccccggaagggggcccacaaagcccaacacccaagcagcgcaggaaaagcccaaagccaaacccagggaacagagaagcaccacaggggaaacccgcccaggcgcaggaagaccagaacaacaaagacacgacgaagagaccgagccacaaaccgagacagcgcccagagcagaacgcaccccgcgcggggcggaacccaaccgacaaggaagaacaccaacccaggaccggaaa

SEQ ID NO: 38399 - DNA, 10149 bp, Arabidopsis thaliana landsberg
  unsure (1)..(10149): unsure at all n locations
tggctttgtatcttctaacaaggaaacataacttcggctattgggaatcggttgccgttctagttcttatactcaatcatacacatgacatctagtcatatttgactccaaaacactaaccaagcttcttattgcttctcaatattttcatggtgtagccgaagtccgtaagagtctttggctttgtatcttctaacaaggnnnnnnnnnnnnnnnnnnnnnnnnnnnnnnnnnnnnnnnnnnnnnnnnnnnaatactacatattacatacatcacctgaagtatacagggtctctactggtgggcaaaactcgatgttgccgcaatctctgatcgaagtggaggcggaatttaggaggagaaaaatagattgtcctgctgcagggtgatcgaacctatatttatataggcaattcttctgctgcgaccaaaattgtttggaatttatgaggtgttgcatatcaatccatctcggaggaatctgttttgaatgtagaggtacattacatgctctgagaattagggtcgcaactcctcccatagccattcttcctggtttcttaagtcccttagtccatcctctgtagctcagcagatgttcgattaggtagaatgaaactgaagcatctgtctgatctcctgctagaacggtaccatctgatgctaaaccaagtagctcctgtagcgctgtctccaacaattctagctctccattgtcaaaggtcccattcctctctcttgcaaatagtgcactagctaaagacctatgaaagtacctaaccaccggactccttattcgttgctcttggtcctagaggatgaaaacccatgtttagacccaagcatggccaagaatgactgaagctctctcttgtcaaaacgatgactcgtgtctttttcgcttgggaacccatacataagctctaaatgatcgattggaagccgatactctacgtcatacacacagaactccaagtatcccaaacttccatctggcctgatttcatcgtcctcttactctccatataagaacaattccacagatgaaagaaactggatggtctctttctcatactcctccattggccgaaacatgtgaatattcaggctgcactgcttaaacatatagtctacatcatcatagatgccgagtctctccatggtctcgggatgagggtatcgagttcctaaaaactcattgcgcttcagcagcttgtagtactcgtttcgagttgcacacttctctgattccaaatcatcatcgcctcctttctctgtttgatcatcttcctctggcgaagccatttcttcctcggagtcttcatctaccagctccaacctcctccccacgggcttcttccctcgagtgatatctgccttgttcctcaagaattcccttgcagaggacttactcgaccttcgggatcgagtatttccagctggagagctgaaggtctcttcttcttggatcacttcctcctcttggctcgattcactatgatcgatcttgaaactagcttgttctctcctgctcaaccccaagggtgtcaatccagtccactgtattgctagcaatcaagatgtgaacaaaaacaactaagtcaagccagattatagagatggtgggtttctagtaacaatcctaggtcaggattcaaacaagtaaagatgagaacttaacagccctactcgatcattgggtcgagtagaaccaacaggtgacaaaattaagaactaaaatgcaatcaacaggggatgcaaatagaggatacaaataacaggtaaataaaagtgcaatcaagaggggatacaaataaatctaatagaagttttaatgatggattcattgataagggcaactctagggttcatctgatggctaataggctaaaggtagatacccatgacgatagattcaaaaaccgggtcaatccactctcgtgacagagacccccataactccaccacttcctaatctcaactctcgttgatgaaacatagcagagcagggtttaagaaataatctaccaaagccaataggcagacaagccaatcccttggtcgagtctacaaatctctggaattcgtaggtcagacatccatttgaacgtcttttggacgctggacgtctatgatcgaatctccacattagccaacgaaaaccgtataggggccaagcgaatccagaagggtataaacctaaacactaaccacctaactaacctagagattaccctaatctaatccatcctcaagaaccctaatcactactcatgcaacattctcaagaacacaaacccagaaattactaaaatcataccaaaatgtagatctaaacaagcttaacaactctacttaaacaatcaaatgcaaaaacaaaatagattaagagtaattaaagttttaagattcataaacacaaagaaaaactgaaagataaagcatagatcttttggacaaaccccaaagtgatctatttatagtaaaatgttggaaaccctagattcactagaagacaagagacttgagacggtttgggcaaatactcaaccttggggattgagtaaagagggtgctgcaaagtctgcgcctttgtgtctatgctccgagtgatcaattggtcgagtagatgcttcatcctctcctatccgtatgctcagatgtctggttgagtggggaatgaggaggatctgaagtcgctttgatagctcaacaagtcttgtagagatggtcaccctttgtcgagtaaatggatcgagtagtggatcaagtaggaggggcgagtaaactgcagcctcctttgtagcatcctggatcgagtaaagaggtcgagtagaatgatgcctcttttgtagctgcctggatcgagtgaatgaatcgagtagagtccttttaaactccttttgcacctgaaaacaaactaaaacatgtaatgcgaatgcaagatgatcctagatgcctaagtatgcaaaacaagctaaaatggtgcaaaatgatatgatacaatgagcaaatgcaaagctaaatgatgataaacatacacctaaaatgactaaaatacagtgttatcaactcccccaaacttatctcttgcttgcccacaagcaaacaaaaaatcttaagttgaaggagaggttggaaggtggggattcaaaaacaaaagcatgcctctaaaacgggtaagctcaatgcccaggtagctaattctaggttgcaagatgatagacccttacttaaatatgttagccatactcgtcacaatgcaacctaacggcttgccttaatctattcaagcattcacatcaaccaattccctttaacattcattaagcacggatagtggatcaaacaatgcaatggttatgaactcacttggttttgggcttaggccaagagacaaaaatggtccctctaatggtttggtcgagtaacaggggacccttagagaaaagattgagcttcagtagaatggtaaaggtaaaagccaacagacacatacaagaacagactcccatctacccaatgatacagtatgatagctcagaagctgatcccattcccatagatgtcctaactctaccctttttatcattctttctctctttttggtttatgttctacggcgttctcttgaaacaatttaagagtctagcgggtttggttntatactttgacaaacttaaggcttttcttctaatcttagcacatagggcgttttacccttttctttgatttactttgccaaacttctttgaattccaaaactttactagactaacacttttgtatcccccgcttcagaactctaaactcttactcttttttttttcttttcttttcattctcattttctttctcattcattccatacacaatcccaatcccaaatacaagtctccacctagtcctagctaacccataaagcatgggctaggtctacatgaaagactgctcttgtcggctcatacctaacacgttataccaagctcaatcgaaaaagacctcacaatcacacacaaatgatctttggcttgaaataaggctaggctaagggtatgggaaactgtactaaaaatgagagacatctacttggattaacagagggtggtgaagtgaataagataatccaagtatgtatatggtagccatgagttcacaaacaatgcatatacatgataattgcaaattcagttcaggttcttatagataggaaataacatcaaagcagtatagtcaagttacaaattcaaagcagggtgcggtcttacttcagagaaacaatcggttatgcaacagagaactaacaacctgtgcattgaacttacttcattgaatcaaatcatgctcaacagtttgaaatcatgattatcccctatgcaaatgagcaatcctaaatgcaagcattctatatacaatcctaaaataaaatgcaatctacatgacattctatttttgtgaaatcattttctgaaaagtttttgaatttttatggttttttctatgttttagattatgcaaaatttgaaataagaaaagagaacacaatgtcaaacatgtcttgaaccctcccccaaacttaaattacacagtcccttgagtaataaaaatctgagaaagaattcaagaccaaaacacaaaacacacaaagaaaaataaaaagctatggcatatacaatggtggtggttgaggtggtgttacctcatcggtcaggtgaagtagatggagacataatcgtccatattctcttgagtataagcaggggctaaagttgaggcgggagggttttgctcgttctgtccggtcgagtagttggtcgagcgtgtggaagcttgtctctgcctactccttggctctctcaactcagagatcacttcccgaggctcaaaagatgaagctcggggttgatcaatcctttcagccctccttgcagctgagcttgtggaaccgcttcttcttacttcgggggtcggagatggtggccttggcttgctctggaagtccttgatttgagcagccatactcttcagcgacttattcattgttctcatcttcttcttgaaaccctttactgttttgctgtgaaggttcccaagctcttcaagcacaccgagcttcttgtgaacttcagctatctcatctcctccttgatccgcattttctctttggtgagcttgctcgaattcgttcgcctcttgctccggttgctcgctttgttgctcaaactcggtttgctgctcatagtcatcttgagtgaaatactcctgttgctcatagtcagcttgactatattctggttcatcttctcgacctactccaatgttgatgttcaagacagagggagatggcatgaaattgatgttgcgccttgtcttcaccaaagttcggttctcgcatggtaggggtaacagagaaggtccaagctccggatggttgaacttgaagagatagcgatctgtcggagtttttttcgcaagaaaatccttccccttgagatagtcgaggtcaatgaacttggggaacacgtcagggattccgaattccatccccacagctcccagtattggcgttaagagaccaccaacacaaagacttctgcgaattcccgagcgatggatggttgcagcatactccttgtagctcaaaaggtgatccaagagaacaacactcaacgaagtgtccgctcttatcacccgtcatcttcctcccatctcttgtctccctcaaaatgaagaccaaagattggtctatcatgcatagctcctcttcactaacaaatctggtagccttatttggaaagagggtgttggcgaagcattggtggaggtatctaatcacgggattacggattgaagaactcttactcttggttggtaagaagggcttcggaccggctattgttttccaaagagatttaagctcttcttgatcatagttttggcggattccttctccacttgggaacacgaaaatggtatcaagatggcatatatcaagagtatactcgacatccctaaccttgaaagttatgtaaccaagaccacctctctcttctttctccgaatcatcaacacaaaaatgaaccttgagggttgcaaggagttggcagctctcctctttgtatcccccacattggcagctcatgaatgttgcaagattggccaattccatcaagtattccacatcaccacaaataccaagctcttgcatcatttccttacgagggtatctagttccctcaaacttcaactccttcaaatattgatagtactcgctccgtgttggttctctcttcctccttggtcggtttcttctcccaacaggggttggtgtatcatccccaatgatctcaacctcttcctcagaaaccgcttcttcaaagggtgcctcttcatggtgttcttcttcagcttcaacgaccctctttccccgagctacttcttctctttgcatggttgagcggcttgagcttcctccttgaatcgagcttgatctttgagcacggcgagcatggcgaatttggcgttcagtcatgccactcatgtcaaacgcctcaacttcttcattatcagcagaggatcttcttgcccgagatgaactcttccttcttgaatccatggagattggtggtgagcttcgacagggcaaacaacaacaattctccaagaggtatcaaagaagaaaggaattggtttctttggtgatgtaatttttagcttgaaaccgattgaatgtttgaggaaagactttggagtggtcaagtaactttggtgaagtattggtgaaggggaacgaattcttaaagagtgatagggagcgttttggggaagggtttggaatgaagacttcaaagctttgtgagggggttgcgaaaacgagatgatgaaagagagagtttcatggagggtttgtcgaaatcaatgggtggaggagattggtctttggtttgctttggaagagatagaaaagcgagttgtaaatagtgtggggcatgggtaaatggtttgtccatcgagtagtgaaatgatgggggaacaagtggggtcacgcgacttatgccttggtctctaaataatttaagctcgagtaaatggtcgagcatccttttgaaatgcgcaatactcgatcaaacgatggagaatgctttgcttttgatcactcgatcaaacggtggggatgatttctctcatttggtcattcaatccaatggctgagaacactcctcttcattttactcgatcattggttgagatggttcttgacttggtttgaatttactcgaccgttgacttcctcagagtcaatgaaataaacctgacacacttaaacgaaaacatcaaaaataacaaggaaatagaaagttatatacataggtagacatgtgacttcctcccaagtgagcttggtttaagtcactaagcttgactcttacaaagcttagtcaaaaaaaggttgaaaggaggaacagagaagtcctcatcttcagtgggtggattttcagtgcttgaatcatactctgcatcctctcttgatatatggaaagatgagtactcatttaatttttcttcaaagtaagcttctttctgatcagcatagtaatcttcttcttctgaaccaggctcctttgaccaatcctcaaattcaaaactagggtagcctttaaccatttcttgaagatccaagattgcatggttcagtccttccatcttgtaagttagctccccaatggtatcctcttgagctttgtactctatcgtgagttccaaaagttctccagcaacagaatcaaaaattaagtcttcttcttcagtagagggattgatgggctgtttaggcacttcaggagaataagtcgcaataggggtttcttcctcactcaacaactcatcctctaagcttccttcctctgaatgaactcctttctgatcttctggtgcaaaccattctgttgtaaaatcattgtcctcttggatagctagtgcaatttccatcttctctggataaatactcattgaatacttattaactcttttttcaaaatcccaaagttgatctttcagcttcatcactcttgaagataacccctctatgactctgctttgacatttaaatttttttctcatctcataccaatcatcttctgtaggatcttcagtctgagatagcctttctgttgctctcttcttgtggtcaaaagttctcttcagcttgctgagttgagaagtatagttgacttttggtgaggtttcagcttatgtttcttcatcaacatccatatcttgaattccaaaactctgacctcctcttgttgatttctttgaagcttctctgatgtcaaacttcatcttgatgcctttttcaaggttcagattaatttttccattcctgacatctatgactgctccacctgaagctaagaatggtctgcctaggatcatgggatccttgccttcttcatctacgtcctataccacaaagtctgtaggtatctcaacatttccaatcttgaggcagattttctattagaccatgaggatgtgcaacagaaccgtcaactaagagtaaggctaagttgcagaacttgaattccatgatccctatccttttagctgtacagagaggcataaggctaacagatgctcccaaatcacaaaggcacctattgaatgtcaatggtcctagagagcatggtagagtgaatgaaccgggatcatcaagcttttcttcgatgactttcttcttgtatgtttcttgagtgctggcactcctaatcatcttttgattctgctctttcttgagttttttaattttgaatctttttccagaatgttgagtattcagcaaaggtgtgtgctctatagtccagatgaattgctgagtggggtagcaggtgcaacaatgtgagttgaatcccccccctcttgaatcatactgttctcagtattgagagtctgattacttggtggagactcatcttcttggtggatggtgatagcattagcagtagcatagtccttaggattctggactgctttccctggtagttgctgaggatgcttcggagcagaggttgatgcaaattttctctccacatatttgatttttgaattcagagcttcgaacttgacattttgatcgttgtaagaacaatcgatcatgttatgtgattcaactatcttcttttcaaaagccatggctccagtagcttgtccttggatgatctgttgaatgagttacttaatttcaggatctggagctgatggggcttgttgtggttgttgagtgaaccctggtggtggattctgctgttggaaacctccattgaactgttgtttagggtggatgatttgttgaagcatttgttttgtgtcaggatcttgagctgttggggcttgttgtgattgtggagtgaacccttgtggtggattctgctgttggtagcctccattaaactgttgtttagggtggatgatctgttgaagcatttgttttgtgtcaggatcttgagctgttggggcttgttgtgattgtggagtgaacccttgtggtggattctgctgttggtagcctccattaaactgttgtttagggacgtaaccttggttgtactgaacaaaaggcttagactgattctgttgtggtggatacacttgatcttgggggttagctacattagtgcttctgtaggagaggtttgggttgagtttgtagttgttgtaccccttgttgaaccctccttgctactggatgtagcacaactcttcagtttggtcattccccccttcttgcatttggaaatgctcttcattagtgatatgtctataatttgcatgatttaggcattcattcttcaccattttgtcattgtttcatccaaatttcatctcattaggagtcgttttagtgtgttttgcatacttaggacgattttgcattaggattgcatgtccactgcatatttggttgttttcaggtactttggatgcttttggagttcaaacagtggagatacagaacagaaagtcagaatgaccaatgacgccttaagcaaaagtgttctatcgcagcctcggagccctgccagggcaaatcactatcgcatacaaggagaagctagcagctcagtttcactcaatcgcgaagccggagga

SEQ ID NO: 38400 - DNA, 7497 bp, Arabidopsis thaliana landsberg
ctactggtttagtggaaaagattcgaaaagaagctaaagattttcaggaacacgagaaggcttatggagaaggctgttctaaaggaattattctggatttgcatctggatttggatcagggattcaactctgccttaaatgaagcgtgctcatcaggtttaagttctagacagaaaaatccaaggaaaagaaaagcagttgtgatccgtaagaaattggactctctggagcctagtgagaaagctattgatacagaggttagtaaaatctttgaatttcctaatgttttcaaaaggaaaaaggatttggttgcttctgttaaatctgaatgtagcaaggatgttaaggaaacggtggttcatgatgaaccaccgcagtatcagtaaggcatccttagctggaattgccaaggcttgaggaatccttggacaattcggtatctaaaggaaatgaagaaagatcatttcccagacatgttattcctcatggagaccatgaattctgatcagttcattatgaaaatattcagatggttaggctatgattattttcactctattgaaccgattggaaagagtggtggtttggcaatcttttggaaacaacacttggagatagagtttttgtttgaagataagaatttactggatatgaaggtttctcaggatagtaaaagctggtttgtttcttgtgtttatggaaatcccaaacagcatcttagatatacccttttggacagattaaaggagataggtttgacaagaaaatcagcttggtgtatgatcggagattttaatgatattctatctaacaaagaaaaaataggtggtcctaagagattagaatcttcctttcaggattttcaggatatgatttttgcttgtgatctacatgtgatggggagtacagggaatagttattcctggggtggaactaggaataatgaatggatccaatgtaaattagttcgatgttttgggaactcataatggtttgctttgtttccaaactctcaccaatggtttcttgaaagactaggttctgatcatcgaccagttctggttaaatttgtgaatgatcaggaagtcttcaggggtcaattcagatttgacaaacggtttattgaggatcctaattgtgctgcagctattctcgtttcttggaatgagattgtttcttcagaagtgtcgtcatcaatgatgggattagtggagtgcaggaaagccattggtaaatggaaaaaggggaataatttcaatgctcagaacagaataaaatgtctgaggaaagagctggatgaggaaaaaagttttcagtttccttcttggcctaaagtctcagtgttacaagatcttttaagtgctgccttttatgaagaggaatctttctggaggttaaagagtagagacaaatggttagatggaggtgataagaattctaaatttttccaagcttctgtcaaggctaatagagttaagaactcactaagctttttagttgatgaagaagggaatgaacatactgtagctaaagagaaaggcaacattgctttaagctttttcaaagatctctttacttcgtcctatcctgctaatatgcaatcaatcttacatggattccaagcaagagtcacttctgaaatgaatattgacttgactaaagatgtatcagagggggagatttacaatgcggtattctctataaatgcagagagtgcaccaggtcctgatggtttcactgctctattctttcagtctcattggtctttagttaagaagcagataatggaggacatcttgggcttctttcaaacgggaatcatgccagatcaatggaatcacacacatctatgtttgattccaaaaatttcacccccaagaagaatggcagatattagaccgatcagcttgtgttcggtattatacaagatagtgtcaaagattctatctgctcgtctgaagaaacatcttccagagttagtctccccaacccaatctgcatttgttgctgagaggttagcttctgataacattctcattgctcatgagataattcataatttgagaactaatgataagatttccaaagagtttttggctttcaaaacagacatgtccaaggcctatgatagggttgaatggccttttttacaaggaattttaacagctatgggctttaatatcaaatggatttcttggattatgagttgtgtgacttcagtctcttattctgttctgataaatggtcaagcctttggtaaattgtttcctgaaagaggtataagacaaggggatcctttgtccccttttctttttgatctgtgcacggaagctttggtgcatattctaaatcacgcgaaagagatgggagagtaacaggaataaggtttaatgaggcgggggcttcaatcaatcatttattgtttgctgacgatactttgataatttgtaaagctacaaagaatgaatgtgaagagcttatgcattgtttatcagagtatggacatatcttaggacaagtgattaacttggaaaagtctgctgtcacctttggagccaaaattgacgaggacacaaaagattggattaagaatagatcaggaatccaattggaaggtgggtatggaaagtatctgggactaccggaatgcttaagaggttcgaagaaggatttatttgagttcttaaaggaaaaattacaggccagactcacaggttggtacgctaaaactttatcccaggggggtaaagtgattctattgaagtctattgcgatggctctccctgtgtatgcaatgacttgttttaggctacctaaatctctatgctcaaggttaactggtgctatgattgacttttggtggaattcaatgcagaatacgaaaaagattcactggattggggctcaaaaattaattttgcctaaatctctaggaggttttggttttaaagaccttcagtgctttaatcaagctttattagccaaacaagcatggagaatctttaagaatgaagatagtcttttgtccacgatctttaaaagcaggtatttcctcaatactgatttccttaatgcctctaaaggaacacatccttcgtatgcttggcagagtattttgtatggtcgtgacttattgcagaagggtttaaaaaagattattggcaatgggcaacaaaccagtgtttgggttgataagtggctttttgatggtctgaatagaagaccttcgagtattcattctttgatggatattagcatgaaagtgaatcaactcattgaccccatttctggaaactggaatctgaatcttatgagtcagttatttccttggacggatattctgataatgcttaatcaaagaccgatggtaaatcgaaatgattcttattgttggtctggcaataataatggcatttacacggttaaatcagggtatgatctgattagtcgacaagctcatcaaaagatttatcaagaggctgcagtgaacccttcagtaaaccctcttttttgcagtatttggagtcttcatacggcgcctaaaattaaggtcttcttatggaaagtcttaaaaggagctgtagcagtggaagacagactaagaactcgtggtatcaaggcaatggatggatgcttaatgtgtaatgaggagaatgaaacaattaaccacattttattccaatgtccattggcaagacaagtctgggcgctgtcccttatgcaatcccctgaaaaaggttttggatcttcaatctttactaatatggaccatgttttgaactattgtcagaaattgagtagttctagtaatgtgagttatgttagtccttggataatctgggtcttatggaaacataggaataaaattctgtttgagggagttacttctgtgactcaaagcattgtagacaaagcttatgtggattgtaatcaatggtgttcagcccaacaagatgtctgtatcaaggaatcaaagtcaaagttgaattggagtcctcctcctcagaatgagattaaatgcaatattggtgtggcctggtctaatcgtttacaagcttctggtgcatcttgggttgtgagagatgctctgggaaaggtgttacttcatagtaggagatcttattctcatgttcattctatgttggatgcaaagattagaagttgggaatgggctcttacaagcatggcacaacatcattttgacagagtcactttcggagcctcaacacatgacattattaaagctctatacaaaccagaagaatggccatcattattaggccatacaagtcaactcttgaagttatcacaaaagaaaagtggttggttcatggctttggaaccaaaacactgtaataaaggagcttttgagattgctaagagtgttattactgggcacagatggcaatcttatgtctctcggggttttccccattggctaggaaatctctttgcttcagaaatgactcagctagggagattgtgacagtgttcattggaggcttgatttggttacaggtggtttagatcagattatcaaatcagtcggaggtgtcatctttgggaattagatgctcagattaattgctgagttgttaatcaaatagaatgttaggtgtggaggtggattagtttttgtccttttctaatgattattttcttcagtcaaaggtttagtaagtttaggatttccacttaggttcttcgagtctagtttttttaataatttcttttttcctaattttttcattaaggttagagtctttatattataagtgtttactcctttacgtcattaggtctcagtctttcttgttccttttctcttttcaatcttacctccatggcagatgaattgtgggatgaaattcaaggcctggatctaggtcctgaggatccagccctcttcattccccatgaagcttatgtgtatgttgaagagttcaatcgactgagtataattgcaagacctctcaacccaagagtccaaaatttgaacgcggtgattgcagccttacctcggtactggggaatgacggtgcatgtccatggaagaattctggatgcaacttatgttcaatttctcttccaaaatgaagttgacttgcagtcagtacaaagaagagaaccatggattttcaacaactggttcgtggctactcaaagatgggaacctgctccggctcttaactttgttacttctattgatctttgggtgcagattagaggaattcccctgccctatgtgtgtgaagagacggctctagagatagcacgtgacttaggagaagtcatcatgctggatcatcatgacgcaacatctactcaaattacttatatccgagttagagtgcgttttggcatcacagacaggctcagattcttccaacgaatcatctttgattcgggagaagtggttaccatcagatttcaatatgagcgcctcagaagaatctgtagcagttgcttcaggtttacgcacaacagagcttattgtccctatagaccacgtccccacagcatagccagagaaagagctgtcttcagagacagtgttcataggtcaagcttgaactctcaatcgcagatgacggagacttcatttcctgctcctgtgacaccgcctcctagaattgctcatccaccactgaatcctgaagaattgagagctgcgtatccatactatgcatcagttagagatactcatacattacatgttggagaatctagtactgcaagacaacaatggtcatcgagttctagtaccactccaacaagagcagacactcctaatcatgataacaacagagtctttgaagtcggtcaatcctcaagaagacaggaagtaagaagagaagcagaggatcctagacttcaaactcgtctacacagtgcttcaagaatgggagagagtctgaaacctcccaaaaagagataaccactttaacaagacttctgtcaatttttgttgaagactgcagggaatctaggatagcagcttcaagtagttggatatgttttttggttctgacatatccttaactttgttaagtttcaggtttattatttcatgtttctcgttttacttctaagtatcatcttgttatgtttgaatcaaaggtttgtaagtggtcagaccactgaaacactttttgtaagaacacaaagacatgaatgaatgaaagataacttttagtgaaaaaaaaaaaaaaagataatcatgatttagcctaaaataaatctttgagatatggaatttggcaaaacaaaaacaaaaaatgttttattgagaagacagagcccacaataatacaatgtcaagatgggttacttgattttattctttatgggccaatgaacttgggctcattagattcaaactgtgtgtttgggctccttagattagaaactgattctcctaaatgtgtgtttgggctcctttgtaacatttgctttctcatggttttcaatagaatatcaattaacaaaaaaattggtacagtttcggtttggtgtaaacggtttaattagattaagcatgcttaaaagagagagactttgatgaagtgttgtcaactccaagaacaaaaagcacctctgctctgttttgagatccaaccacagttcaaactaatcaaaagtcccaatttctaacttcagtctaggctttttctctccatggatccttgattctgaggtcagtttctgttcttgaggttttttttcattctgctttctctctcaatcagattttcatatcatctcttcgagaaacataaattataaatatttagttatgacttatgaaggttacaagattaaaattagaaattaatgattaaatcatccaaaaagtcaactaatgcccttatccatgcttctctgacaccaacatttgactaatctaattaaattaggaacaaaattattatcattaacaaatacacctccaacattaagtaaaatttctatatacacaaattttcaaacactaatggtttacttttcaactcaaaattcgaaataaattttccaagaaatataattcttatatcattgaacaagcctccaagttttcttaataagtttttcctctgtaatcatcatttgcttgttaagataagcaggtttcagttctattattcctcttttctattttttttggattatattttccatcttcttgatatgtttttggttgtaactgattactaattcttgatcgctctaaaagttcacttttctttcttacagatcaaccaatcgaaagaaaccaaaatgggcttcaacgttgttgtgttcttgagttgtctgcttctacttcctcctgttacttttggtagcaacatggaacgaaccaccttggttatagacggctcacgtcgaatcgctgagaccgatgagaactttatctgcgcaacgcttgattggtggccacctgaaaaatgcaactatgatcaatgtccttggggttacgcatctctcatcaatttggta

SEQ ID NO: 38401 - DNA, 5904 bp, Arabidopsis thaliana landsberg
  unsure (1)..(5904): unsure at all n locations
atgatacttagctaatattcgcttaatccttgattaggatagttaattaggtttagtaattgttaattaggattagtgttcattaattagggtaagtatttcttaagcatgattagggttagttaaaccatgattagggggactaaccgtgattagtaataattaagtgcgattagttgtttgattagtagagttttgcatatatgatgaatgcatgatagtatgtgagtctgttgtcatgttagttagtctttaattagatggctagcattagccgaatcatgagaatcccgtctgcatgttgtgcatcacgtgtaactccgttccgttatggcatacgaaggcctcagggctggatcgctaccgactgggcgctacatgacgatgtagtctaaaggaatgttatgtctcttatagactttgtgtctacgagtatggaggcatgtccttgggagatcatggattcgtagaaggccttacctaggttgatagaagcatgcttgcattagttgtccgcttcatattaggaaattcgagtctgcatgcattctgcatggtgcattatattttgcttagattttaccgaaatggatatatttttccgagaggtggaacttggaaaaatccttgagggatggaatctagttttgtgaagagcaaacacaacacttagatttcaacaaaatgaatatatttttccaagaggtggaacttggaaaatccttgagggatgaaatatggtctggtgaagaaggaactcaacgcttagatttcaccaaaatgaatatacttttccaagaggtggaacttggaaaaatacttgacggaagaaatctagtcttgtgactgcgcgaactcaacatttagatttctccgaaattaatatttttttccaagaaatggaacttggaaaaatccttgagggatgcaatctagtcttgtgaaaagccaacacaataattagatttcaccaaaatgaatatatttttccaaaaggtgtaacttgaaaaaatccttgagggaagaaatctagtcttgtgaagagcgagctcaacacttagatttcaccaaaatgaatacatttttccaagaggtggaacttggaaaaatccttgaggtatgaaatctaatcttgtgaagagggaactcaacacttggattttaccgaaataaatatatttttccaacaggtggaacttggaaaaatccttgagggatgaaatctagtcttgtgatgagcgagctcaacacttagatttcaccgaaaaaaatatattttttcaagaggtggaacttggaaaaatccttgagggatgaaatctagtcttgtgaagagcgaactcaacacttagatttcaccaaaatgaatacatttttctaagaggaggaacttgaaaaactacttgagagatgaaatctaatcttgtgaagagcgaactcaacacttggatttcaccgaaatgattatatttttccaagaggtggaacttggaaaaatccttaaggggtgaaatctagtcttgtgatgagcgagttcaacacatagatttcaccgaaataatatatatttttccgagaggtggaacttggaaaaatccttgaggcatgaaatctagtcttgtgaagagcgaactcaacacttaaatttcaccgaaatgaatatatttttccaagaggtggaacttggaaaaatctttgagggatgaaatatagtattgtgaagagcgaactcaacnnnnnnnnnnnnnnnnnnnnnnnatatttttccgagaggtggaacttggaaaactttttgagggatgaaatcttgtcttgtgaatagcaaactcaacacttagatttcacaaaaacgaatatatgtttccaagaggtggaacttaaaaaaatccttgagggatgaaatctagtcttgtgaagaccgaactcaacacttagatttcaccgaaatgaatatacttttaaaagatgtggaaattgaaaaaatccttgaaggatgaaatctactcttgttaagagcgagctcaacacttagatttcaccgacatgaatatatttctccaagaggtggaacttggaaaaatccttgagggatgaaatctagttttgtgaagagctaactcaacaattagatttcaaaaaaatgaaaatatttttccaaaaggtggaacttggaaaaatctttgagggatgaaatctagtcttgtgaagagcgagctcaacacttaaattacaccgaaatgaatttatttttctaagaggtggaactttgaaaaatctttgagggatgaaatatagtattgtgaagagcgaactcaacacttagatgttaccgaaatagatatatttttccgagaggtggaacttggaaaaatccttgagggatggaatctagttttgtgaagagcaaacacaacacttagatttcaacaaaatgaataaattttcccaagaggtggaacttggaaaatccttgagggatgaaatatggtttggtgaagaaggaactcaacgcttagatttcaccaaaatgtttccaagaggtggaacttggaaaaatccttgacggatgaaatctagtcttgtgaagcgcgaactcaacatttagatttctctgaaattaatatatttttccatgaaatggaacttggaaaaatccttaagggatgcaatctagtcttgtgaaaagccaactcaacacttagatttcaccgaaatgaaaaaacatttccaagaggtggaacttgaaagaatctttaaggaatgaaatatattcttgtgaagagcaaactcaacacttagatatcgctgaaatgaatatattttttcaagaggtgaaacttggaaaaattcttgagggatgaaatccagtcttgtgaagagcgaactcaacacttagatttcaccgaaatgaatatatttttccgagaggtggaacttggaaaactttttgagggatgaaatcttgtcttgtgaagagcaaactcaacacttagatttcacaaaaaggaatatatgtttccaagaggtggaacttaaaaaaatccttgagggatgaaatctaatcttgtgaagagtgagctcaacacttagatttcaccgaaatgaatcttatttttccaagaggtggaacttggaaaaatcttctcgggatgaaatctagtcttgtgaagagcgaactcaacacttagactccgccgaaatgaaccaattttcccaagagtttgaactatgattggatgaaacatagataaggtcgcagcttccaagttgaagtgactacatcaagagcaagtttctccattattgtgtaacttaattccggactggttgatgacttgcccaagtaacgaatcggctttcactctcctcggtcttcacaaattattactccactaacggcatgatttgaaaatgagatgtataagtataatttttcatcggcttccggcttcagagaattagagacgacatttaagtatgtctttagttgaccgaaagcatctttcacatctttcatccaactaaactccttgttcccttttagtatttgatagaaagagaggcagttatcggctgactgagatgttaaccggtttaacgcggtaatcctaccaaagagtctttagacatctttgatgttccttggggctagcatgttcaaaaagagcgttaatctatcttgggtttgcttcggtttctctctttgttgctaagtaaccgagaaaatctctggatgggactcagaatgtctacttggcaagattcaacttcatctgaagcttgttcaagatattaaagcattctcccaagtcttaaatgtgaccgctctcttttgacgatttcacgagcatgtcatctgtatagacctccaccgtttttcaagatgattatcgttggtatgtcacacctacatatttagttcacacgacatgatcgtaaaatagtatatacctcggttggtgctgaatgaaatatttttcttaatcattaggattcattgatatatccctatttttaccgtttttaactatgttttaggtataggctttagagtctaattgttatttatagagttttttctagtctttttcaggtctttacatgttttagatgcatttgaagattatggagcattttggagcaaaacatacaatttaagctgcagaagcaatccagagacgaaaatgcacgtaggtgtcgaacgacaccacccctggtgtcgagcgacaccaatatctgacggcaattgaaagacgcaacttattgttgttttgaagattttttgaattcggcccaaaactttctcctatgtttaatgaaggcccaacacgttcttaagacatatttatatagctttgaggttaatgtttagaccctaagctttgggaggctattccctttttcaattctgtactttgggagcaaaaccctatggagactccctttagataagatctttcttactctttctcttgatatattgactaatgatttcttgttcatactatgatttgtgtttcttttatcatgtctgagttatccacttgttaggttaagggtttctcattagggattcatatggtttagtaaatcgatccctggtaagttatctatagaattcttgtatttttctcgcttactccagatttgaatgccactggggatagtgacgtttaagtctgggagaggcacgtttttctttttgagtcttattcttactcttatttttcttatttttgagtcgttttattgaatcaaaattttgttaggaattatgatctctattctttagattattgcctggttgattaatgctgcaggtttgaatcaatccgactattggaaaatccagatggcaaaccatgagacttgaggatatcctggtttctaacacaatcctttaaggttggagctaatctcactgctcttccttgtacctcttcaagcagttagtattcataaatcttgactccttgttgatacctgatattgagaccaatgtgataaaaagaatatgttcctctccccttataaaaacaaaaatataatgagagatggagatgactttcaaatagtgtatatgggtaggaatgtttcctatgacctcattattataccttaattggaatgatcaattataaaggttggaaaaatgtcgagggtgtcgatccagtatgcgagttcccctttgtttactctctaaaaataataagtctgggggagagaaagaacatcgaaaacgaaaaacaaatatataaagaatggtcttgaatgtcagcttgtttgatgagacccagctatgaaagcctggtggatatagttctggaacttaggtatggaatctagaatgttgtgtaagcttgtagagaagtacatgttggttaggatttgattagaactgctaggcatatagatttggttagaatgatcatggcaatagactatagaatgttgggagtttctttgttttcaaacctcttccacgggttcggcttttgtgttttgcttgaggtcaagcaaaatctaagtctggaggagttgatataaccctatttttactgcttttagctatgatttacgtataggttttagagtctatttgttatttctaaagtcttttctagtccttttcaggtctttatatgtttgagattcatttggagataatggaggattctggaggaaaactgagaatttatgcttctgaagaaacccggagacgaaaatgcacgtagaacttattgatgtcaagcgacaccaatacctgatggcaattaaattgcacaacttattgatgttttgaagatttccaaagttggcctagaactttcccttatttttaaagaaggcccatcacgttttagaaacttatatattgatttttatggtcattgtttagaccta

SEQ ID NO: 38402 - DNA, 5908 bp, Arabidopsis thaliana landsberg
  unsure (1)..(5908): unsure at all n locations
gcaatgtgattccatagaagacacaaaaaagttgagagcttaacgcattacatgcatcctatcaagtttggccttttaaaagcaggccattacttcagaattacaaatttgagataatatagtatgctgggtgaacttccaaaagaaagccaatgtcaatttgagttcaccaacaccactagtgaattgagcacagtatgacgagatcaccccaatagttttcaccgtcaatacctgctcatcatagagaactggcatgaaacttgttcaatgttgaactgagcttaaggaaatttgtaagtaattgtcctccaaggaactatgcttatggaaatttgtaagtaattgtcctataaaaacaagaaaagaaatcatacagcttccagtacagctgttgtagtaggaacagatagccggggttgtcttgcaccccctagttttcatatgacagagccaggcagagcaccattctcctcagtagtatgagaccagaatattgaacaagatgaatcagcaaatggaatcagctccttctgtattgtcatgccaggaaggaaccatcatagtaagccaagttagtgagaggacaattctattattgtgtatcaagaaaaagtgttggcacataccagtattgataagagaactacagcaaactttttcttaatactggaagcatcgacaacaatctgcttgccagtttgctcatcagagccaatgcctgacttgcttttcaccgaagaactaagctcagaaattccatcttgcatgttctggagctctaaaagcatactcagaataaagattaaaaacttcgcaggtgctcgttttaaatggttcttctcttggaaaaaactaaggccgttattttgcacaaactgcagagatagggattattgtcaaatttgcaccagaaatattttgttgacaggtcaaaatcaaagtcaaggaatacaaaccattatgatatcggtgagatgttcttctttattaatcatgaggaaaaatactcttgcccatcgttttgtttgggaatcccatgcctccaagtcttcatcatcaaaactctcaacattatcactgataaatcctttcagatactcataaaggctcgccagaagacgagtgccatcagtacataaactgttggaagtctttctgttgcacccctggagccattctaacatcattttgcgcaataaacctgacatagaagaaagcatatgatgttagacgatgaccttccatttactttccatatgtaaatagtctcccgctcaccatcatggtcagtaaactcccgaggaattgctgaaacaaactgcaatagtgttccaagaggaacattacaagggttcaccacagaagcagcagtttctaacactttttgataaactagaaaatggaaaagaacaatcaaaagaaggaattttagtgtgtttaatatcgtgagggaagctacaaaattataattccacatacgtataattgactttaacaagataactgattagtgacctcgaataccgtatttatgattaaaatgctgtctgctgctctctgcaacaaacttcaagacatccagtatatgtgtcatatcatcttgacttaaatgtccacaagaagattcctgggcagtcccagagaatttatcttcgaggtgccccattttcttgtccccgtatcctacaactacatatgccgtagaaacaatacattgtacgagagccataaatccagctctacaaaaagannnnnnnnnnnnnnnnnnnnnnnnnnnnnnnnnnnnnnnnnnnnnnnnnnnnnnnnnnnagtaaacagttcaataacataatgatttttatttatggtttaataattcacagaccctagagaacatatccagccgcacatgaccgataacatatttacatgaaagcaacaaacataaaaagttggaattgtaacttgagacatcctaccttgggttgaggcaacttgtgtacgcacacacatattgagctgcaccttcaattgttcttgatgtatagattcctttcagccctgggagagcagaataagcaagaaataagtctagttatccgttatcacttcggcaagatggctttaaaacaatgaagagttccaatacaatttattaaagacattggaatacatttcttcaagaagcacataccaaaatccttgtggtgtgtaggatcattcaaaccctctatgaaaggaccaagaacgaaagtttgggacattgattgtgtacatgttttgtatcttctccactcgataccgaaaaatgactccatgaccgtgcacctgactaaaattgaaatagatgaattagaaacagaactgatataaatggaggtctgaattaaccaaagtgtgttgccaacatggatactttactttaagtgacgctctatccatgagtaaaagagaatttttggccacaatgggacaacttcaaatactgattttatctgatgaacaagtgtaagaaattgttgaatactaactaaacaatatgctacaacaagcaaacagtacctagagggttatcatgacgaaagcctcgattccaaagaacctctaaccaattaaaaattttagcttcttcatctggagtttccatgtgaccatgatgagagttattacagtcggatttcaaggttccatcatatctgagagatgacttgattaataaatcaatctgaaaggtagattaaaaaaagcaatgagcagaggagaaacgcatcaagagcagaatatttacaaataccagagagattaactgacctggttactccatgctgcttctacaagatgagtgccgtactcctcaagcatctcatacaagagcagaaaagcttgccatccctgctgactagtcaacccagagtcgacagagccatacaattctccgacgccaagcgacttggcttccttttctgcccacgtctcctttcttgtcatagaccgattaactgaattcccttcgggcttcttctcagaaatggtctcactcacttcaataatggataaaactgatttaagtatatgcaatgactgcttccttactaagctctcatcaacaacctgaaaagaaatgttttgtactcatggatgaccctattgtggaaattggagaatctgtaagaatagcggtatttttgccataccaagcctatcttgatttcatgccaaaactcttgttcagacctcaagtcaaattgaacagcgtctttttctgaaacaaaactttcagttccgtcagtccaagagccagaagaaagacacaaagacagaacactgtaagcatcccttctctctattgatccaaccgagaacagcttcttgcagcattcccaaattctttttatgaagccattcctggagtttacagctttaaaaatcattaaagagatcaaagaaaaaaactaaccaaaaagcacataaatttttggttcttaacctcaccttgaaagtatgaacagatttccttggtgtgagatcttcaaggatgactgagaagagaatgccttgaaaatagcagggaggaggaaactaacagcacaagaacgatgttctacactttgtgacaaaagccgctcagtcgtattacacaaatcccaaagcataccagctgcaaaactttccaccttcggagctgcttggtgactttgaaaagcagcattcagaatcaaattcagaagatggcacgacaatggaattcgaaatgatccagacaactgtgcaatgtagttttcatccatatctattgtattcaaagaatcacggaggcagaggtcgccccatttgatgaaatctgattcttcgtgttgacgcattcccatcgaaaaaccaactgatcttagtaaaaatggcaccaagctcactcccaacatatccaatacattagtctcgatcactacatcaaagaacgattctacaatctggtacaatcaaacaaagaaaccaaaagaaacaacaaaatgatcaacaatctcaaggagatcaaaactctaaggactatagtcaacagcagaaatttctaccttattaagcatatccaaatcatatgcacgaaccatcttcatcaatggaataaacactctccacacaaatagctgcaacgcattatgattatccgtagcaacaaagcctgcttcaacctcataaccatcaattaaacaattctgtaatcactaacacatcatacatatctaaaaattcaaaattggtaactcaccaaaattctttagtagatgacaaagcccagccaccaatgaagctatgtggttgcaatcatcagaatcaaatctcttgtccccatttaccgtatcctattcaaaaacatgttcaaatcttaaattgaacaatccgaagcaaattgccgaagtgtgaaacaataaaccaatcaatcaatacctctaaacgaaaagggaattgctcaatgagagattcgaaaagagttgaaggagatacgcctgtggagcttaaaacacagtcaaggaaagcaggaatagctgctggtggaacttgcttgaagctcagtgacaatgaagtaatcactgacgaacccatttcaattgaagcttcgaacttcaaaaaaattggctgcaagcagccagaatagatgaagaaacgtaaacgaatttgaaattagtacagagggaagtgttacgaggaatctctctgttaaaccctttcaaataattttcatggcttaggacagataaaccctagtcgtataattaggggggcaattagaattattgataagggctttattgggcttaacttagtatgattgggccgtatgggatagacttcaggagaagaaaaaaaaaaaaatccggaaattgttcgggggattgaacccgacgtgaatcgaacacgcaaccttctgatctggagtcagacgcgctaccattgcgccacggatccggatgtttagatattccacttatttatatttaatcaacatgaaactataattagagtagtttttgattggtgaatttggtgttgtctttctttttcaatgatcaatcaaaaaagtattgacatgaagtttgtatataacatcaattttgtatttcactttctacacttttagaacaactctttcaagaagaaagaggaaaaagggctcatctatttacaatgaataagtctatttctaactgaaggaaaaaatgttggatcatcatcattggagccgagaagtcacattgatgaaggtatcttcgggacaagggatcgttaagcctcccatcggatgatcaaatccaaactcttcttcggatttactgagaagagcttgaaatgaaggctggtttaaatatgagacaggcaccaaatatctcttcttctggctctctcctacgtacaccgcaagaaacccttttggtgccgcagatcctgctccggtggagcggcttagaatcttctttgctcccaatagacttctcacgaaagccatatctattgtttttttgtttaaaatgtttgaattctttttgaagcttctgaagatgtatgaaaagattcaagttattggatttcttgttgttggttgatgattgaaagagtgagttatgtgagtatatatatagcaagatcaactaaggagttgaaacttctctgaaaaaatcattgaaacttgtggttttgacgcgttggacatactaaaacagagaacatggctttgtctttaccatttggaaagatgcattaatgaaatttgttttgatgacataattattggagtgtgtgggacattaaactacaaacttcatatgcaattcacaagggactgtcttctcaatgttttttagatatgacatatgctattgtcaataataaaagccagcaagtttctctcttctccatgttcagtgatgatcct

SEQ ID NO: 38403 - DNA, 2495 bp, Arabidopsis thaliana landsberg
cgattcctcttaatatgtccttgaactccacaatgataacatgtaggaccatgaaatctcacatcataagcattcatcaatcgatttatttccctcaacaatctgaaacaccttggcctaatatgcccaacagtaccacaatgatgacaaacaggtcgaaaaactcgctgaggtccattcttcaattctggaatttttcttaaagctgatgcagtctctgtaccagttctcgtatcagacgctgtctctgccatagttacagtttccttcacagtttctgatgcagacatgattttaccaccataaacaaacatcggatctgattttgaaggatttcctttaaaccctaggccacacttatcactcttgccaatattcaaaatatgatccaacttctttgtgccattattaagcatcctcaaattcttttgagtttcttcaagttgttctttagcttgtgacgcttcttcttctttctctgcagcaaatttcagtgttttaacaactttagcctctaacttgagcttctccttagttaatactgaattctcctcaactaccttaacacaatgctcatataaagctttgtaattctcagcaaactcttcatcactaatacttaaatcatcatcatcactttgatcattatcacttccagttgcaggtcctgttgcagacgctgatgtagaccctgttgcagacgctgatgcaggccctgatgcagatgctgacgcaatactagactcaaaggtcgtaaaggcaactaaattcttcaattcttcaccatcatctgaatcaatttcagaatcactcatgatgaatttcttctccttttccttcatcaaattcgcacattcataacacatatgtctaaaacctttgcactcaaaacatcgcttgcctttagatgacttgtacaatacttctttgtttccatcaaccttaaactcgtgaagagatctatttcgttcattccatgaaaaccgcttcttgaatggcaacctcaatatctccatcaatcttgatttcaaactctgtcttatttcctgaatgatcttctgaacgatctccggaacctcaccctgatctactcgaaacaagactaaatctctatcaagaacctgctctgataccacttgtaagtgcggatgaggtaacaataaagtgcagaaagtaaagagacaagaaatttgttaacgaggttcggtttttcctactccccgggaccacgtccagatttcgatttcactagaacaagaaagcaaattacaaccaattcgcaaacacgtaaaacaagcacacccctcttgatttaccgctcccttctataaacgtgaaaccttaaggataatctctacccttaactaaactcccctgagtctagatttaatcaggataacctaaccctgagctaaactccttctgaatttagactgacttcaaaacaaaaacacttgatcacacaagtacataacccgcaatattaagttgcacacaatctcacataaagctttcaaatatttcttctttatgcctcaactctcttgcctttccaagacgtctttagatcctccttatatagacaaaacgatttcctaatacacttttcttttttcttatcaaactctaatttcataaagtgttccaaatctctataagtcttttttattttttaatcaatcctttaaacacgttccaaacatatcttttcaaattttttagaaactaacactcacacaaaaacaacaatatcttgcattacttcttgactcattcagcgactccatcggcaacatcttgtactacttcttgaattatttagcaactccattagacatctacttcttaaattatttagcaactccattagacataaactacatcgtccgtaagaagtagcacgtttaattaattacacttcaacagtcgattttcgccaacttacaaaaatccacaccctaatgactttgaccataattctacacaatcaaccataatttcttaatcataatatttttttgggggttgaattcataatcatgcaaactacaataccataatatttcataataaaggttacgagaaacaaaatatatagtgggtcaataaaccaaagaccatatataaaaccaaacaacatgataactagcgaggtctctaaatgtcgtagatagtctcctggacagccactttccgaaccctttagcatgttgttcctctatttccaaatcctttcagatggtaacttgggaggtcttattgcctatctcacaatatgagatcttcattacttttgtttatgcatcaactgacaatggtttaagaagcatgttgtgggatgagatcccgaagaggaggctttttgacaggaatccgaacaagtagatgcaaccggagagaaatgaggtttccgaccgggtgaggcggcaaaagatcctgtttcggtttttttcttcctcatgaggaaaggagggcctgaggaagggagatagcag

SEQ ID NO: 38404 - DNA, 3616 bp, Arabidopsis thaliana landsberg
caagttgaatataacgttcatctgcaatagctgcagctctgtatcctacttggtgtcgagcgacaccctggtggtgtcgatcgtcaccctcaacaatatcaggtatcatgtttccctactcatcgattttttgaccatcctcgttgtatgcctgaccagctgtcccttaacactcctgcaacatcagatataattatcaacatcttggtgttgcaattaaattcttgaagctcctgaaacacaagaaaaagaaaaaataaaaacaagtgagaaaaaaagaacaaaataagtctagtctaaattctacacctataaaataacaagagaaaagagtttagaataatcttctctaaagggagtttccacagggttttgctcccgagtactaaagagaaacaggagaatagcctctccaagattaggtctaaacaatgacctaaaaactatatatatgtcttaaaaacgtgatgggccttcattaaacataagagaaagttctgggccgaatttagaaatcttcaaaatatcaataagttgcgtcttgaaattgccgtcaggtgttggtgtcgctcgacaccaggggttgtgttgttcgacacctatgcggattttgatctgcgaactaaatctaaggtctcataatttcctaatgaaactaacctatataaaaaacaacttacctgtagaggtgcacccactccttgttgagcattatatattacgtattttaaaacctttatataatattaaaaatatttcaaattttaacaaaatactctttacacataaaattggagtttatattcataccaattagcaaattatataacacaaactcatatattaattcaatataaatgacctacataaattgatatgagaacagatcaatgaactttatcaaacacaactcaccataattctcacacatcaaatagaaataaataatactaagcagacaaaacccacagtaatgttcaatattgtggaataaagatggtactaacctttcgtgtgataagttactaagatcagctccaaattcccattatttcaaacaacaaaatttgcaaaacaaaattaaagaattagtttatcatgtttcatgtatttggttttgcaagaatgtccgagcattgacaagatataaagactccaaaaatgctcaatacaaacagttagagcaaaccacacaaacaaatagatctaatttgtttcgcagatttcgaacaacaacccaaacaaatcttaatcttgaaagcaaatttgtattgagagcaaaccacacaaacaaattgatatgaattctcgaagaaacagttagaagttcctaaaccattcaaatgtgtccgaccaataaataaacagtatttttctttgtttcgtaaatttcagataacaaaccaaacaaatcatcttgaaagcaaatttgtactgatagccacgcctaaagcaaatcacacaaacaaatagatctaaattcgcgaagaacaatgacatgcaaaaaaacaaaactttgccgattcgaatcagtgaaaaatccaattacagactttaagaaaccaaaatcaatcaacattagctgtcgacattcacaaaatttaaaagaaaacaagccagattaaagttagaaacaaatttgtagattcagagacacatgccttcgattagagctcaactcggacagagatagccaaaattaggaccggcggtaggtttagtctcgtggcaacagtaaaggacggcggaggggagatttaataagtgtgcattttacatgttttgagcatccatttgtcatcactatttcttcatatcatcactgttttataccatttctcatcatttatcatcactttacatgtttaggataggtttgcatgcatgttgcatatttgtgttgatttcaggtgatttggagctgttgacgagctaactggaagaagcggacctgatcatgacaaaccactcgacctagagggcgagtaggagcttcaagatctcaagagaccactcgacccccaggtcttgtagaagacatcaccacttcacctcaccactcggccacgaggtcgagtgtcctcatctccatcacctgaccatcactcgaccacatcactcgaccctgaggtcgagtgtctttaccaccattacctgatcatcactcgaccccatcactctacctggaagtcgagtatcaccatcaccaccactcgactacacactcgatggcaagcttcagagtcttcttcattccgcactcaaccagacactcgagcacaaggaagaaaagaagactccagctattcactcgatccccactcgaccacatgggtcgagtatagttcttaatctgtcccaatactgcatcgttttaagtattagggttttggaatatttggctataagtagcatgtacttcacattttcgcagagaggaagttttttatctaattttattccgcagaccttgtgtgctagactttttgtaatccggatttctctttatctattcagtattcagtattcagtattcagcttttgatttcttttgtttactgttgttcattctgttatcactcttctgttacactgttgttatcatgtttttagcttgttcaacgtttatgctttctgttatgatgtctgagtagtgaataggtttgtgaggatgggttagagtagtgtagaattctcagtatgttaggtgattgagtattgattgatagatcccttccggattagttgtttttaatgcctattactttctgataaactggaatttgagcccagacattttcgcgcccaaaaggtgttcgatgaaatatctgaaccactaattccagagattcgtggccttgtaccaaggtattggttgcagggagcgttttggctttaacttgttaattcgtaatgcctgttaggttagctctcgtcaatggtgattgagtctgggactaggttaacttgagggtctctgttgcagtggcacttagatttggttaatgaacttgttctctagggataatttattgagcatgtcaatcacctgtaaactgaggaatcgaaactactcaattaccccatcctcgcgaattctttatctgattgaagtctttgtttactctactgttgtttattgcatcttgtcatctgttgtttaatttctgcaattctttcttgttactcgacctcatactcgaccacccagttgtctggcaacagactgtgcagtcgagtatctgtgttatactttctgtctgttactcgacctgtcactcgacctcacccagtgctctgcaaagagctgtgttggtcgagtgttttactgtttctgtttgattttccgttttctgcatgttcacttaggactgctagaacacaccaaaacttgttattgcttggcttgacttagtgacttctgatcacatcttgattgttagcatcacacccatttggattgacaaccttcagtactacaacgacatgatattgctttaggattaattgatcttgaaaaccttttatcaatttggcgccgttgccaattgggtgtatgtttgttacatttgagatttcatacttgcttagatcaagttctttttcaatattcttt

SEQ ID NO: 38405 - DNA, 10855 bp, Arabidopsis thaliana landsberg
tgagagtttcaaaacatcacctgtaagtgagcacaattgcaaagataattagctacttttgattctcaagaattataaaagtctcaactaataaactacattgtttgacagactatttgaataagactttgtagcgtaagtagtatcacctgaagcatttcgagccatttcatatactggagaagcttccaccattgttagcatctgctggatgagaggaccaagctgcagagaaacataggcaatctaagatacaagcgatcataatctcatcaatcaatcttgtgaagataatagtaccagccctaagatcgcaagtaagaacgttgagctacttttttgtagcctagactctgataatataagctataggttgctaacatcaagtacataccctgtgatctctattggagtcatatagtgaaggttttaaataggacaatataagagaacaatgacaagaacttatcactaatacactctaaaccaagcaaagcttaagagactaatgataatatttacctgctcaaaatatggaaccgcctctgtcgctgatttgttattgaatgaaataatggcattaacctttcacaagagagagatttcatttttgtcacacttgcttagaattaagacaaagagaagattagaatcaacctaacctttggtatcttctcagcaaaataacttccggtcaaaacttggagcagtgcaccattactgtatagaaagttgaaaacttgacactagtcagaattcaggacacagagaattcagaaggtttaaggaaggagagaaaagttgaacacctgtgaccaactgagaaaagaggaaggtcagctaaatcttcaggcttcaagtttgaatttggaattccagatgagacaatcgtgtccaagcatgaattaaacctctcataaacttgcttagcagcttgttcatgatcaaatgtaacattgtacggcacagatactatcaaatacccttcctttgccagtagctccttaaggtaactacaaatcacacagatacaaaggaacaacatcttttaggttatgtgaaatttgatgaactcggagaatcaaagtacctgtaagtgagttcaggaacagctccgacgaaggcacctcccaagaatttaacaatagcacgcggtttcttgaatttagtaggaggaggaatcactagacaagaatcaagcctcgtgtaaaccttattgtttctgctgccaccggtcgctgtgacggtgagacacaaagctcgagctcgtttgcttaacagagtcgccgggattagttgagtacccagaaaactcgaagtggctaatccaaactccattattccttttcttccctacagttttgtgtgaagaagaagaagcaaacgtttagtcagaccttttttttttaacaagttttttttttttttcacagaaagttatttttattagggtgaattgcaaaaataacagttttcaaaaaaattattaaatatgtggctttataatgtggataatgtagtggaaagaaatatttaaggctccttttgagtggagagtaatcttatatacttatattataaaaaaagaaatttgatttttttttatccgtaaaaggaataaatgacatagaaaaccttaaaaatattgattatttacgatccaaccaatataaatggatcccaaaattatccaagctcattgtatttgggtcatatccaataaaaccctagtaaaacactaggttttccaaattctctgcggtaaaatcgattcacgatctctttcttctctttcttttctgtttttttccttatttcttcactgtaaatctaaatccagtaaaacaattctcaattctcgtcaacgataacgacagatctgttcgtcgatcttggtatatctatagaaaactaagaaattggataagttaaaatcggatccgagttatttcagattgggttttgtgatcgaaattgattgaagagtagtactaatccaaatgattttgtttgtaggtttggagaaatggctcgaacaaagaacgcaggtgtccgttggcggcggaggtagtttcacagacaatcaatgacgaagtagtagtagcgtcggctgctgaagtggattctgaagcaacaaattcaatctctaacgacgatagagcggtatgaactttaaactttacacaattagcagattatagtagaactttgccgattttgtaactttcaaaattctgaaactaaagaagtataactatgtatgaattaggtatatctttgttgagattgtaacttagaaattttaaaaagtatatctatgtataaattagtatatcaatgcataaattagtatatctattttgaatctaacttagaaaattttgaaactaaaaactagggatatctatgttcaaatataacttaaatattttagagactaaacaatctatctatgtataaattaggtatatctatgttgatttctacctttaaattatatgaaactaaaaagtatatctttatttaaactaggtatatctatgttcgaatataacttagatattttagagactaaacaatatatttatgtataaattaggtatatctatgttgattcctacctttaaattatatgaaactaaaaagtatatctttatttaaactaggtatatctatgttcgaatataacttagatattttagagactaaaaagtatatctatttttaaattaggtatatctatgctgatttctaccattaaattatacgaaactaaaatgtatatctatattgaaactaggtatatctaaacttgaatttaacttataaattttcaaaactaaaatgtatatctatgtataaactaggtatatctatattcgaatctaacttataaattttcaaaactaaaaggtatatctatgtataatctaggtatatctatcttgatttctaatttatctatgttgctttctaaggtatatctatgttgattgcaggattttgatgagaaaactgaagctcttcaacctcttaaaatgtactttggtccgagtgagtatacaaagccattcaagattacagcaaagtgttatcttcataaggcagtcggattattggagactcatcttaaagagtctgagttgaagtggttttttggagcacccacaattcaaacacttcttccacatgcataaggatccaaatcataaggtgatgggtatgtggctgttatttcttcgtacagcatgtttagataagaagaaggaagtatgatttattgtcaatggcgtaccgatccggtattctctcgaagaatttgcactcatgtcaggattatactgccataattatcccaaacccttggacagcttgggctgtaccacttttgctggcaagatgtttggacccggagcaacagttcagtatcttgatgtggagaataagttattgtctatgaaaaaaccttccgatgctcgtctgagggtagttgtgctatatttcttttgtagtgtaatcgttggaaaaggtaagacaggaccaaacgcaccaaatgtggagaagttcttccttagggctgtggctgatctagagttgtgcaaaacatttccgtggggaagatttgcatttgaagaaaatgtgaaagacattttctatttgatgaaaaagtgcaatggagtagttggtccacaaaaggtgtttcctagttttgttatgcctttggaggtatgtcatttcattatgcatttatgaattgttttaagaaagttaaactgtgtacaactgtgtttttattagcagttatacttattagtttttgaaaaatcttgtattgtttttatgtagtatctagcatttgaggcgatcccagttctcagggaaaatttctgcgaagatattgaatccgcagatcctcagtgtccccggatgtgtaaaatgaagtttaaatcaagcactatgaaagggtttccaatgtcagatgtgtatgacaaactcggtacaactaaggttagtgatgacatatttattagttatctatcatgtatcatgtatgttctatcatgtatgttatattaattactttcttatcatgcacaggacattcagagtatcttggctccaactcctgatgagaagctacttttggaaagaattatggataaagagtgtggagtgaatgatgtcgatgatctaatagctgatggttggaagaaacgtctagttgatgaggagaggactatatgttttgaaccgttgctcaatgaagatgtagcacaccggagctttgtggctaataaagctttgtctactgtggtaaaagctccaagaaaagccgcagtggaaaagaaaggcaagggaaaggctgctgcagctctgactagtccaagtgatgaaggtttgactgaggttgtaaacgaaatgaagaatttgatggagaatggatttaagtccatgaacaagaggatgaaagatttcagtaagaagtatgaagagcaagataaaagactgaaactgatggaagctgcaatcaaatcaattcaatcaggcattggaactgaagacgcttgtggttcaaaggagattgatgatatagaaaacgagctggaggaagggagtgatgcagagactgagatagacaaagaggtggctcaaggtgataaggagagagaggttggagaaacagagactgagatagacaaagaggtggctcaaggtgacagtgataaggaggtggctgaaagtgagaaggacaaagtggtggctgaaagtgagaaggagaaagaggtggctgaaagtgagaaggacaaagaggtgcctcaagatgatgagatggatggagagaaggagaaagaggtggctgagccaagtgagattggggtgcctgaaagtgagaaggacatagaggtggctgatagtgagaaggagaaagaggtgcctcaagatgatgagatggatggacagaaggagaaagaggtggctgagccaagtgagattggggtgcctgaaagtgagaaggacatagaagtggctgatagtgagaaggagaaagaggtgcctcaagatgctaaggtggctgagccaagtaagaagcgaggaaaggcacatgaggatggagatgatcctagtgaagagggagttaaaaagccaaaggtggtcaagaagctggcagagtcgaggacggatgctaagccggtgtatcggagtcctatacagacgaggtataggaggaaaaagacaaagaagaatgtttaagcaatttcaactcttggtttgttttaggtataactatgttggttgttcaaaactccgtacatctgttcgaacttggtacttgtttttttttgtatttctccttatgcttttgaaaacttggtacaactgttgaacatgtttattagttttttttgtatatctacttatgttaatttcaaaacttggtataactgtttctattgttttattttggtatatctacttacgttttgtaacagtaggtacaattatatatttttgtaattgataagaaaagaatatgaaccgaattaactagattcaacacgacacttagtcttcataattagattcatatccattcatcacattaaatttaatacttagtcttcataattaaatattacaacacttagtcttcataattaaacattataacacttagtttttttctacgacaaacagaacatgccaacaattgccatggtgattaaacagccacaactaaaaacgattaccatcttaaagtccttcccctttttgttcttttccatcagatctctttccatcctctcttggttcctttccatcttcatcactcttacttcttcttcaagaacaccgagttgaaattccaactgttcaatctcatgtgtaaaagcctcatctacccacttaaacacatgattgtcgttcataagctacattttgaaattgtaaaaattgtaaaataacatgtatatctatgtataaactaggtatatctatcatcgaatataaatcaggtattttagacactagtcaaattaggtatatctatgctaaacgatccatgtataaacgatatatctatgtataaattgttaaagtttcacacataaaaattgtttacaaagcatcaaaataaaaataagatattacctttctttctgcagcaaaaccacaccggtaataacgacggtacggatttggatttgatcttgaaattctctcaattgttaaatttttcttattttaattaataatataggaatataggatttttaaaaatttattttattgggggaaatgaaattttagggggaaaagtgaaattatagtgtgaaaaggaattctagtgtgaaaatgaattaaccgtacgacccgcataagagttgttcggaacaaaaaaggtggggcccgcaaataaatttgcacacagatattccaagttaacaggttgtacatgtgtatacatagtttgactttttttttttttttaattttattagatatacttaattttaaactaaacaaatttagttataccaaagagttttgatgttttataaacattccacatattttcatagaaaaatatgtctggaaaatttaattttgtgtgttatgcaatgttatgatgataataattataaagtcatcttcaaagtgtaaggtgtttcttgtataacaaatgaatttggtaaagactaattttttgaagtttcattaaattatgattttatcaatcagtagttttaatactcaacagaagtggtataatttgtataagaaataacattacatcaaattttgttgcaaattaagcacatttgttacatttgtcatagttgtacctttacaaaaccaagtttaatcaagttttacaaaaccagagagtacaaaaaacacgaatttagagacatacatagttgtaccatttacaaaattaagtttaaccgagttttacaaaatctgaaagtacttaaaaacatgaatttagagtcatacatagttctaccattagagaataaagtttaaccgagttttacaaaatcaaaaagtatttaaaaacacgagtacattaatttccacttgtgtattggccactcccctggctatcactttcgtggtttggaaaaaatcagctctccaagtttctgcctttcacacgcttattctttgggcaacgttctccaaccgatgggtgtctagtttcttgaactcttccctttttaacaacatgaaccggaggatatgcaaacaattcttggatttcacttggaataacccactctgacttatgcggcacaggataaatggtactaacatatgccataagccacatctcaacaaagtaatatttcttgatcaaatcatataaactttttacctcctcggatctatctttttgtttcaagtgagtcatcacagccgctattgcatgtacacaaggatacttatccaagtcaaaacaacgacaataacaacttttattcctcaagtccaccacataggtcttaccatcgcgaccaatgacactatattaaagctcgtaggtgttaagctctatcaccggtaatttttgtgcaacttcacatgtttcatgtatctcgttctccacaaaaggaacaagtctctgggcatttgatccacttaaggcttccttcctattattgcagctccattccgcaaatttctcaataactgcatctatcataggtaatagcgcataccctctcacatccctaaacacaccattcatagactcaactgcattactagtgtcaatgttgtactttactcccggaaaatgacatcttgcccatttttccaaatcagtgttttcatcaagataggtggctaccttagggtgccttcttctaaactctgcatattcatgttcaaactcagacactgaacaaatggatgcaattcttctgaacgttttagcaaccccttctttgttgtatgcaactttcgttctcacattctgtgacaaatgatacacacagtttccatggtgagagctcgggtacacctcagccactgccttgatgaggctagaatttctgtcagacataaagaccaattccgaactgtctggtataacagttttgagagtttcgaaaaaccacttccaagtaacatctttttcgccatcagctacagcaaacgctaagggataatggtgatgattcgggtcttgagctgtggcaaaaatgagcacacctttatatatagtcttcaaaaatgttgcatccacaataatcacttttctcatgactttaaatccttcaatggcagcccccaaagcaacaaataggtacttgaaccttttttcttcatctaataccacactagtctttgtgttaggattcaccttctctaacatatacaaatattgataaaccatcttgaaactctcctcgggactagcacgaatatcactaacagctagttttttccccctaatagcagtcgagtatgacacagttgtaccatgttttccctgaacaaggccaatgagacttttaggagttggggtcttgtactgacctgaataatcttcatgcaatacggttgcaactaaatgtggtgtacctctctttttaatgcctgtagcagtattcgaccgtacacatgtatgcaacttcctatatgttcgaaccgagaagcgagttgaatccttagccttcgaaaatcgtatgtaccattcacacccttcttcagcacattttaccacataccgcttcttatccgagttgagtaatgttagtccaaaacaattcctatttgctcctatctctactaaatatttcacatcatcgctattttcaaattcttgacctattactagatcaagaccatcatcccatggacctttaaacttagaatgttggctgtcacgtggttcctcaacatattcacgaataccatcattctccttagtcatactcatattactatcaacaccattatccacatctctaagaggctccaaaggctctaaaggctccaatgtctccaaaggctcagcaagttgttctcctagtggctcatttgcgtaaagagttatagcaccaacattagctctatcatcattatctagaccaccgaaattctcctcttcataattcacaccaactgaactctttctttgtactctcgattgttgctcgtttacgtcaaccatttccaactcattaccgacttctacatgcaagacacttctacttttctcttcatccaacgtggttagataaacatatacatcatcatcatccctaatatataaatatgtaggaggtttaacacccgttggaatgtaactcaatttcagcttcatcgtagattcatctatctttatctttgtgcatatcttatccactaaccacgaataagtaatctcctccattgatgatgtcctaaacaatataccatacaaacaaactactttcggattccattgatatgcttctccggtttttgaataatatccatcataatcaaaatatatgatgatgctcattctcctggaaaaaacaaaaaaaaaacgttagctatacctagattttccagttctagcaaattgtacttcaaacagctataccacgctcattttcagaaataccagttataccataaatagtacttcaaatagctataccacgctcattttctgaaataccagttataccataaatagtacttcaaacagctataccacgtttctcagttatacctagattattctgttctagcaaagattttcggaccaaaaacattaatctgcctaagattaactacgaatcaaccattacagtacattaaaatgtcttaatagaccgagaatacatagttaccaacataatatccatcagtttcaaataccaatttcaaacctatcaaatctaattgaaatctacaaagtacaaacacaacaacacaagactagatgaattaagatgtccaaagtataagaagagaatggtaaagctcaatttgaataacggaagaaaaacgacggcgagcttggtcgatttgattcaacgccggaggattcgacgatggctgcaagtcgtcgatttcaattttgtcggacacgatgagggaagaaattctggagatttttttattggttaattttgtttttattttatgtattaaataaatggtattggtttggagagtaaaccataattagtttgcttcgtccggttcgtcgggtacgggtaaacaaggatttttaaaattcattcagagtatgagagtatatcaaattataagaaagtatttagactcatttttggagagtaaggagctttatagatcattacccacacacacaagtggagaaatcagctaagatattcattggtgttctactattttcaacgtgtgagtttcaagacaaattttatgttccaattgtattccatattcatccttctcattatatcatgagtgtgaatatataaatcaattatatggtttttaaaggtacatccattatggtacgaatcagatatgtatcttgcaagactaactttgattgtgttaacctcaaatgtccaacgccatttgtaacccccaaatgtgtgagcggtggttgtgaatgcccccttaaagaactcttgacattactgagtgataccaattatggtgtggctgcttgcattgactattgcaaggcaaaaggtgaaaatgcttatacatgtatcttgaaccattgttattgtcgcaaaccttccatgtaatattattaaggttctgtataagctttttaaatatctgatttttatatactatgaatgtcttttgaatatcgattatattattcaataacaatagtgtttatgtc

SEQ ID NO: 38406 - DNA, 5242 bp, Arabidopsis thaliana landsberg
aggggtagtggtgtcgatcgacacgttcctctacaaatcttattggcgagctgaacgggttggagcgttgtgtgtggctctgtggtgggagtctgatcagtctggggagttctgtctgtactggaagcaatgcaactgataggcttagtaagctctgaaccatccatgccaaactccatcttcgaatcacaaaccttgagagagattcttcctctcttcacatcaaacctagcaccaattgtagctaggaatgctcttccaaggataagaggatccttgggttacttctcatagtccaggactacgaaatcaacagggattatggagttaccaaccttaacatgaacatcttcatggattccttcagggattcgcttggaacgatcagcgaagaaaagagtgatgcgagtaggcctgtagtgagtcatgcctagtctctcagcaacagacttggacatgaggttaatgcttgatcccatatcacacaaagagcagcggaatctgcttgtggagatagagcaatcaagaacaaagctacctggaactggaagcttctcagtggtctgaccatgagtaatggtacggatgtactcagctatgtctactctctgtgccttctccttcttggccttaggcagcatgattgcactgatgtctctggtaagcagcttagcttcatttaaactaattccattatcaacaagtcgcttgacatacctgttgagtgaggcggaagatgtctctgaagcatccttaggaagagtattgaggatcttctccattatggctgtgcacttagcagcatgaatctcttgctcagaacgacgcctccttggataggggacaggaggagtgaaaaccggctcgggcagcataggtacttgcacctcacaaggtgcagtccggatccagtgtcaatcgacactagaggggtatcgatcgacaccgtcgtattgagtcgtctctgagaaaagcgtcccatatggtgtcgatcgacacaggagggtattggttgacaccatctctgcaactgcgagctccaacttgtcttcagtgtccaattccttccacacatcatctccttctctgatcaagatggcattgcagctcttccttgggttagtgatatgtctataatttgcatgttttcagtgttcattcatcatcattttgagtctagtttcatatcattcatcactgttttatatcatttcttatcattcttacatactttgcatgattaggatagctttgcaaacatattgcatttctgagttgttttcaagtgatttggagctgtttgcgagcaaattggaagaagcgagccagaaccagaggacatactcgaccccctggccgagtacatccagcaccatactcgaccccctggtcgagtgattttggagccattctacccatctactcaaccccctggtcaagtatactaagcttaggccactcgatgacgctactcgaccccctggtcgagtatcactttgccacaccacctgaccacactgggccattcactctacaagttactcaaccccctagtcgagtatcatcactcaccaccaacaccatcactcgaccagacactcgatcacatcttcatggtctactcaaatccgcactcaaccagacaagctgagcacaaggaagagaagaggagaagacgaagtgtttggaagcagcctggacctccatcggatcacgaagcccatctcggcccattatcactctatgggccaagcgattaggttattggcccgtctactatcattttatttcgttttgtataaatagatgtcttagggttctgtcctgacatctagtcgacattgagtttttgcttcagttttattttctgttttactctactgcgccgcttttgcttctgcaacctgtaattcgagatttttccaagttattcagattccgcatttgatttcatctgtcatcctttttttctactctttatctctttacttatgcaatattatcatttatctgcgtttatgtctttgagcatgttgtctgagtagtgacttagaattcttagggatgggatagagtagttgtggaatccttagtttgtagaatggttaagttttagaattgattgaatcccttcaagactagttgtgtttactgcttatttctttctgatcaactagaattcgatcgcaagcattcccgcacccataaggtgttcgatggaatgcttgatccactagttcatgagatattcgtctctatcccaaaggattggcagtttagagcgtttattgactttatcagtctgttcttattgcttgaggatttctatcacgggagtgaattgatctgttgttgaacctgttgtttagggatagcttgattgcgcttgttaaccattcggataggctaggataccactttattcgattaccccatccttaggaatttctcgtcaatctgatttctctgttttatcgtcatcgcttaatcgctctcattgcctgtatctttgtttctgcaattactcgatcaacttactcgaccacacccagtgtctgaaaacagactgtgcagtcgagtacagttgtctcatttcctgtctgttactcgaccagtatactcggccacacccagtgtctggcaacagactgtgcagtcgagtatatctgtttcatatcctgcctgttactcgaccacatcctacttctggcatcagcctgttgtggtcgagtgattttagtaattctgttattgtttctgttttctgcatgttcacttaggactgttagaaaccctaaaactgttattgcttggcttgacttagtgacttctgatcacatctcatctgtttgcatcacacccatttggattgacaccctaaaattctacaacgacatgatagtgctttaggattaattgactaaaaacctattatcatgagtagtaggtgggttaaggatgacgttgatgtttaataatttatttgaaataacaacaaagaatttgctcatttaataatatttgttatcttatattttctggtacaagggttttgtatgtcaattccttaaatgcatcttatgtttttgtagcatttaaagtgttgttagtagtattaaaccaatagcgattcatacaagctattttcggtggaattgttatcaatcaggatatgatcagagaacctaagtgatcatgcaagaaagtaactaaattaagcagaaatgaaactaaagaccaggaactgtcaaatgcaagaaccagaaagtaaaccaagcacaaagtgaagcactcggtcaagcaaactactaaacaggtcgagtacaatactaaaaacaccaattttgcacgagaactaaacaaaacgagcaaagtactaaagacacgagttttgcacaataaaacgaaacagagctcttaagaatggggtaattggttctagtggactcctcaatccattagctaactaacaaactcaatcaagctatccctagacaatagattcaaaaccaaatcaatccactttcgtgacaatgatcctcataactttataacttcctaatctcaattttcattgatgaaacataacaaagcaggctttaaacaccaatctattaaagtcaataagcagtctaaacatccaaggtcttgggctagaatctacaaatctctgaaattagttggttcagacatttcatcaaacacttgttaggtggagaaagtctgaaatcaattttcaactgatcagaaagaaaatagcattaagaactcctaaaacagaagggaatcatgcaattataaacttagctagctaaagaaaagaggaatccacctaaacctaacccatcctaaagaactctgaagaagactactcaagaacaatgaagaacatcatagaacaaaacccagaaaattcataaaactcagaattcattataaacttagcagatgaaagatctcaataagataaacaagtttacagaagaaatcaaatccaaattctcaacacaacaaccagaaaatgcaaaataaatctaagaacccaaatatctagaagacaaagccaagatattttgggcaaaaacataagaggtctattaataggcaatactaggatgccctaattgggaaaaagacaaaatggaaaagtcggcgctgcaccactcgggtcttggccgagtagaaaagtcgagtagcctcctttggtcacatcactcggcttcaggccgagtagcttcaatcgagcagcttcccttcttcctcatgtgcaccactcgagctccagccgagtagattggccgagtataatccttccttctcccttgtgtgctccgctcgatctccagccgagtagatatcccgagtatactccatgtccttctttggatcgtacaaactcgaggtagtccactccttgtgctagaaactcccaagttaaatccaaaagtacatgattcacctgcaaaacactccaaatgtaagtatgctatgcaatgcaatgcaaaatgtgaaaaggaaggaaaatggactaagaatgtatgaaaagagacatgaaactaagctaaatgcatgaaaaacaagggcttaaaaaggttaaaatctatgacttcctgttgatatagagttgtgattgagtagaatttgatagtggcagctcaggtcgctatcgagtgaagcaagcaaatgagagacagggttgcgatagagtagtttctgaggttctgttttagtcaataacagctagcaacaacgaaagaattgagagcgtttttggtagtgaagtagagagataaacaagagagatgttttgaaatcacaagtgatgaagaaaagtgaagagtgatgacacttatctccctttgcgatttgaatgagtggaggaggtgtgttgcttttaaacggacggatgggatgcaatgcccgttatgatgtcggcaacgtgataaggtgacaaaacatggtgctttatgtcggcaggatggggttccttcaagtcacgcgccttgtgatcgagtatgggttgttgatcctttaatttcgtgtcatgggctacaattggacacagcatgggctctttggagttttggtggagattgaaatccagtaggcttaatgggactgaggtttgtcattgacgttctgtggacactttcactcctccttgcgatctagtagaaaattgttatcccgaatctactatatcgcactcctgagctttcactcctatgttgtgatcgagtat

SEQ ID NO: 38407 - DNA, 979 bp, Arabidopsis thaliana landsberg
aattatgacctgttactcagtagaaagttttcttaaatctatttttcacccgttataatattttttcatgtattgaacaatttatattcgtttttaaaaattcaaattatggcatatgcgaaaaatctaattctttttttataatgatgattttattttttcgaaaaaatagaatcatataaagatgacaagtgaactataataattaataaaaaattaatatgataatttagatatcaaatctaatttgttgattttaattggttactttttcggaaattaataatgtatttcgtttttctaattaaattaaattaattgaaatttatatatcaaatcttatatgttaattttgattggttattatttttgaaaattaataatgtatttcgttttttaattaaatttaattaattaaattagtatttgactttttaatccttaaaaagataaattaatttactctttaaatttttatttctaatggcatacctatgtaattacttacaaaaattaagattacatttaaaatgtacttcccaaataatatagtaggatgggatcctttgttttgtttaaaagtgatctttagaatcagcctaagaaaataaaaatgtaagaaaaaacaaatgattggaaactaatcttataaatcattttgttctttatgacaaatcttgttaaactaacattgcttatacaagtgaaggacaagatctggtggaagccaagtgccaaagaaacgatgagtgccatcttctgccttgtgccaaaggtctagcatattgcaacaatggaacttgtgagtgtactcctcctcctaagtcatacaccgtggaaaaatctacaaacataccatgtaccacaaccaatgagtgtagacagaaaaaatgtagaaacatatattgtcacataaccaataagtgtatatgttgtctcccaccaactgcaatacttttatgcgtagatcgaagatgtg

SEQ ID NO: 38408 - DNA, 2382 bp, Arabidopsis thaliana landsberg
tttccacgaagattataagtaatgagagtttgattttaataattaccactttgtaatgaatgcaaacatactagctctatctactctgctatgaaacatcgataacacaaaatggtagtaagatgataaagatatctacgtggaccatatatgttaatgtacacgtggcattgttgattttcaactacaaagattacatcgcaagtgacgagacagttagcaaatgaggacgtaaggaaaggtgatttgacgcggtatcacccatatctataagatttcgctccttattaattacatgctgcaaaatacactttagaagtgacctctatcacactctcaataatatccctattacacgtacacggctcccgagcaacgtactcaatagattgggcacataaaatatgtatgttaacgaatatttagaaggaatttaattaaacgcgttcccccctaatatagcactatacatgaagtgtaagtgtcaaaactcgcacaatgaaatttattttaagggtttcttcaaagaacggatctttgtgagattctcaaagaacaacacaattctcaattaccgctgacggtgttcttgattatattaatgagaaagtaatgatttgatcgtacaagtgtgctagaatatgaaaataagtgtttctgccttcaaagtcagagcgtttttgatagcctgaagttgagagcgtttttgtgtatttcctttttgtttgtcctctgaggtgctttttatagagttcgagaatatcacctctcgcgatattctcggaagatttctctttatctttatcttgttgaaggagattgcccttatcttccgaagattctgggatttctgtatccggtgatatcttcgaagattatctattccggggttttcggagatgatgtgttttgaacttataccggctaagtcttttgaagttttcctcgtctaacccgagacctttccgagccgtgattaagttgtcctcgggtcatgatcgggatgctcggtccgcggtattcgaagacaagctctcgaggcatcttggagcccgcctcgggacgatttgccaagttttatgcccgaggcgtttcgaggtcgggtcgggggaccactgctcatctcgtgttctcgacatcgcctaggtaaggattcttgacgagacctccgaggtgttttgtggtccggttcgggataattcatcgatggttcccgaggcggaggtgtggtcggctcgctatcctgggtgaaatccgaccccaacagtttcccccccagttcactgacttagcagaaagatgagcttcatgaatggatttcccgagctgactgttcgcccttctagttcagtcgcttcatcttcccggacggtcaaacttccgttacgtgccgccgactatttttgagaagtggaaaacgtttctcgcttattcccgaggatcacgcgggtgtttccttctgccgagcccacgcgcttaaacgcgttttaattgtttgttgcggacccgacgcgcttccaaaaactctatatatacggcgagccattcctttgggagttcatttgaagttttcgacgaaaaaaaacgaggtttgcttccttctctctgatcttgatatttctatcgttctttcttttccggtgacgtccgctattcttttgttatttatgattttttcggtttagaaattcttgttttctggtcgtttctcatctcattgatcgtccctgagccaaaaatgagttccagtcagtctctttcgttcccgagcgcttctctcgttgattccagcgactaaaatcatccagacgaccttcccccatctacaaacggagagcagtttggacgtcctctgaagatgatgttgtgtcttcttcgagtgccccggagcagatgacctctttcacggctcgggaagatatcaatgccgatattgctagggaactggatttgcccgatgatcccaagccgactctcgtccggaggtcccttgccctgatggctgacgaagccgggacatccaactggcgagacgtgcctgagcccttaatgccgacgataaagattgaggactttctttatttcggcccgaatgagacggaagatattctgtgtctcaacgagcatagggcttttgagaaagccgagaagaagaagaagaagaagagtaagaggacgatagtgccggatccccttggctcaacattatgcaccgagcggtccctttaggatctgagggcccgattcggtcttggtgaggtcaccttgcgtgtgccgagccccgatccgcgagccgataatccccccgtgggcttctaaaatctgtatgagggattcttttacggttgttttttgtggttgccagtccggagtgtggttttc

SEQ ID NO: 38409 - DNA, 8739 bp, Arabidopsis thaliana landsberg
aaaaaaatcttataataatttatttattgtaatagatttctttgtttggactagctattaaactttttaattttcctttgactttttttttttgaaaaaaaaaagatataaggaaattacttttaaaggacattttaaaattttataaggagaagaatatccatttgagctattaatttctcccaaatacattgaagttggacaaattaaattgattctgtgtaaatacaagattatcttcaaatgaaagtaaattgtagactatattcttagatacgtgtacgaacgattattactctattaggcgtgagatgcgttacattttaaaataaaataaaaaatcacacatttaagctaattctcccaagtagtgatggcttataatcccacaaaaaaaaccataaaataactaacaattttcaaaattacagacgaatatattacttcttcttattgtttttaaaagttgtgtttaattgagattacacacatttagggtttcaatcccatatcatcataaagtccaagaccaagtctaccacttcttttaggagtgtaaaatcaagtcccaagtaattatttatgtttcattagcaactgagtgaaaattagacttctttggttggccaaatcaggaggaatattaaaggtatcatgggtttgttctcatctaattcaaaaataacatttttgggaaacaaatctagaagcaaaaggaagctatacatttggaaacaaatcaccaattacttcttgatgtggtgatattcttttctatctattacatgattagaaatggtaattgttatggaaaaaatacatgacattgtttttgattaaaagggaaaacaaaaacgttgactaacgcttaaacaagtgttcctctccagatcgaggatctatgtgtttaatccaacggctaggaatcttcctcaaaccattaccaccaccactggctcccacgtgtacgatctctaatcctctcccgacgggtaagaacaccgatctcacgacacgtgtacctcgtctcaaaagaccttgccatttaaacccagggatagatttcagcgtggcgtttttacacaccaaaacggcgcccattttgctcgttttcgctaatcccaacgcgtttacgaactcgtggcgtttcgaatcaaccaccatgaaatccacgccggagattctctccaccacgtcctccgccgagtctaagaccataacctccgttgagtcactcgtaacggctcctctcatcaccgcctcgtactccgacctcgactcttcgtcaggaactatgcacacgtgtcttccacatgtgtgtatcgctgccacggcgagtccgacgctagttgcgatcggatctccacgtgaccaagtctcaacgatcagcctcgtgttccatcccgccgccgtagccgataaaaactccgccacgctcgagtctctgtagcttttacacttcaaagacacacatatagaaataattacatcaagattctaaattcatatatgtacatgatacatcaagatcgactaaataaaaaccacatatacttcacagcgaagaaaatattaattataagaactataaaaattgtaattcatatacatattgaagatttctttgatcaaaatacaatttaggtcaacaagttgaattgacggtgaacaaacatgaacaagaaaacaaaagatgatgtacaaaatgcgccatctgaattagaggaggattcttactgatctaacggtgtggatgtaagcgttagaggcagtttccggcgaccagacgagcctcatgatcgtattcttgtgttgatatcttgataaaaatgtttggctttcgagagaagaaagggtttctatataaagagaagttgagggaaggaaggtgatgacaagacggttaggcagttaggttaataaatgggtgtggtttggctttaaggaatggacttagcgttgacatttgtttaacccaatcatttacgtgtccctcattcccttctatcttcccatatatttactcacttcgattcttagattttgttttgaataacatttaatgtcgatagcgaatttatttctttaggtctagggtttaaattctacactctgtgcaacatattaaatgacttttgattatgatcatgtgtaatgtgttaagtattcgtttgggactgtgatatatatgtagtgtaacgtgcttgttaggttaatgtgtatacaatgacgtttatccctattttgtgtcgaactagatcataacccgtgctatacagcatgggcattaatattttgtataaattaaattatatattttgtttgaattacataagaaatagtatagtataaaaatgatgtcataatatttttcaatatttttactatttgcatataatgctgcattggattgactttgtttaaaaatgttatttttataataaatacaacatatgtagttttaagtaaatgtgtaaaatttgtatataattgttttggtaagaaacatgtttcctttgtattagaggatctaatttttggcctaacttagaattagtctttgtatagtattttggttacatttgtagacctaattggggcctatattagattatctttgatagggctgacgaaaaaacggacccgataaccaacctaatacccgaaccaaaaaactgggttagagcgggttaaaattttaggaaatttccttattgggtagagttttagtaaacccgtggatatccgattggtccagaaattatccgttacccaaaaagagtatccaaaaacccaaacattaatttaatatcgaaaatattaattatatttaatcgtaatattatctaattatctaagattataattataaatctaaatatgtcaattaattttggacctaaatatacaaaacaactaaactattcaaaaattatttgttatgtttgtcaaaatttagtaaaatatattcaaatataattaaatttattaaaacttaacaaatttaaaagttttttttgtttggagacccgctatctacatacaaatttctcgtttctatttttttgggtatttttagggtctgaaactttttatccaaactgacccaaacccaactggatccgaccctaaccagaaccgaatatttagaattattctattgggtagtaaatcatatatccattaatcccaaacccgaacgggttctacccgaactcgaatgggttactcatatgcccaaccctattctctgatttaattatctaaaagctcccaaaaaaatatatgttttgctgactactttttattcaaaaaatttcacatcctcttctgccaaaatcatttcataagacatcccaaaacccttgattccatgaatgaagaatcctaatttgaatataccaagaggttttgaaaggttttaagtttttgacaggtgtgtatgtgagaatgtatagacatcgtgatggtaatcagcttatttataattttaacttgcaatatatcgcaggtagacttatattttagttaaactaaaaacttttattgtaaagatgattataaatatatgatattattttatttgattttaaatgtatagtaaactgcgagttgtatatgttctgttgatattatttatattggttagcgtttaaaattatataatagtattttgattgataattctagtatttcatctgttgtataccgtcttgtattaatatcgactaaaacctgtcctaccatataactttgttccgtataattgcttaattgttcgttttcttttgtaagattgtactagattctgacccgcacgttcgtgcgggattttatattttaagaaatgtgttgtataaaatttctatttaatatagaatttttgttttagtgatatatattataatatatataaagaaaattgtcgattgttatttatgtttgtttacgacataatagctaatattgtgaattataagtcaaattctggagttttaaactgaaaattagattaaaaaacatcttagatggacaattatcttaggttataatgatgtaaagtatagttatataaaaaattatggttagagaattgcaatagacatttgtgttatggatggtgaaagacaagttaattttgaatttgaaaattttaatggtatgtgtgaactaagaatttgtgttaccatgttaaactatttaaatattgatgcattttttgtatatgtgttttgggctatatttaattggctgcttgtaaatccatattttgccaaagtaatttaaacaaaataatggcaaagagaaaactctaatattactaaacatattatctatagttggcccatgtagaacttgtaaattgttttgtaagtatgattcgattgtaaagatgagctaagtcatgttttctatcattgtatgttgaattttttttatgcataagtatagtaacaattctctaatttaaatgattcttgttatgtcaccgtaaaaacagttgataatatattcaacctcctaaactatttaaaaattaagattgttctattatttgctctttcttttaagtgatctaataatagaactcaaaatttgttatgatataatattttgcttgcaaaaagataaaaacttagacatttacactttagaatgaaattgtatacatttatctccaactatttttatctaaataaattagtaaacttttcaaagtaatgacactcaaaaattacattttatcatttatttattgtttaattttatattacaaatatggataaattaaataaaacaaaattatagtgatcttaatataaaatcagaaatataagtttatataactattttgcttgtataaagatatagtttaatatatgtcattttataatgagagtgtttaaatttataaaacctcatgtatttatgtaaagaatatatataattacgaatcaagaaattatggttcaacccatactcattttagatatgatcaaagacaacaaaatcaaaatacatctcatctttaatttatatccatctttggaaatgaaaacgataaagcaataaaaggaataaaagagatgattagtaagtgataaacatgcacacaaaccctatatctatagcatcagaaagtcggctaatatattttaaggctaatgacatttaaagaaaaaaaataattggtagctaggatttttgaaacaaattggaagttttttttttttcaattaacaaatccgcaaaatatggttcatttttaaggatagcaatctttaaattttaattaaaataaaaaatatttgaatttatgctagaattattttatagatatttacaatctaaaatccaaaaagtatttgttgaatatgctatattttaaatttaaatgatggtagtttagattacatatgacaaatataataaaaaaattttcctatttgaaaaatcaagaaattgttttttcaatgtgtaccaattataattaatcagtctagttttattaaggaaaattttaaaaatctaaactaaatgataatttgttattaaattatattgttgtttccaaaaatatctaataaattattaccaaaataaataagtttacatataaacgatttcgaattaaatagcatgatttgttatggaaactttattaaatgatttacaaaaatattgggtagctattcatttgttgatttaattttggatttgtgtttttttaatccaagatccgcttgtttatccgaatcactacatttggtatttaattctcatacatttatagaaatgtattggaataaatttatattttttcctttaactataattttagatttatgtttttttttgctaataatttaacatttatataatatattaaaggaaaaaataaataacatcgtgtatctctaaacatattacgatttgatcaaatacaaaatattggatacaatgtatgtcgcataatgttttggttatgtacttaatttgatatagttggtaaatgggaaaatatcggaatatatttataacataaatattattacttaaattttattgttaaaatattttgtatttttcaattaatagtatttgatttatgttgaatttttttatttaatctctaacaaattgaaaaatacaaaatatttcgatttatattcaaaataaatatattgatgatgaatctttagttatcatttaatatttaatgttatttcctttttatttttgtagacaaatcataccaaaaatattgacaaagcaaatctcagaatatattagattatttattcttgttatttgttttttcaaacttttttaatatttgttaatatttgttaattaattaaaattaataaaggatccgaatcaaaaatattcgtttaattgtaatatttgttaatttactaaattacccatgcaaaagttcatttagttagtattaaactaccctcacaatgttgtagttcacaaaatgcttcccaattaatagtatatataattgtattttgattgttaattataccaaaacaaccggtagtataccgtcatgccatataatctcgatttatagaattaaagatcatttgtttctttttttttaaaaaaatatttttatttacaagacatataatttaagttaaatggttcacacaatcacataatagtttgattcaaaataaaaacgttgtttttcatgaaacaaattaattatattattcgaaataattaatctggctggatataataaatatttatattatgtttaaaaataaatatttgtgttaaacaattacaatatatatttaaaacatcctaatatagcaaatgattgtcttacccttactgaatgattaggtttcacattcgtttcacaatacaattcgttttggcacaaacttcttcgttttggccaacgaattttcctatccgatttccctcaaaatcgccggcgaatttcctctccgatttcactcaaaattgccgacgaatttcctctccgatttcactcaaaatcgccaacgaatttcctctccgatttcactcaaaatcgccgacaaatttcctctccgatttcactcaaaatcgccggcgaatttcctctccgatttcactcaaaatcgccgacgaattttctctctgagaaaccccaaaatcgccgacgaatttcctctccgataaacctgttcttcgctgaaggattcagatcatttctctacgacgcaaacaatccccagagatatcgatagatccgacggtaaccgtttttataatcgattttatagtcgattttatagtcgattttatagtagatctgacgctgtttcataacatgttttgcagatggattcagagagtgaaatccttaaattgcctgaacaaatctacagagaaggtgaggaatctattgcactgggaaccgttcaacaatactcggattggaatttagttagtaaagtagaggaagctttaggcgagtgtttatttcagaagattagaagttcgtttcttggtcctctagttgaattgggaccaaaaatgaaggctaagaagggaatcagattttctggaaaaatctttcactatctcatgcagcagagagtgaaaacaaaaggatcaactctttggtttagagttgattctcaacctatccgtttctccttgagagagttctatctcacaacaggtaataaagttttacaatcgtttttaaagcttaattaactgtcgtagaatgatttacaaggcatttgcataactgtttgcgtagtttacaatcgtttttaaaacataagtaagtgtcatagataatttacaagggattttaaaagcttttaaaaggggtttacttcattaacaatcgtttaagaagcataagttagtggcagataatgatttacaagggattttaaaaagggtatgcatggtttacaaccgtttttaggcataagtaactagcatagaataatttacaagggattttaaaagcttaaagaagtgttaaacacgtttacaagggattttaaaagcataagtaagtgtcttaaaacgatttacaagggattttagaagtgtttgcatagtttacaatcgattttaaaaacataagtaaagtggcatagaatatttacaagggattttaaaaccttttttaagggttaaacatgatttacaatcgttttttaagcataagtaagttgaatagaatgatttacaagggattttaaaagcttttagaagggttaaacatgatttataatcgtttttaaagcataagtaagtgtcatataatgatttacaagggattttaaaagtgtctacatggtttacaatcgtttttaaagcttaagtaagtggcattgaatgatttataagggattttaaaagcttttaaaagtgttaaacatgatttacaatcgtttttaaagtatttactataaaacctgtaataatagtctctacactgtcttttgttcatacaggaattcaatgtgaacctgttcatagggaacttcgacgaaaggggaaagatcctgtaaaagaacctatactcttggtgatctcgaagatcgattgtttttaaaacctaaggaaggtgaacctgctgttgaagatgaagaaaagttgtgtcttgctgcagtagtgttgactgaaggaattcttttgacaccatatggaaaagagaagatacctttgccaagattgcagcatgcttttgattttgag

SEQ ID NO: 38410 - DNA, 2579 bp, Arabidopsis thaliana landsberg
ggaggtgctactcctggtgccggtgctaccccagcacctggatcaaccccaagtactggaggaaccactcctcccactgcgggtgggaccacaacaccttcaggctctagcggaaccactactccagctggaaatgccgcttcctcattaggtggtgctacttttctggtcgcttttgtttctgctgttgttgctctcttttgagtcacactcgaaacctagttatgtgtttgttttaccttactctccttatttaaatagccatgtatttgattctttgtgagaataaggacttgattgcaagtcattataaacgtcttatactcgtgattagcctgagaggcaatatatgattattcggttgcaaaataaaaagtgtgttccaatatcattgatattactactatatattaccatattttatggaaatttgtcatcttcgtgatccaattggtctcgttttcatgtataattagacaaaatttgccttctcaatattttcgatcaaagaatgctaaacaagtaaacatgacctgatagtgatccgaagttagaataatattaaaaagacataggttatttactaattcaatataccaacaatatggtattttttttttgtcaatcaaactccatatattaattcacggaaaacgactcttttctagagaaagcaaattagataccgtcgaacttacatgagaaaaacagaatccgcgaactcttgcacatatggtatttttgtttcagtggatacgtttctcacctgaattcacgactttttttgtggagatttgtaatctctggctttatagttaataatcgagaaaatgccaaaaagtatgcccgtactaagtacaaaacataagacccacaaattccacaataaattggcgcgtgtctgatcgacgtgaatcaagaaaaccataaacttgttttgttttcaacaaccaaagacattttccccataaaaatgtaagcatgataaagtctaatggttataccaaggtctttggtaattacactgctcctttttcttttttggtttctttgggttttcttttttctaaaccatctgaatttaactttattttatttacttcatttgtcaatgtgatatcttcaactttcaatactttaatatgtttgattttttagtgtagctacgatattcgataagacctatatatgacatagagttcttgaaatagcaagtcttggttttgccaaagtaagaacctgtaaaaataaaagcaattctttacagagatttttggttttaaatctacaaaggtgcaaaactcgttgctttcatttgatttaatgggtagttttcgagatagacaaaatgggaaattaatttgcaaaatgatttagttgcataatcattgggacactatcttatttcacgttttatataattgatgacataataagatagttttccaaagtaattaattgatgatatatgtggttggataagaaattatggtattatcatgtttgcctctcaactttaaatctaattaattatatacatacacgagtaagctaaataaaagtttgaccacatttcatatgaagaattttatctttccagatatctagaatttgttttctctacacagttcattgaagaaaacatagtacggaagagaccagaggttaattaaacgacactttaacctatcacgagagagactgagatgatcaaatcaaatgaaagaaaataaacatcaatcacatgcaaagagtgttcattaagcaaaatcactaagtttgtttttactttattttattacgttacttcaagtttttttttatcttcttggtactgtaaaaaaaggagagaaaatagagttggctatgtgtaataagcgaaccaaaagcaagccttccatgactgtgccctcaagaaagtagctttgttttcaatcccaaactgtcaaagtctctcttcacctcaagattaatcaaaacatttctctctctatctcatcaatgttactttaaaaccaatgctcctcttcttgttcttcatataaaccacataacctctcctccatatcttaacaatttcatagcaaaccctaaaattgagaaagagatagagagagaaagatgggtagaggaaagatcgagataaagaggatagagaacgcaaacaacagagtggtgacgttctcaaagaggaggaatggattggtgaagaaggctaaagagatcacagttctttgtgatgcaaaagttgccctcataatctttgcaagtaatggtaagatgattgattactgttgtccttccatggatcttggtgctatgttggaccaataccagaagttatctggcaagaaactatgggatgctaagcatgaggtaattttgctctctttttaatctaaagtttctttgtctcaaaaatattccatggccaaaatcatgtaataaggttttaatttctttaccaaaaacatgtcaaaagacccttgaatctttaaccctagatgcagatctactatagtgttttgtctcaaaacatatattctgagctagatatcatgaaattgggttatttaatt

SEQ ID NO: 38411 - DNA, 2545 bp, Arabidopsis thaliana landsberg
  unsure (1)..(2545): unsure at all n locations
caggtcgactctagaggatcccctgcacttaatctgttatcatggtgtattaaagttcttacccaatcatcaagtatttaagtaaggatgcatgcatgctcgtcttaagcgacctcatttcaacttagagggaataggaaagaactcccatcccttatagtagccggtaggcttactcaaatagccacctagctacccctctattatcctaaggcttcacgtcctaggtctatccttatcgtcctgacgatctatccaacgtttgtttctaaccagttttactttgaaaaagtatggtatttatagtttattgattcctctgtggtggtacgagctccgataccagttgtggcggaaccagccgaattattccaacttaagtgcctaagtcctgccatagaggctagaccacacttaaataggaataacacgtcagtccctcggatctagtccgacgaggccactaacaggatcaagtaccacgtactcactcaatggtgaggccagagcaaatacaataaaacataaaaccataaattaaggagtattaaatttattacaacatcatcggagtttaccaaaagtagtgctcattgtttagcatgcagcggaataccactaacgatacatcaacggagagatggggaagcctgtcccatcactcctcatgttccttctctgctgaggtagggtccctctcgactgtccaacccggtggcaagatggacggccaagtcacaccatcaaccatgtcttccagagaacctgtaaaaattatgccacaagcaaggctgagtatactaatactcagctagacttacccggtgtgaggagtctactcctctacctctagacatgaagttgtttggctgaggggtttggtttgccaaaagcactagctgagtctaaaatcaagttttagcttttcaagttttagtatgatcctctttactagatgtgtacctagctagtcatacatggtatcaaacattttatcaatcaacatcttttgaaagtaacctcatttcacttcttactcgatgtagcagcatggatcaagcagtctcattagctgcgagaagtagacgattcgaatcnnnnnnnnnnnnnnnnnnnnaaatctaaacacacgacgtggcgaggcactccgtccccacacacatcaaccgtccccatcgattccctgtcaacagaannnnnnnnnnnnnnnnnnnnnnntgccccactgaccccgactgacgtcgtgcagtgaccgcacttgtacccaccataaccggaatgggacactacatcttaggtcgcgtgaggggtaaagtttgcgggcaggttcactaaggtactaggattgccgatttaccatatttctcggcatgtgtttagtacgttcaaacgcttgacacaggtatccgcacgttaatccttattttaattttccatctcgtagacaaccaatccccatggattgttgtccacataccagcatcattatgatatgaaagtgggtacaaccaattcctgacctcgcgcgagtgctagaaaatcactcaacttctaccaagatccctaattagtaaagcagctactcgacctagcatactagtatccatctcaaaaggattcctgagatcatgcaactagggtttcaaccaactcctacacttaagtgcacaatacaagcctacaatcattaagtgtagtaaaatagcatataaaacaggttatgcataaaaccggggcttgccttccaaagcagtggcaggcaggtcctcctgagttggctctggtgctggatctggggctacctcctgagcagctccttgctccggcacgaggatgtactctccgtcagcaagattacaatctatcgagatgcaatgaacatgtatgtcatgattatgcatgatttaataacattatgcaaaagaaactaagtcgagaagtaacttagggttttcttagttatgcggggcttctagtggtacatggatagacttattattctttggacttaggttttcctttaggacaacatattggtttggtattgctttgatgtatttttgtggacagcaaataaagtttttagggacaacctttattcatatctttcatttctcttcccttaatttccatttagggtttctagggtaggtttgaactacaacagggttttaatattttccaaaaattctgtaaaaattacagtgggttgccctttgctattctagcctgttttaagaatttgaggctccacaaataaagtctaagcttaggacaaaaagaataaaaattgggtaaatgggccactttgtactacaactcttaattagaggtggggtctgtcctaagggttatttttgttggcatttaacagtaataataggcttctgtgccaaaaaccacaaaaggctaaggggtggttatttagttatgattttctaaagtttaatgccaaaaaggcactttctactacattgttatttgaaaaatgtcaaacagcagatttcatatttttcttaagttcttattagcaaaacattttcta

SEQ ID NO: 38412 - DNA, 7505 bp, Arabidopsis thaliana landsberg
  unsure (1)..(7505): unsure at all n locations
cgtttatgcgttagttctcggagaaactgtaagcttctatctcgagattttgtggacatgtttcggatagttttgctcgtggcaactaagatgaggactccaatacttcggtcttgtggcaatcacgcaaatttccgagcctcgcgagctcggaatcggtgtttcacctcgcaacctatctttttgcatttaaaagcgatctatcgcaatttgagtagtaatgttgtatttatcttttgtagattgttttattctgttccttgtaatctttgtaattttgttaaaaaaactaaaatggtataaaacttaatcttttaccaaaaaaatatatatatatatatatataactttagaacattaactctaaaataaaccgagcaactatatcacacatatctgctcaaatcccaatcccgagaaaaccatttttttaaccttataagtgatattaggtaatactttaaaccttgatatttttattagtattataaacctacaaactgttttattaacactttcaaccttcgaattaagttttctattagttttgtcctaaaagacaaccgaaccataactcccgtcgacaaaaaatttaaacatattttttttaatgaaataattcaacattaaaaataatttaattttactttttgacattaaatagtttttttgtttcgtcaatcaaaatatatttactttttgaggttaaaaaaaaaaaaataataacacattttactcagaggaaatctatccccactactacatgcagaggtggaagctcttctttgtacgatgaagtgtatgaatggtgccgacaaccaagatgtagttgttcttacagactgttcagatctggtggagatggtgtctttcccaaccgaatgaacagctttcttagtgtatttggaggagttacagagcgacaatgataagttcacaaggaattctttatctttaatctttagtagctaatgttgaagcggttattttgacacaaaaagatcgtacccaaccgattcgtattatatatgtaaacaatattcttcacgaatgactcgtttatttttggatgacaaaaaaaaacacattttagttttctgttgacaggagtctattatcttttagaaagatccaaacagaaaatttactttgaggtttgtgtgttagtaaaataagtttgaaagtttatagtaaaacttgtttttcgcttttttaacgtcaaaagtaaaattatatcatttttttgtcatcaaattttttttaaaaaaattatatcatttttaacatcaaaaattaaaattatatcatttttttaaatcaaaagtaaaaatattatgattaaggagatacacaaatactattttacgtcaaaggataaaactatttcgtaaaataaagtcttttttttttgccgtctagatttactatttattacaaattatgaaaattgttacatagacgattctaccacggtaaatacagattcttagatttaattttctttttttgggtgcaaaattccactaaaccgttttgataaacttttgtgcagttagtttggtcaaacaataagaaacatatttagtttgtacagcttttgtgttctggtaaccaaccaggtttggttcagctttacctaaaccaccatctatcattagctctttcaattaatccacaaattaaacttctttagcttattttaagtcgccttgatctcatcaatgtttcaaactttttcttcattaattcgcatcttctaattcacatgttcatgttgcgtatggaatctccttagcattaaatgcaaattctgaccccaacccattatttatcatttcttcagctgcacgtttctttctataccgtgagaacagagaacatgggagatcatttcgtgctgctggtggatcggttgataacagaatccacgattgaggctgcgattcagagcaggaaccagatgttgcaagctaatatacccgttgaggaatgtacaatcttggacgataaaacacttgagatgctgcgtaacggagatttgtcaatggctgagtgcaggatctgtcacgacgaggacttggattccaacatggagactccttgttcttgcagcggcagcgtcaaggtaaacacaattagaaacatttttcccaagttaagagaacattggttggatcggatgatcaatgttgttggtttaacttggcagtatgcgcataggaggtgcgtacagagatggtgtaacgagaaaggtgataccacctgcgagatttgccatcaggtttgtctcctctcttttttttttttcttctctttcggagaagagatccctcccaacgtgactcaaatccagcacctccacccgggagatttaccactgggccaacagctatttgtctcctctctttctattgtccgttctgagggacacgtgatgacaggtcgtatgtgggtcgctgttcaggaattcaagccggattatacagcgccgcctccgttgctagagttaggccatgttcctctccatttcaggggaaactggggaatctctcaacgggagcatcgtttcatcacagttgtacctgctgattccacttttattgaccaaccatatcctctttcttccaccacaagcttcatctgttgccgttcccttgttctcattgtacggacccttcttgttttcccaccaaaccaacactttgattttgtctttactcataatgtttgtaatttgcagttcatggctcttctcattctccgacataccctccctttagtcctcaccggatcaaaccttcatgtcttccctttgttcacggtgagattattactcacaacagattcaagggactataacttgaatgaatgaaccctaagtgttgttatttttggtttcagttgttatttctgagaatactcggaatcatgctacccatctacgttgtcaccaaaacagtcgccacctgccgccgacattctcggaccttagacacctctccctccgatgattcatctgatgaagattcagattcatggcgcttgcctcaaacgcaatcttacattataggcgtacgatgatcactcattcttttctttcacacacacacacaaagtcaaatgacactgtaaatataacttctggcttatacatgtaaaatgttggattggtttaacagattgaaacaaaaaaaagtatctcattaggaaagctctcttctcaagtgttttcccagctgtgcaatgcagatagatagacaaagaagactcatcttgaattcttacacaacaactctgaccatatgatccaatacaaatttataaaccactataaagattcctataaagatcccaacattcacaagtgtctctctgtgtttgtatcccaaaattcaagacaagaatctggactatctttcanaatcagagacaaaagttacaaggaaaggacctgcaggaagcgactttggtatatcaactccaaacaagagcctttgtgtttgttgtctgtaagttatgaaaacatcaagaccttcttgtagtttagtttcaccttctcctcggcctgaaaataaacgatggcccacaaatggtaagaaaacaggagttggtagctaccactagatttaaatagatagatggaagtaatacttgcggttcttctgctgtgtcctccagtaacaagcaagcgccccaaatgcacagctggcgatggctattgccaatgcagctccaatcggcacaaccagagcattggtggccactgttaagtcttcagtggctgagatggtctcttccttgctccggctgacactcttttccttgtaaagagatacgagcttaggcccatagtagttcttcaagaacttgtagacatgttcatggtcccactctatgcttttctgattacttgaaagataacacaatgggcaaagctcctttggtggccatataatcttggggaacttggggtcacctgtaccaagggaagcttcgtccttcatgagtctctcgttgaccttgttgtgtgtgctccacacccacaatacgaaatcacgtgcctttttgaaaggggttttgacgctgtccatgaaacacatgcatatgaggttcagttgagcaaataccacgataaatcgaactgtgagttattattattatttttacctcaagcacatgtcattgaaatgcaggcggcattcatcacacatgaagaagttgttgacgaaatcgcatattgtcgtgaatgcaaaatgactttctccatcctcaattctcacggaaagcgaatgcatcagaacccataatccacagctacagtcaagcatttaaggaatagttcactaaactgaagtgaaggatcatggtatgaagtttaaaaagaaactacagtacctaaatccgcgagtatcgttcttgctgccacggcaaaacatctaccaaatatgatattaggacaatcagaactctaatgcggatatacaggaaaacagtaatagagtcggttgctagcactcacgtagtatccacgcggaacatcctttccacaaatagggaaatttcccagggtatcgttccctccagatttttcgtaagagcaatttccagaagggcataaatcatcatagttcactagaatttctgcagctcctttccgacacctatagaatataaatttcacaattagtgtggaaaaagaaagtgatcatcaaaatgcttgtgacggcattaggataatgacactttaatttacctcctggaaagatgatgtgctgctagaagctggataaatcttataaatgaagcacttgtttcagatgacttaatggcctgtacacgacatgaaactacttattttttaacgaaactgagcgaatggaagaaggtcatatacatacacatctctcaaccttatgtgctaaaatgatatcaaaagcttctgcggttgcttcctcgacatcatacacagcctgagaaatctgtggcaaatcaacacccggttatcttaaagctgtttaatcttagacgaaacgctaataatatcagcaaagttaggcagagataagtctagaaacctggttgtagtcggttagattcgacagggcatgttcgtttttgaatttctgatcatccaagccataagaactgcaaattattgagaaacaaaacagactaagtaagatgtgatattggcaaactcggtaaggaaaattatagatacacttcaaagatgaaacatagtttgaatctgctagatatatttcgagtcaatgctgaagataaacgtccggtggatttgtggcacaaacctgccaatctgcttgttaatccagttgagcaaacgctcagcagtgcggccgtcatcaataacaagtatctcacttttatcctttttaggttcccaactgccagagacaaacttagtaggaggaccccaaaagagcattggatagtgagaaacagagaacttgtcacagagcttggtattcgtctgcgctgccagggaaatggaccgacttagctcagaaacagtgaaccaagagaatttaacatgattcataaaaacattcggagcatggagtaaataccttcaaagcacaaacaactctagtcatcaaaacgattcctggatgtattgcatctggaccattgaagagccttgcaaccttttggtaatgaggctgcataagagtaacactttttaggcaacgaaaatctccaaagttgaggctttgaatagtttatgttaccttgtagtttctacaggcaggacacctagaatcaattgaaaacgatacacgcatcagtaaacgcccaaactagtaactgaagaaaatataaagccttctagtagcaatgattagagaagaagcacactaataggatcataaagttcaaatcttttcctataagaacacacttgcaagagagcccaacgctagatccagcaccaaactctgtaggtagtagataaactgcaaaacccaccaaccaaaagtggagatttaagtgaaaagtgaaaagcaatcgaagaactgaccagtgagcgaagaattcgacgacggcatacttggcgggggtgtctttaaggactgaatcgaagttggtagtgttcaattcaacagctttgtctttctgatcggagatttcccggagaatcaagcgcgagcccggggaagaagaggaagcggcgattacaaggccggcgaacaaaagcagatgcaccaaagacatcaaatccaatcgaactatgaacccctcctctcacagatttcaaagtttcgattcttcttctcaacagagatagatagagagaggaagcgaagatctacagaagaaagcttccctcctcttccactgagaaaatgaaggaagatttgtgatatagaagctcctgaacgacgtcgcacatctcttacccactctttgaactccgttactgttgataatgggctttattcagacaacattatttgggcccaattgggctatcttatggttcactgatttaaaattcacaatgatgatcaaaacacattatcggcttagatgggagatttatggtcgatactgttatcaaacattcaagcttaacacttattttagacatacaaatctagaaagcaaatgctaagacctgaaatttactacactgaaacattacatatagagattccattcacgatgaggattccagtacttcggtattgtggcaaccacgcaaatttccgaatttcgcggactcaatcggtgtttcgactcgcgatttggcgaccctcacttagtagcgatctgaatctttttgaatagtaatatttgtctctaattttctggagcgtgcttttatctgtttccgtaatctctatgatttctgtcaaaaataaaaaatgatatattttaaataatatagggatttatatgcaggcaatgtgtttaagtatcacagattacataatccaaatactaatcatagtattgctaaaatccccatttatatactccaaaaaaatgcttcatgtctagctaggcgaatcccccacattatgcaagaattgttttctatcaaacccattatttgtggacctatcgaagccaggcaaaaagaacactataatgtgttggtcatgtgcatatcttcaaataataaaagactacttatgtggctgataaaaactagccgcctattgcagaatgcagagtcaggtgctcaataatatgtgaaaattcattcatttcacttatcaaaaaactccttataatctcatataagtgttactaaatacatgaatatatatgttctgatacgtttatgtcattgtcaatgaatgatgaatgtagttggtgtacatgcattagtcgaatcttcaatggtagtatagtttttgattactcttgaacattgtgaagcttatctatgaacaaaaaaagaaagaccaaatgttttacagcctttcttttttatttctttataatcttggcagcatctagcaagcaagcatcgagta

SEQ ID NO: 38413 - DNA, 10972 bp, Arabidopsis thaliana landsberg
tgaagcatgtgacatcgtattatatctatgcacaaacaataaattcttatcccaaaattaataaacactaattaataatattctctttaaactaattattattttctgttaagttctcttgaaactaattatgaaagcaagcctttttttttgccaaactataattttcccctcgattatatgatcaatagagtggtccaataaattgttttgaagtttagaaataagcattaagtaggtataatattctatataattcttctcactttattgcaagcatcaacatcgtcccaagttttatataaaatggtccataaaattttaaatcttagtatttcgtaacaacttgataccaacctctctgtatagctgcttaattttctggtatatgatctgtgtccatccctactagcttactactttactactacttcgagcagttacttatttgattttgtaaagaatccatttcgtttttttttttttggcacatgaaaattacccataatggtcaaattcaatactattaaaagtgaggaagaaacgacatgagtcaatttgttacactggtttattatttaaagaatagaaatcccaaaaacgtctcaagtttcaactctttctatgctgagttgtattgtatgtatgtatctaagtatctaactataaactaaacgaaatacagacaataaattaatcgtgaataaaaaaaattcttaataaacatccaaatatcaatattttcttggaaacttatctccaaatggaaacaaaaatcctaataaacgtaaccatgattaaaagaaaagagttgcataaacatccaaagaaaaacaatactattatatatataaaaaatccaaatcaacatgaagaaagtaaaatgattccaaatagacatccaaaaatcatattttctttaaactttttttattggttttccacaaatgaaaatagaataaaatagtgtctctgaattaagacggagtcgtaacaaatgacataatgagccggtcaaataaaccgccaaaattgttctgttataattaagactaatttctgagtcaaaaaacttctcttgttcccttaagggccttaatcactattaaccttaactagtgacttaatctcaaacttataacacacctttcacacatcaacaacaccttcttcatcatctcctttctctgtctctgtctctctcttctctctcaaacctgtaatcatggcagctcctttgttgatgatcatcaagaaccaaacagatcaccgacaagatccgaatccgaacccgacccacctttcctcttcgatccaagaagccaaatcaatcgccaaaatatctctcccactgatcttaaccggtttacttctctactctcgctcaatgatctcaatgctcttcctcggccgtctcaacgatctctctgctctttccggtggctcactcgccctcggcttcgctaacatcacgggttactctctcctctccggtctctctatcggcatggaaccatctgcgttcaagcctttggcgccaaaagattaaacttttaggccttgctttgcaaagaacacacttttgcttctcctctgttctcttcccatatctatcctctggctcaacatcaagaagatccttctcttcttcggacaagacgaagaaatctcaaaccaagctgagatctttatcctcttctctctccctgatctgatcctccaatcttttttacatcctatccgtatctacctccgatctcaatcgatcactcttcctctaacctactctgctttcttcgcagtattactccacattccgattaactaccttctcgtttcttctctcggtctcggccttaaaggagtcgccttgggagcaatctggactaatgtcaatctcctagggtttctaatcatctacatagtgttttccggtgtttaccagaagacttggggaggattctcaatggattgctttaaaggatggagatctctaatgaaactagccatccctagctgcgtctcggtttgtttagaatggtggtggtatgaaatcatgattcttctatgtggattgttacttaacccgcaagcaacggtggcatctatgggaatcttgatccaaaccaccgctttgatctacattttcccttcctctctgagtatcagcgtatcgacacgtgtcgggaatgaattaggtgcgaatcagcctgataaagcgaggatagctgcgagaaccggacttagtttaagccttggtttaggtttattggcaatgtttttcgctttgatggtgaggaattgctgggcaagattgttcacagatgaggaagagattgtgaagttgacttcaatggttttaccgatcatcgggctttgcgagctaggaaactgtcctcagaccacattgtgtggagtgttgagaggaagtgcgagacctaagttaggagcaaacataaacttgtgttgtttctactttgtgggaatgccagtggcctgtatggttaagtttctttagcgggtttgacttcaaaggactatggctcggtctatttgcagcacaaggctcgtgcctgatttcgatgctggtcgtgttggctaggactgattgggaagttgaggttcatagagcaaaagaactcatgactagatcatgtgatggtgatgaagatgatggtaatacaccgtttttattggattctttggatatagaagaaaatcttgtcttctagttttgatttattggcactaacgagattcgtttcattgtacactcttctaattcattattctaggaggaaacatttgattgttggattttttttcaaatttatgttgtgagatatatattggatttttttttaaatgtaatgttgttgatttgatttgattgtaaaaatatactttattagtattaaacctcatgtcatttcaaaaaaatatcatgggagtgatttgttgtcatgagaatgactttagaaattgaatgtgtaaacataaaactatccttttcaagtggttcgagtgtaatatatatgaatctggttaagcaattaaaggacaagatagaagttggtttcgttgccgggaaattcttatgcaacaagaaaataaaaataattattaaacaccatgtttagtggtcctccataggcgcgtgacgtttaaggcgcgtgtaagtaacgtaacggaaagagttgtgaaactttgacgacggcgagaaaatactaatgtctccgtcaaggtcgtcgtttgtgacagccgacgccgtgaatgacccggtctctttgtcgtcttcttcgtttactctcttttcttccactaacccgacccgtttcagtgtatgtttttctttggggtgttaaattcacatgaggtgacaaaataccaaattagagttcaaatctgaataacaaaattgtgtccacttggttataacttattataagaatatgatattttgcattatagactattaaaaatgtaacaaacttcatggtgtggtggcaaggaacaaaaaaggcccataaggtgaaacatgaagaaaggagaattagttatgaatttgccactaaaatcaaagctattttcctcaactgtcccaacttgcttttatataacattagcttctaatgtccttcattctccatcacctcacttcctctttatactctcccttcaattattgtctacatttagatttttaacacaactgaatgacactataatgatttagaaaccaaatttgaacttctatacccaaacttttaactttgaatatgatgagaatatcatatcattttgcaaatctggtaaatttgatatccacgatcacagtactatcatatgagatgcgtgaagaaggaatagcacatccaacaaaccaagatgtatatcggtggagaaaaaaaaaattactttcaaaagccagccttggattaaatagaccaataaatgtttagggagtaacaaattctacgaagaaaaagaagaagacatataaaagaataaattatgtaaccccaatagaataataccaattctagatcagctccaagaacaatgcttcttgtttgctcgttaaaccgatatcgtttagagtcgatgagcattctccatctccaaaagcacgccgaggatatggccttacctgtttttgatcacacaagagtttatcaaatcaactaaaagatgtctcaaatgaaaatttttatttagcattttatggcataaaccacttaccagcctataagtgttgggcttcacaactctacagatgtctataaagtcgaaaagtgactgcaaataagaagaagacatgattagtggttattaaagtttttcatatatttgaggataattgaagctggttttgggatatttacttggagtttgttggatttaaggaaccggcggccatgacgggtgccatctggcagcctgacttgaagtgtaatggcgttctcttccccggctggtggctcttgaggcagagatgcttcctttgaaactaattgcctctccagctcctagtaagaaaaataaattggcttacacgcgagataactttcaagaatttgaggaaactcatccaagtactgcatacagcttagtatctatgatactttaaacctagtagcgatgctagtcctaactagttcacacacgggattagagtgactcatgtataaccagaagcacacctgttcctcttcgaccttcctgcgagcttcttcctcctttctctttgcttcttcaatagcttccactctagcagcttcttcctccaatcgacgagcctcagcttttaccctgtcagcttccagcgatgcaagatactcatcatcctgcacgagtttacatttcaacaagaataaaaactcatcatcatcagtatccttcgatgacctaaagggggtgaaactctctacccattacttctattcttgtcacaaggatagatcaataaagagtattctccaatcaacttggggaggaaagaaacaaaaaatgttcctaacctgctgttcccgtatcaacctctgagctgtcagcgaaggtgagggtggacgctgtgtcctttgcggataatgtgcataaggaacaccatattcattctcagaaatgccaccaaacatggcagcctctagcatgatagcttcatcatgttcctcagaagaaatgcctccccacttataccagaatgtaataagagtattagctcaggaatggaataactactctaggatacctacttaaaagtaatacaattatacaggtaatctgatcgttctcatataggaaacaaacatatatcttttgctacctcagaaggaaaaccattgccagcacccggtgaatgaatagttgcatcttctgcttcagggctccggggaagatcatcattaagtgagctccgagatccagaaaccgcacgtcttggtctgtggctaacaaggggttcctcttcctcctcaacataatcagggtcatcgtcatcatcatcatcatcatcctcagacagtgagctaggtgctgcaaatctacacatataaaaacaatttcttgggacattgtctaggaaacacagaagacaaactgatagactacaaaacagaacaaactaaccttccatttgaggctcgggaaccctgctgtactggaatagaaaccatttcagaagcttctctttctgaggatgaagccttccaaccttcactgcgcaacacttctcgctcagctgactgcactgtgacagattttgttacgtcatcaccagtctccattttggaggcctcaatagcagctcgaatcatttgttcttctatatcattgtaatgttgcatattattttctgcagaaccaacaggtacagcatgcctactttgtccggttggagcagactgattatcatcatcacttacttcatctataatgaccgcctcttgggcagctggaccgtgagcttgagctgtctcggtcacatcctcaatagtaggagcatcattagattgacctgatggcccattgctgtctttaacctctataggtatctccctggcctcccttggatgactaacaaatgggggacgcgacataagaggatcattatcaaatagacttctcccaaagtttggatcacgaagcgggaacgggtccgttgttctagcttcagagaggactggagtcacaccatcatctatatccattgcatcatatgaattttgatctccatgagtaaagtatgcattcacagctctattgagattcccacgatactcctgcaataatgatagcatgtaagttttggcaaacacgaggaacaccagccacacacaaaaaaaaaacttacaagttataatgatgctgagacaatagaatgatgactaaaagataagaatgcacaaaggacacaataaaaagttctctaaacccaaactaaaattgtacacaagatgagttctgaaaaaatttttcattgacttcaataactaacttaaaccccacatgaatatctctaaaataccaaaaatccagaccaaaatccaaaaaagaacaaaacttttcacaactaatttcacaatgagcaggtataaactcgtttagatatcaatgaacaattaacaaaaccaataagcatgagaattctgtaagaagtccacataaaaactcaatcagataatcggataaactaaaattcaacacaattaactccaattgcgacctaaacgcatcaagatgagcttaacaacgatataacaaaagcgtagaggagatataattcgatgatccaacgaacaaccacttgagcgattcgagaaacttccaaaaatacttcaatcaaaaacaaaataacatctaaacaatagaaggaagacggaaaaaacccagggaagtgtaattgaatcacctcgagcttacgaacggcgacggcattggaagagccggtgatggtcatgaaggtgtcaatagcttcctgagtaggtgtcgccattagaaaagagaaagcttgagagaagtttttcgtcggagatttgtgtttggagctggagtgaaggaggaggcaagaattaatatatgttgtaaatcacaaaaattgcagtgaagaaaggaattggatcggtgactcttaagatttttaaagccttttttagggtctttcttcttttccattttttttaattctccttttttatttggtttggattttcttaaactttattttctttattctttttgtatattttctgtgatacggttcagataatatatggagtgtcctaatctgaataactaaataaataattattcagttgaaattggattttttttttcagagtctttatattttataaactggaattcgagtcaaattcagagtggattaaacttatctttttagtttttactagccaagaactttttgaccttttttttaacatgatattaattgttatagtgtatatacattaaaagttagataatttttaatgtacaaaaaaaaaagttacataatttttttttttcacaccaattacatattttatttgtcaatttgacagtaatagatggaaataagccttaaaatgtaaaggcttttgggtccaacaaagaaaaatcaaaaccaaacccaaaactaaaatatccaaaaatatcctcactttatgatcatcccaatcttccctctatatagtgcctttaaaggagctgtcatgttctctttcggccgtttgtaatataagaattgtcgtttttgtccaaaaaaaagggttggctttcagtttgtgtcccagaaacaaagtaaatctttagataaattgaaacaaaactagctttgtgactccaattaaactttgcttcctctaagaaaccttatggagagtattattctacaatgatttgaagtatactactaataattgattacatttaaattcaactataatttattgttattgttcttcaatcaacttgaactttgagtttattgggcacattacttttagaggaatgtgaatgtgaacattgaagagacgtgtattttattttcttcttgacaaataccgttggaggtataaaaacaccatcaaactcaggcccatttggcaatggcggcaacaagaatgggtattatattgaggttaatttcgtcaatcaccacttttaaatcgtgacaaattcgtctattatctctcaatcttcttcaaccttcaattacatcggcaattctacaagtggcagcatcctattagtaacaaacacacgtggcgtaagctaatgcgtcgtagtgtttataatagctggggtttgttaattatggcgtcacgagtgatttaagaagcagctgaaaaataataaacaatgagggaatgccaacgttttaaattatatttttaatttgtgaattttcatcagagtcggatcttgatgcgactgctcaaacagagtcaccggcgattacgatggccggaaacaactcggaatcgagtctctaccaggttttggtggagtggtgtcagagaatggagacgagtcaagcgagactaagagaggatgtcgatgacttattgcttcaggaggagagtcgaaccggtaaggaatcggcgacgggattggagacggaggcggagaaagaggcggaggtagaggtggaagcggaggcggcggattcctgggataatccgacggcgacttgggagagagctgtttctggattctatttcgctgatagtgcgtatcggactttgatggattcaatgggacacgcgattcatgtaacatcagctgcgtctggagaaattacattctggtgagcttgataagttcttcttcttcatctatggtgtttgtagatcaggagcttatagtttttctaaatactgtttcattgaattgtgtgtttaagtagttaaacaaagttatatatagcgattcattgtatatgcaagtggacatttactatttgtttctgagtggagagattcttttattattattcaggagtcgttctgctgagaatctgtaccattggtatgctgaggaagttgttggctacagaactattgatgtgcttgtaaccgaagaataccgtaattcccttactggtatcaggaatagggtgtgccgtggagagacttggactggtcagtttccgtttcagaagaaaactggtgaactatttatggctttggtgactaaaagccctgtgtatgaaaacggtgagctggttggtgttgttactgtctcgagcgatgcaacccttttcaataggatgcatccactaagtaatgagcatcaacaacaagctcgtagtaataatagacatgaatcaaacttgagaaaacatcagtggcacctcccgaggcctcagatcgctgcagcatcacaggttccagttgtcccacaatattcatcagctgttgcttcaaacctggtagatctcacatcatgaatgttcgaagtttctcagtacttttttttatataataattcgtgtgcaacatgaatgattgtttgttttgctgttttctgcacaaaccaagaaggcgtcgaagcttctaccacagagaaatggagatgattccttcaatggaaatcataattcgaggagccgagatgaaaatgttccggttgttgcctccacaactttcgagaagtatggctcactggtaagtcttcgttggctccttagacaagacacttctcattgacatttcttagaacgattattgtctcatgttataagctaaatctgcatatatactagtgtaggcggataagtttttggggaagctgcaaaggaagattactggctgccaaggaaccgaatataatgagcctatcttaagaaacggtataaataaatcagcatgtggcagtggaggtagttctaaggcttcttatgcagttacctgcacggctttcagagacaatggcaatggaaaaccaaaaagggctagagttagaatttcagatgtctatggaaatggagctgagggtttgatacataatggagatcgctttcagtatattgggaacctgggacaaagtaaacctcccagaggactaaaaagtggtttggtgtctggcatgcggggaacaaaaatgtcggacctaaatggtgagatagaagatgcttggaatactcgtcttagtgttgatcccttgccaattcttggagtcaacagcggtaggcaacaaagtcctgtcaaccaaaggaacaatagattagttactgattcgtcatgtgagatacgatgggaagatctacaacttggggaggaggtcggacgaggtgcatttcatttaccaaagtcttacactcgttttcacgttttagatatgcaaattcaatacagatctgtgtcattgatgtttaaatcagattacaagtatttctgatgcgttacattttctcacaggttcatttgctgcggttcatcgtggagtttggaatggatcggtgagttttctgtaatttaagataaaataaggatggttctagtattagttgcacatgggtagctaactaactagtccaatctatttggaccaggatgttgctattaaggtttacttcgatggtgattacaatgcgatgactttaacggagtgcaaaaaggaggtatgtatatttagttctctctgctatgtaagtgtttctagaagttatccgtgccagacaaaaataaatcagttgtgatcaataatatcttcagatcaacatcatgaagaaactgagacatccgaatgtgctattatttatgggagcagtatgcacagaagaaaaatctgccataatcatggaatacatgccaaggtgagattattgacctatggatctggaattagtagtgttactccttattgagagtgttatattatgctgcaagaaattacagatgaatactctgtgctaagttacttctatactgttttgatgattagggggagtctttcaaaatacttcata
